United States Patent Application Publication US 2019/0348154 A1 - sequence listing, part 129

SEQ ID NO: 493489 - DNA, 1164 bp, Stenotrophomonas maltophilia
gtggacctgttggggaatcagggcttcacacctatgttgcttcgttttcgtacggtcgtcgccgcggcgatgctgaccgtggctgcctatgctaccgccgtggaagtgaatggcgggcacccggacacctatgtggtccgaaaaggggatacgttgtgggatatcgccgcacgtttcctgcagaagccttggctgtggccggagatctggcaagccaatccgcagatcgccaacccgcacctgatctatccaggtgacgtgctgagcctggcctacctggaccgggtgaccgtgtcccaggccggtccgcgccaggaggccccgatcgacgccattccgctggcccaggtcgagccgttcctgaagcagctgagcgttgtcgacagcgtcaagcagctgccctacgtcgtcggcctggaggacagccgcctgcgcgtgtccggtggcgacaccgtctacgtgcgcctggcggatgcccaggtgggccagcgctgggccgtggtacgcccgaccgtgcgttacgcccagcccaagccgaccgaggacctgaccgccaacggcgacgtcaccccgggcagcggcaacctgtggaaggcctacaacgcacccaacgcacgtcgtggcgtgctcggctacgaactggcccaggtcgccaccggcaccatcacccagatcgccggcggcaaggtcgaggcctccacgctggtgctggacaagaacgtcggcggccgcgaagtgcgcgccggcgaccgcctggtgccggtcgaagcccggccgtacgacctgcagttcgtgccccacgtacccgctgcgggtgtcgagggcgtggacgtgcgcgtgctggcggtcaccgacatgttcaccgccggtggcccacgcgacgtgatcgcgatttcggccggccgtgcccagggcgtggacaacggcaccgtgttctcgctgtggcgcccgggccggcatgtagcgcaccgcatgaagtacccgacctcctcgcgcatggacgactcgctcagcaccggcgcaggccgggtctcgctgccggatgagtatgccgcgcatgcgatggtgttccgcaccttcgacaacgtcagctacgcgctggtgatgcagggcgtgaagccggtgcaggtgggttacaacgcgctgcacccggacgcgaagtaa

SEQ ID NO: 493490 - DNA, 1128 bp, Stenotrophomonas maltophilia
atgaccacacatgcatacgaggcgctgctgcgcctgttgatggcgggaggcgcactggcgtcccgacgggccctgctgcaggccgcgggcgatgcggaaaccgccatcgcgcaaggcactgcgacctggcgtgcgcacggttgcacgccggagcagtgcgccgccctggaacgccccgatacccgggcctggacatccgcccggcgctggctggaacaggacaaccatcacctgctgccgtgtaccgatccggcctttccgccatcactgctggaggtacccaacccgccgctggcgctgttcgtggccggtgatccctgcctggcctggcgcccttcggtggcgctggtcggcagccgctcgcccaccccgggcgggcgtgcactggccgcgcgttttgccggctgcttcgtcgaggccggcctggcggtgaccagcggcctggccgcaggcatcgatgcggccgcgcaccaggctgcgctggaggccggcggctgcaccatggcagtgatcggcaccggccctgaccgggcctatccggacagccacgcccggctgcaggcgcggatcgccgccgaaggcgtggtgctcagcgagtacctgccgggcacggctgcccgccccagccacttccctgcgcgcaaccggctggtggccggactggcgctggccaccgtggtggtcgaggccgcacagcgctcgggcgcgctgatcaccgcgcgcctggccgccgaggcgggccgcgaggtctgtgccctgcccgggtcggtgctcaacccgcgcgcggccggctgccatcgcctgatccgcgagggcgcggcgctggtcgagcgccccgaggaggtcctggaactgctcgcccccgcccttcgccagcagctgccgggcttgcaatcgcggttggccacccccactgaacaggcaccgccggcgctcctgccggcgcgctgggccggcgaccctgactaccagtgcttgtggcgggcgctggaccacaacccaagcggtatggattcactgatcacgcgttgtggattgacggcgtcacaggtgtcctccatgctgctggccatggaactggcgggaatcgtggtgtgcgtacacggccgctactgtcgaactccctag

SEQ ID NO: 493491 - DNA, 474 bp, Stenotrophomonas maltophilia
atgaaagagagcatcctggatgtactgctgtacctgtttgaacactatttcagcgaagatgcggacctgatccgtgaccgcgattcgctccagaacggcctgatccaggccggtttcagccccaccgagatcaacaaggcgttcgactggctcgatgccctggccgcgcagcggccgagcgtggcccaggcgcgggtcgatggccccgtgcgcatctaccacggccccgagctggacaagctggacgtggaatgccgcggcttcctgctgtacctggaacagcacggcatcctcgacgccgaccagcgcgagctggtgctggaccgggcgatggccctggaccaggacgaactggacctggacgacctgaagtgggtcgtgctgatggtgctgttcaaccagcccggctccgaagcggcctacgcctggatggagacgcagatgttcatggacgagccagaacccctgcactga

SEQ ID NO: 493492 - DNA, 765 bp, Stenotrophomonas maltophilia
gtgagcgagtggttccacgcagaaggcaaccggcagcaaggcccgctgccggcggaacagttggtcgagttgttccgcaacaaccagatctccctggacaccctggtctggcgcgacggcctgccgcaatggcagccgttgcgcagcgtggtcgatgagctgggcctgatcgtgccggcgctggacgtcgccgcgccggccgtggaacccgagccggagcccgaaccggaaccggttgcgccgccgccgccgcaaccaccggtgctgccgccgtccacgccctatgccacgcagaccccggccggggtgctgccgccgccgaaaaagaagctctccggctgcgccctgaccgcgatcatcggcggcggcctgctgctggtgctggtgccggtcatggccatcctcgcggcgatcgccctgcctgcctacaacgactacaccgtgcgtgccaaggttgccaccgcggtcaaggccctgcagccgctgaaacagcaggtgcagcacttcgccgacgacgaaggccgctgccccggtgccaacgatgccggtttcccggcgccgggtgatttcacccaggccggcctgtcggcggtgaacatcggccgcttcaacaacggccactgcggcatcgaagcaacgctggccgtgcccggcaagagcctcgatggcgacctgctgtggctggaatatgatcgcgacagcggccgctgggaatgcagcggtgaaagcgacgacaagtacctgccgccgtcgtgccgcggctga

SEQ ID NO: 493493 - DNA, 930 bp, Stenotrophomonas maltophilia
atgaccgagtggtactacgccgaaggacagcaacgccagggcccgctgccggtccaggaaatccgccagcgcttccagcggggcgaactgaatctggacaccctggtctggcgcgaaggcatggcccagtgggctgcactgcgccaggtggtcgatgagctcggcctgcagacactggccgatgccagcacggccaccgccagcggcggcttcgacctgcgcggcgactacgccgccatcgacaacggcactgcaccgctgcctggcacgggcgcgctcagcagctcgccctacagcgccccggccgcttccggtgccggtggcccgcagccggtgatcggcggcgaggtggtctacgcaggcttctggaagcgcgtagcggcgtacatgatcgactacttcgtgctggccattccgggcggcatcatcggcgccatcatcggcgtggtgcttggcgccagcatgggcgcggtgggcagcggcgagacctccatcgaaatcgtcgcgcaggtggccagcgcgctgatcaacatggccatcggcgttgcctactacacctggttccattcctcgcagggtggcgccacgctgggcaagatggcggtcggcatcaaggtcgtgcgcagcaacggcgatcgcctgaccaagggccgcgccttcggccgctactgggccatgctgctgagcagcttcaccctcggcatcggcttcctgatggccgccttcaccgagcgcaagcagggcctgcacgacatgatctgcgacaccctggtggtcgaccgctgggcctacaccgaccagccgcacctgcagcgccatgagctgggcacggtcaccatcgtgatcctggtgctcaccggcctgctggtgctggcgggcctggtggtgctggtggccgcggtcggcttcatcgccaagatggcctcatga

SEQ ID NO: 493494 - DNA, 2493 bp, Stenotrophomonas maltophilia
atgcccaagcacctgctcatcgtcgaatcgccggccaaggccaagacgatcaacaaatacctcggcaaggactacaccgtcctggcctcgtatgggcatgtgcgtgacctgattccgaaggaaggcgcggtcgacccggacaacgggttcgccatgcactacgacgtgatcgacaagaacgaaaaacatgtcgacgcgatcgccaaggccgccaagggcgccgacgacatcctgctggcgaccgacccggatcgcgaaggtgaagcgatcagctggcatatcgccgagatcctgaaggaacgcgggctggtcaaggacaagccgatgcagcgcgtggtgttcaccgagatcaccccgcgcgccatcaaggaagcgatcagccagccgcgcgcgatcgccagcgatctggtcgatgcccagcaggcgcgccgcgcgctggactacctggtcggcttcaacctttcgccggtgctgtggcgcaaggtccagcgcggcctgtccgccggccgcgtgcagagcccggcgctgcgcatgatcgtcgagcgcgaggaagagatcgaagccttcatcgcccgcgagtactggtcgatcgccgccgagtgcgcacacccgtcgcagcacttcaacgccaagctggtcaagctggacgggcagaaattcgagcagttcaccatcaccgacggcgacaccgccgaagccgcccgcctgcgcatccagcaggccgcgcagggctcgctgcatgttaccgacgtggccagcaaggagcgcaagcgccgcccggcgccgccgttcaccacctccaccctgcagcaggaagcctcgcgcaagctcggtttcaccacccgcaagaccatgcaggtggcgcagaagctgtatgaaggcgtggcgatcggtgacgaaggcaccgtcggcctcatctcgtacatgcgtaccgactcggtgaacctgtcgcaggacgcgctggccgaaatccgcgacgtgatcgcccgtgattacggcatcgcctcgctgcccgaccagccgaacacctaccagaccaagtccaagaacgcccaggaagcgcacgaggcggtgcgcccgacctcggccctgcgcactccgtcgcaggtcgcccgcttcctgaccgacgacgagcgccgcctgtacgaactgatctggaagcgcgccgtcgcctgccagatgattccggccacgctcaacacggtcagcgtcgacctgtcggctggcagcgagcacgtgttccgtgccagcggtaccaccgtggtggtgcccggcttcctggccgtgtacgaggaaggcaaggacaacaagagcgccgaagacgaggacgaaggccgcaagctgccggcgatgaagccgggcgaccgcgtgccgctggaacgcatccaggccgagcagcatttcacccagccgccgccgcgctacaccgaagcggcgctggtgaaggcgctggaagagtacggcatcggccgtccgtcgacctacgcctcgatcatccagaccctgctgttccgcaagtacgtggaaatggaaggccgcagcttccgcccgtccgacgtcggccgcgcggtgtccaagttcctgtccagccacttcacccagtacgtggactacgacttcaccgccaagctcgaagacgagctcgacgccgtctcgcgtggcgaagaagagtggatcccgctgatggcccgcttctgggagccgttcaaggagctggtggaagacaagaaggaatcggtggaccgcgccgaggccagtggcgcgcgcgagctcggcaccgacccgaagaccggcaagccggtcagcgtgcgcctcggccgcttcgggccttacgccgccatcggcagcaccgccgaggacgccgaggagaagccgaaattcgcctcgctgcgccccggccagtcgatgcacaccatttcgctggaagacgcgctggaactgttcctgatgccacgcgcgctgggcgaggacaacggcgagccggtcagcgtcggcatcggccgcttcggcccgttcgccaagcgcggcagcacctatgcctcgctgaagaaggaagacgacccgtacaccatcgacctggcccgcgccgtgttcctgatcgaagagaaggaagagatcgcgcgcaaccggatcatcaaggagttcgagggcagcgacatccaggtgctgaacggccgcttcggcccgtacatcagcgacggcaggatgaacggcaagatccccaaggatcgcgagccggcatcgctgaccctggccgaagtgcagcagctgatggaagaaaccggcaagcccgtgcgcaagggcttcggcgccaagaaggctgccgcgaagaaggcaccggccaagaaggcggccgtgaagaaggaagcggcgccgaagaaggccgcagccaagaaggcgcctgccaagaaggcggcgaagaaggccgtggtaaagaaggccgctgcaaagaaggcaccggcgaagaaggccgtcaagaaagccgcgaagtag

SEQ ID NO: 493495 - DNA, 591 bp, Stenotrophomonas maltophilia
atgggggcccacgtcgggccggtcgccgccatgaaagaactcaccctggactctgctgtcgccacgctccgcgccggcggcgtgatcgcctatccgaccgaagcggtctggggcctgggctgtgatccctcgcatgaggcggcggtgcacatggtgctgcggctgaagcagcgcccgatcgagaagggcatgatcctggtcgccgccgaattgtcgcagctggagggctgggtgcgcctgcaggcgttgcccgatgcccgacagcgcgcggtgctggccagctggccgggtgccaacacctggatcctgccggccggtccgcgcgcccagccctggattaccggcgagcacagcggcatcgccgtgcgcatcagcgcgcacccgctggtcgccgccctgtgccgcgcctggggggggcccctcgtctccaccagcgccaacctggccggtgaaccaccggcacgcagccgtgccgagctggatccacgcctgctgcgcctgctcgatggcatcctcgatggcgaaaccggcggcctggcccagcccaccccgatccgcgacgcgctcagcggcaacgtgctgcgctcctga

SEQ ID NO: 493496 - DNA, 690 bp, Stenotrophomonas maltophilia
atgaacctgctgcgcaccgccctgggcctgtgcctgctgctgccatggaccgcaccagccgccgaggacgtgcgcgtctaccgctgcgtcgccagcaatggcgccgtggccctgcaggacaggccctgcagcagcggccggcaggaggtgcgtgacctgcagcgcccgcgcgatccggcaccccgggtggtgcgcagtgacgcccctcccgcggcgcccagcgaggttccggtgatgcgcgatcgcgaagtccgccacgtctacatccagccgccacaaccgttgtacgagtgcgtgagcgacgacggtcgccgctacaccagcgacagcaacgagggcaatccgcgctgggtcccgttgtggaccagcgtgtggctcccgcacgggcaccacggcgcggtccatcccggtccacgcccgggcttcggcacgccggtcggtgcgccgatcggtgaaggcacaggctaccggccgcctgcggtgggcgtcggcgtgcaggtgccggccggcagcgtgctggtccgtgacagctgccatgcgctgccgccgcaggacgtctgtgcgcgcctgcgtgaccgccgctgggaactggaccgccgttacaacagcgcgctgcagagtgagcgcaccgccatcagcaatgaacagcgcggcatcgacgcgcgcctgtcgcgggactgcgaacgctga

SEQ ID NO: 493497 - DNA, 729 bp, Stenotrophomonas maltophilia
atgtacgctgtgcgcatgaagaacctgatctggctggccctgggcctgttcgccggcaacgcgttggccgacgacggggtgatctaccgttgtacctccagcagcagcgatgtgcccaccctgcaacgcacgccctgccctgccggcagcaagcagcaggtggtgagggtgccggccagtgctccgccggcgccggcctcagcggcacccgtgccggccgcgcccggaccggccgcggccactgcgccgtccgttcccacacccgcgcctcgtcgccccggcgaaggacgcacgatcatggaagctggcatggtcgaacgcgaaggcggcgatctgatactcgacagtgcatcgctgccgcgccaggccgatgccgcgccggacagcaatgcgccgccgaagccgccgctgccaccgatcttccagtgcaccgacagccagggcggtggctaccttcacgaatacgaagccgcccccgggcgctgcgaactgatgaccgtgcagggactgggcggcgccacgccggtcaatgccgccggctgcgaagtggtgcgcgaccgctgcgaggaactgccggacgtgcagcgctgcagcagctggcagcaacgcttccgcgacgcacgtggccgtgagcggttcgcctcgccggaaaaccgcgacaacgcccgtggggaacgcgaacggctgcagggcgtgctggaggccagcaactgcccggtaccggggtga

SEQ ID NO: 493498 - DNA, 777 bp, Stenotrophomonas maltophilia
atgacccagcaacggtggcgcctggacggccagacggccctgatcacgggtgccagcgccggtattggcctggccattgcgcacgaactggctggcctcggcgccgacctgatgatcgtcggccgcgacatcgacatgctggaaacggcgcgcgacgaactgctggatgtctatccgcagcaccaggtgcacgcgctggcggccgatgtctccgatgacgaggaccgtcggcagatcctggactgggtggaagatcacagcgatggcctgcacatcctggtcaacaatgccggtggcaacgtcaccaaggcggccacggaatattccgaggacgaatggcgcaagatcttcgagaccaacctgttctcggccttcgagctgtcgcgctacgcgcatccgctgctggcccggcacgcgtcgtcgtcgatcgtcaatgtcggcagcgtgtccgggctgacccatgtgcgcagtggcgtggtctatggcatgaccaaggcggcgatgcaccagatgacccgcaacctggccgtcgagtgggccgaggatggcatccgggtcaacgcggtggcgccctggtacatccgcacgcggcgcacgtccggtccgttgtcggacccggactactacgaggaagtgatcaaccgcacgccgatgcgccgcatcggcgagccggaggaagtggccgcagccgtcggcttcctgtgcctgccggcggccagctatgtcaccggcgaatgcatcgcggtggatggcggcttcctgcgctacgggttctga

SEQ ID NO: 493499 - DNA, 213 bp, Stenotrophomonas maltophilia
atgcgcatcctgaccctgttctcgtccctgctggccggcgtgctgctgatggcctgccagcggccgccgacgccgaacccggagaagccaccggtgcccaaagcgatgtcgcgtgcgatgcaggaaccgctggaccgcgccaagggcgcgcagaaagcggtggaagaggccgccgcacgcgaacgcaaggccgaggccgacgcgacgcagtga

SEQ ID NO: 493500 - DNA, 1923 bp, Stenotrophomonas maltophilia
atgaatcaacccgtgcccccgctgcccccggcgcgtcgcaaccccgtcgccagtttcttcatcgggctgtgggacgtcatgaacttcacccgccggttgatcctcaacctggtgttcttcggcctgctgttcctgctgctggtgatgttcgtcatcgccgccggcatgggtgccggtgccagcaagtcgctgcaggaccgcacgacgctcgtgatcgcgccggaaggccgcctggtcgagcagttcagcgccgacccggtcagccgcgcgctggccaaggcggtgggtgacaacggcgccgaggagatccagctgcgcgatctgctgcgggtgatcgagtcggccaaggaagacaagaagatcgaacgcgtggtgctggagctggacaagctgcagccgtccggtttcgcctcgctgcgtgaggtggccgccgcgctgcaggacctgcgcgcctccggcaagcagctggtggcctacagcgagagcatgggccagtcgcagtacctgctggccgcgcaggccgacgaggtctacctggacccgatgggttcggtcgtgctcgaaggcctcggccgctaccgccagtacttccgcaccggcctgcaggacaagctgggcgtggacgtgcacctgttcaaggtgggcgagtacaagtccgcggccgagccgtacgtgctcgacgcggcgtcgccggcctccaaggaagccgacctgttctggatgaacgacgtgtggcagcgctacctgggcgacatcgccaaggcccgccgcctggatccggcacagctggccgccggcatcgacaccctgccggaaggcatcgctgccgccggtggtgacctggccaagttcgccctgcagcagaagctggtgaccgcgctgaagacccgcgaggaattcgaggatctgatgatcgagcgcggcgtggccgacgaggatgccgacggtggtttccgcaacgttgacttcggccgctacctggccctgctcgacgcgcgccgcaacccggtggactcgcgtccgcaggtggccgtggtggtggccgccggcgaaatcagtggcggtgacctgccggccggccgcatcggtggcgagtcgacctcggcgctgctgcgtgccgcgcgcgacgacgacaacgtgaagtcggtggtgctgcgggtggattcgccgggcggtgaagtgttcgcctccgagcagatccgtcgtgaagtggtagccctgcaggccgctggcaagccggtcgtggtgtcgatgggggatctggccgcttccggtggctactggatcagcatgaacgccgatcgcatctatgccgatccgtcgaccatcaccggttcgatcggcatcttcggcatggtgccgaacttcagccgcgcgctggacaagatcggcgtgcacaccgacggtgtcggcaccacccgcttcgccggcgccttcgatgtcacccgcccgatggaccccgccgtgggccaggtcatccagacggtgatcaacaagggctacgcggacttcaccggccgtgtcgccgacgcccgcaagaagccggtcgaggccgtggacgaggtcgcccgtggccgcgtgtggagcggtgcacaggccaaggaacgcggcctggtcgacgccttcggtggcctgaaggacgcggtggccgatgcggccagccgcgccaagctgggcaaggccgatgcctatcgcgtgcgctacatcgagaaggcagccacgccgttcgcacagttcgtcagcggtttcgccggcagccgtgccggcgcttggatgctgtccgactcgggcatggcgcggatggtgctggcgcgcacgatgccggaagtggatacgcagctgcgctttgtagagaacgcggcgcgcgagaagggcaacggcacgccggtgaaggcgctggcctactgcttctgcgggttctga

SEQ ID NO: 493501 - DNA, 1365 bp, Stenotrophomonas maltophilia
atgtctactgcaacctccacgccgcgcttcagcaaggaagtcggcgccaccggtctgctcgccctgccgcttgtgctgggccatgtgtccaccggtctgatctccttcgtcgacaacgtgattgccggccaccacgccacggccacactggccgccgtcaccatcggtacggcgctgctgtggctgccgatgctgattccgatcggcaccctgatctcgctcaccgcctcggtgtcgcagctgcatggcgccggccgcgagcgcgagatcggcccgctgttccgccaggcactgtggctggccttggggctgggcctgatcatgttcaccttcctcaccgtggtgccgccgctgctgccgtcgttcggcatcgcgccggacatcgtgccgggggcgaccgcgttcctgcatgcggtgcgctggggcggacctgcgctgaccctgtacttctgcatgcgctatctcagtgaaggcatgcactggacgctgccgaccatgctgctcggcttcggtggcctgctggtgctggcaccgatgggctatgtgctggccaacggcaagctcggcttcccggaaatgggcgccgaaggcctgggcatcgcctcggcggtgatgatgtggctgcaggcaatcgccttcgccacctacctgtggttcaccaggcgcttcgcccatctgcagctgttctcgcatttcgaagggccgcgctggaaggcgatctgggacttgctgcgcaccggcctgccgatcggcatcaccgtgctgatggagggcggcctgttcatcgtcaccgcgctgctgatcggccgccttggtgccaacgaagccgctgcgcaccagatcgcgatcaatgtcgcgcagctgtgcttcatgatcccgatgggcgtggccgaggccaccaccgtgcgcgtcggccatgcggtcggccgtggtgacggcttcggcgtgcggcgtgcggcctgggccggttacgcgatcatcatgggcacgcagacgttgtcggcggcggtgctgctgttcggccacgatgccatcgtcggtgtgtacaccaacgacctggcggtggccggcctggcctcgaccctgctgctgtacgcggccaccttccagttcccggacggcatccaggtgctgtcggccggcgcgctgcgcggcctgaaggacacccgcgtgccgatgttcatcgccatgttcgcgtactggggcctgggcatgccgctcggcgccgggctcggcctggggctgggcatgggcccgcagggcatgtggatcggcctgatcgtcggcttgaccgccgctgccatcctgatgggctggcgcctgcgccgcagcagccagcgcatcgggcaatccgcgctgtcctga

SEQ ID NO: 493502 - DNA, 609 bp, Stenotrophomonas maltophilia
gtgccacgctggaaaccgctgctgccgatgaataagtccgtgttcgccagcctgctgctggccctgccgttgtcgctgtctgccgcgccgcaatcgttgaacgtgccgttgccgccaccgacgtcgccggccacgccggtggcttcgccagcaccgtcgacggcagcaccctctggcttcgcccagctcgatgcgcagcagcagcgccagcgccgcgccgactacgccgcctggcgcgcgctgccggaaggagagcgcgagcgcatccgccaggcggctgcgcgattcaatgcgctgcctgcggaccagcagcagcgcctgcgccaacagttccgcgaccaggaccaggcgttccgcgacgggtggcggctgggcccgcaactgggcctggaattccccaagctgcatggcttgttcggcttcgtgccgccggaacagcgcgagaccgcgctggccgtactgcgccagctcagcccggcgcagctggcccagctgactctggtcgcgcagcgcacgccaccgcaggaacgcgacgcagtgcgcagcgccttcctcgccgtgcccgccgccgagcgcgacagctggctcaagcgccaggccggccagtaa

SEQ ID NO: 493503 - DNA, 1005 bp, Stenotrophomonas maltophilia
atgacggctgtgcccgcccctgtttcctcgaccgcggccggcgcgctgtcggcgttcctgcgtggcgtcgagcgccgtgccctggtggtcgctgaactgcagtgcggcgatgccgcgcgcgccgagcagaccctggtggcggtgatgcgcgcctttgccgcagtggccagcgacctgccgatggcgcagtggccgacccgcttctggacccttctgggccagcgccaggcgctgcgcgagccggtgggcgggcagtggctgccgccgttggccgtgctgggcgcgatgccgccgctgccgcgccttgcgctgctgctgcgggtgggtggcagcctggacgagggcatcgccatgcgcgtgctcgaccaggacgaggccggctaccagaacctgctggccgacgcctgcccgcgtgacgcccacggccagccggatgcctcggcctggcgccagttggccgaacaggtgcaggcgcgtatccgtgagttgccggccgcgcgcctgcagcagctgcagcaacccgccgccgcgaccgcccacaacgaagccccgaccccgagctggcgcgcaccgcagcgcgatgagcgggcggccgccaatggcaagcgccgtcgcacgaacgccaagccacgttggcgcggtccgctgatcctgctggcgaccgtggcggtactgttggccgcagcgctgggctggcgccactggcaggggcattccttcggcagtgatgcaccgctgccggagggagtggtgggcgaagccggtccggtgacggtggaagccctgccacccagcaaggtcaacgccacgccggatgcgaccacggcccaggccacggacgacgcagcgatgctggccgatcgtgactacccgctggtcgccgatgccgacctgtacgcgtggactgccgcgggcggcccgctgccggtggatgaatcgcaatccaggccgagccggccggagccggccagtgccacgctggaaaccgctgctgccgatgaataa

SEQ ID NO: 493504 - DNA, 2199 bp, Stenotrophomonas maltophilia
atggcccgttacactggcccgatgctttcaccgattccgaccctgcaggtcgccctgcctgtccccctgccccgcctgttcgactacctgtcgccggagggcgatgccccggcgctcgcggtcggctgccgcctgaaggtgccgttcggcaaccgggagctggtcggtgtggtggcagggcacggccagaccgacgacggccagggactgcgccaggccctggcctggtgcgacccgcagccgctgctgcagggggagctgtggcagagcctgcaatggctggcgcgctacacccatgcgccactgggcgaggtgctgagcaccgccctgcccggcccgctgcgccatggcgaggtcctgcccgacacacaccactggggttggcagctgaccaccgaaggccacgcccagcgtgaaaagctgcgcgccggcagccgtccacggcaactggccgagctgctggccgaagccatcgtggatgaggacgtgctgggcgaacgcatgcaggactggcgcaccgccgcgcgcagcctggccaagcgcgggctggccgagcgggttgcgctgagcgtggccccccaacacgcgcagccactgcccggtcccacgctcaacccggaccaggccgaggcggtggccgcgatcaatgccgccgacggcttccagccgttcctgctggatggcgtgaccggcagcggcaagaccgaggtctacctgcaggcgatcatccattgcctggcgcagggcaggcaggcgctggtgctggtgccggaaatcggcctgaccccgcagaccctggcacgcttccgtggccgcctcggcatcgccgtgcatgcgctgcactcggggttgaacgacaacgagcgcgcgcgcgtctgggcagcggcctcacgcggcgaagcgcgcgtcatcgtcggcacccgctcagcggtgttcacgccgctgccccaggccggcctgctgatcgtcgacgaggaacacgacggcagctacaagcagcaggacggcatccgttaccacgcgcgcgatttcgccctggtccgggccaagtcgctgggcgttccggtgttgctgggcagtgccacgccctcgctggaaaccctgcacaacgcctacgccgggcgttacacccacctgcgcctgaaacagcgcgccggcgatgcgcggccaccgcgcgtgcgcatcctcgatgtacgcaagcgcccgctgcatgacggcctctcggccgatgtgctggccggcatcggggagcatctgcagcgtggccagcaggtgctggtgttcaagaaccgccgcggctacgcaccggtgctgctgtgccacgactgcggctggaccgcgccatgccagcgctgcgatgcgccgatgaccgtgcatggtggcggtcgtcgcctgcagtgccaccactgcggcgcgcggcaaccggcgccgctggcatgtccggcctgcggcagcctggcactgcaaccgcagggcatcggtaccgaacgcctggaagaacatctcactgcggccttcgccgacttcccggtggtgcgcatcgaccgcggcaccacctcacggcgcgacgcgctggaacagcagctggcgaaactgggcgaccagcccggcatcctggtcggcacacagatcctggccaagggccacgacctgcccaagctgaccctggtggtggtggtgggtatcgatgagggcctgttctcggccgacttccgcgccagcgaaaaactggcgcagcagctgatccaggtggccggccgcgcgggacgtgcacgcgacccgggcgaggtctggctgcagacccatcaccccgggcacccgctgctggaaaccctggtgagcggtggctaccatccgttcgcgcaagccgagttgaaccagcgccaggcggccggattcccgcccttcgcgcatctgacgctgatgcgcgccgaagcgcagcaggtggagcatgccaatgcattcctgctggcggcccggcacctgctgggcgaacagaacgtggtcgaggcctacgggccgatgccggcgccgatgccacggcgggccggttaccagcgcacgcagctgctgctgtctgcggtgcagcggccgcctctgcatggcgtgctttcgcaactggttccgcagctgtacgcgctgccggaagcacgcaaggtgcgctggtcgctggatgtggatccaacggatctttattga

SEQ ID NO: 493505 - DNA, 621 bp, Stenotrophomonas maltophilia
atgttgaagatctggggccgccgcaattccagcaacgtccgcaaggtgctgtggtgtgccgaggagatcggcctgccgtacgaatccatcgaagtcggcggcagccatggcggcacgcagacgccagagtaccaggcgatgaatcccaacggcctggtgccggtgatcgaggaccacggcctgccgctgtgggaatcgaacaccatcgtgcgttacctgagcgcgcgctatgcgctgggcacgctgtacgccgaggacccgatggagcgcgcgcaggccgagaagtggatggactggagcacctcgcggatggcgccgctgtacagcgacctggtctggggcatcatgcgcaccgcgccggccgaccgtgacgaagcgcgcatcagcgcggccatcgtccgtgccggtgactacctggcgatggccgatgccaccctggccacgcagccatggctgtcgggcgggacgttcgccatgggcgacattccgctcggctcgctggtgtacgcctggtatgaactgccgatccagcgcccggacctgccgcacctggccgagtggtatgcgcgcctgcgtgagcgaccggcctaccagcgcggcgtgatgtcgccgctgacgtaa

SEQ ID NO: 493506 - DNA, 780 bp, Stenotrophomonas maltophilia
atgagcgaaccggaaaagcgcatcgccctgttgatcgacgccgacaatgcgccggcctcgaagatcgacgaggtcctggccgaagtcgcccgctatggcgtggccaacgtgcgccgtgcctacggcaactggaagagcccgcggttgaagggctgggaagcggtgctgcacgagtatgcgatccgcccgatccagcagttcgcctacagcaagggcaagaatgcgtcggacatggcgatggtgatcgatgccatggacctgctgtacgcgcgcaaccttgatggcttcgccatcgtgtcgagcgatgccgatttcaccccgatggtgatgcgcctgctgaccgacggcgtgaaggtgtatggcttcggcgaaaagaagacgccggaaccgttcgtcaacgcgtgctcgaagttcacctacctggaagcgctgggccagacccacgccagcgtgccggatgccgagcaggcatcgagcgaacaggcatcgaacgagcccgtcgccaatgatgatgcacgcccgcgcaagagcggggcggagatgcgcagcgacacccggctggtgaagatgctgcgccgcgcggtgtcctcggccgagggcgaggatggctggtcgcacctggggccggtcggcagccagatcggcaaccaggcctcgttcgatccgcgcaactatggctacggcaaactcagcgatctgctggcggcgatcggcctgttcgagctgaagaaggacggcaagtcgtcctacgtgcgcgcgctgccaaaaaagaaccggtag

SEQ ID NO: 493507 - DNA, 1281 bp, Stenotrophomonas maltophilia
atgagtcgcgagcgcgttccccacctggtcgttgtcggcggcggttttgccggtctctgggccacccgtgccctggctcgcgagcgcatacgcatcaccctggtcgaccgccgcaaccatcacctgttccagccgctgctgtaccaggtggccaccgccggcctgtccgcgccggatatagccgcaccgctgcgccacatcctcggccaccagcgcaacgtggaagtccgcctcggcgaagtggtcgccatcgacaagcaggcacggcagatcggcatggccgatggcagcacgctggactacgacagcctgctgctggccaccggcgctacccacgcctacttcggcaacgaccagtgggccgatgatgcccctggcctgaaaacgctggacgatgccattgcactgcgccgcaagctgctgctggcgttcgaacgcgccgaggccgaaccggacccggccaggaaggcggcgtggctgagtttcgccatcgtcggtggtggtcccaccggcgtcgaactggccggcacgctggccgagatcgcgcgccacacgctgcgcaacgaattccgccacatcgatccggccagcgccaaggtgcggctggtcgaggctgggccgcgcgtgctgtcctcgttcccggaagtgctttcgctgaaggcgcgccgccagctggaaaagctgggcgtggaagtgctgaccggtaccccggtgagcgacatcgacagccagggcttcaagctcggtgagcagttcgtgccggcccgcaccgtggtctgggccgccggcgtggccgcttcaccactggcgcgcacgctggacgtgccgctggaccgcgccggccgcgtgcaggtgcagccggacctgaccctgcccgatcacccggagctgttcgtggccggcgacctggccgcactgagccaggccgacggcaagccggttcccggcgtggcgcccgcggccaagcagatgggcaagtacgtggccgaggtggtccgcgcgcgcctgcatggcaaggcggcaccggggccgttcaagtacgccgactacggcaacctcgccaccattggccgcatggccgcgatcgtgcacctgggccggctgcagctctccggcgtgctggcctggtggttctggctggccgcgcacgtgttcttcctgatcggcttccgcaaccgcatcgtggtgctgctgaactgggcggtcgcgtactggagctaccagcgcagcgcgcgcatcatcttcggtgatgaccaggacgaccggcggccgaggcggtaa

SEQ ID NO: 493508 - DNA, 417 bp, Stenotrophomonas maltophilia
atgcgtgccgccggtaacgcatggatctccgtcgtcgtgctggtcgccggtgtcgcgctgctgcctggcctgctgtatctgctcgggctggcattggtagacggtcggccgaagccggccgaacgcacacccagtggtgtggctgcatgcagcggtgaaccacgggcgggataccagccgatgaatccctggcacttcaccgcccagttcttcgacaaggacagcatgaagaacaaggtgcctgaagtggagcgggaggccttctgtattgcccggcgccacctgtggcggcaacctcggcgcggcatgctgcgctggcatctcagcagcaccgcgttggcgatctggatcacccggcattggagtaccgcgcagattgcggacaccgcgaggaaggaggacttctgccggaagtag

SEQ ID NO: 493509 - DNA, 432 bp, Stenotrophomonas maltophilia
atgtccacgattgccctgctgttcgcgctttccgcagcaacgagccctgccgccgaccccgccacgatcgcggccatcgaagccacctgccacgactacgtcgatggccagctggaggccgatccgcagcgcgtcgcccgttcgctgcacccggacctggccaagcgcgctgtgctcggtgatacgccagacgagcgcctgggcctgcgccggatgtcgaaggaggagctggtctcgctgacgaaacagggcgcgctgaagaccccgaaggatcaatgggatcgtcgctgcacggtgctggacgtgaccggcaacgcggcctcggtgcggctggaaaccccgtggttcgtcgactacttccacatggggcgcttcgaccagcgctgggtcatcgtcaacgcgctgtggtacccgaaaccgaaggcgcagtga

SEQ ID NO: 493510 - DNA, 276 bp, Stenotrophomonas maltophilia
atggccccatccctccgcccgtggttcctgtacctgctcgaatgccgcgatggcagctattacgccggcatcagcaccgatgtggaggcgcgtttcgccgcccaccaggccggcaagggcgcgcgctacacccgggcccggccgccgctgcgcgtgctggccgtgcgcgaatacccggaccgggccgccgcctcgcgggccgagtggcaactcaagcagcagccccgcgaacgcaagctggcctggctgcaggcaacggatcctgcgcttctgtag

SEQ ID NO: 493511 - DNA, 618 bp, Stenotrophomonas maltophilia
atgctgctgtccatcatctacctgatcgccatttccgccgaagccatgaccggcgcactgtccgccggccgccgccgcatggacctgttcggcgtggtcatgatcgcctgcgtcaccgccctcgggggtggttcactgcgcgacatcctgctcggccactacccgctgggctgggtgaagcaccccgagtacctgggcttcaccgtatgcgcggcgctgatcgccacctgggtggcgcgctggatgcatcacttccgccgcaccttcctggtgctcgacgggctgggcctgatcgccttcaccctgatcggctgctcgatcgcgcgcgaatccggccatgcgatgccgatcgtgctgatcgccggcatgctgaccggcgcgttcggcggggtgctgcgcgacatcctctgcaacgaggtgccactcatcttccagaaggagctgtacgcgatcatcgcgctgctgaccggcgcggcctatctgttgctgctgcactggggcgtggccgatgccaccgcaatcctgtgctgccttggcggcggcttcgcattgcgcctgctggcgatccactaccgctgggaaatgccgaagttcgtctaccacgacgaagtgcattga

SEQ ID NO: 493512 - DNA, 1074 bp, Stenotrophomonas maltophilia
atgcccccgcacaccgacgacctgcgcatccgcaccatcgaaccgctgacaccgcctgcccagctgctggcgatgctgccctgtgacgatgaagcctccgacaccgtcagcgcctcgcgcgcggccctgcaccagatcctgcacggccgtgacgaccgcctggcagtggtggtgggcccgtgctcgatccacgacccgaaggccgccatcgaatacgcccagcgcctgaagccgctgcgcgacgcgctggccggcgaactggaaatcgtcatgcgtgtgtacttcgagaagccgcgcaccacggtgggctggaagggcctgatcaacgacccggacctggacggcagcttccggatcgacaagggcctgcgcattgcccgcggcctgctgcgcgacatcaacaagctcggcctgccggccggtgtcgaattcctcgatgtgatctcgccgcagtacatcgccgacctggtggcgtggggcgcgatcggcgcgcgtaccaccgaaagccaggtgcatcgtgagcttgcctcggggctgtcgtgcccggtcggcttcaagaacggcaccgatggcaacgtgaagatcgccgctgacgcggtgggtgcggcgtccaatccgcatcacttcctgtcggtcaccaagcagggcggcaccgccatcgtgtcgaccaccggcaatccggattgccatgtgatcctgcgtggcggcaagcagccgaactacgacgccggcagcgtcgccgacgcctgccaggtgctggccaaggccaagctgccgacgcgcctgatgatcgacgccagccacgccaacagcctgaaaaaccccgagaaccagccgaaggtgatcgaggacatcgctgttcagctggaagacggcgaacagcgcatcgttggcgtgatgatcgagagccatctggtcggtggccgccaggaactggtggaaggccagccgctggtctacgggcagagcatcaccgatggctgcatcgactgggacaccaccgtgacggtgctggagcgtctggctgcggccgtgcgcgcccgtcgcgacgtgaaggtgtccgaagcagcctga

SEQ ID NO: 493513 - DNA, 258 bp, Stenotrophomonas maltophilia
atgcagagcacgctccaggtcacgctgttcggcccgcttggcgacagcccggcattgcagttgccggggcgggaagggccgtcggtggccatcccggaggcggccctgcggcggttggtctccgacctctacaccacccgttccctgctcaatcccgagcagctggacgaggccaggcaggagctggaccgcgtgctggagcgctgggccgacatccacgaaggcctgttgctggacgtggaagtgcatggcaaatga

SEQ ID NO: 493514 - DNA, 339 bp, Stenotrophomonas maltophilia
atgtcgcacaccttcatcgagctctataccgccacccccgcctggaccacgctccagcccgagcagcggaatgccttcttcgcccgtatcggtgcaggcatgcagcagttcgatccagtccgcatcacactgctggcgatgggccgcattgccacgggcgtacagcacggcagcgatgagcagttctatgcggtctggcgctgtgcaagccgcgcggacgccgacgcgctggtggccggcattgccgccaccggttggcatcagtacttcgccaccatcaacgccgtcggcgcagacgatgggatggggcagcaccttgccgacctggccgccttgtag

SEQ ID NO: 493515 - DNA, 741 bp, Stenotrophomonas maltophilia
atgagcacgcccgttcctgcgcaaaggctgcatgcactcaacagtggcagcgctgctgccacccatctggccgaatgcctggccgtggatttcaccgcgctgctgcaggtggtggcgcctgcccttgagccggaatcgctgcaatgcatgcgcgacgcctcaggcaagggcatcacccagcgcatggcgctggcggcgcggttgctgcacgaagccggacagggggagcctgcgcgctggcaggcgcatgcgtcagacacggtgcgtggctgggcctgctacctgatcggcggcgaagccgacgcgacgctgccggccaagctgcaggcgatgcggccactggctgacgacccgcacttcggcgtgcgcgaatgggcgtggctggcgctgcgtgccgacattgttgccgcaccactgcaggcgctggagtacctgcaaccatggacgcaggaaggatcgccgtacctgcgccgcttcgcctgcgaagcgctgcgcccgcgcggcgtgtgggccacacatgtcgcgctgttcaagcggcagccggaacttgcagaggcgatgctggaagcactcgccgacgacccggagcgctatgtgcaggactcggtcggcaactggctcaatgatgccggcaagacacagccgcagtggctgcgtgcgctgtgcgcgcgctggcaacagcagcaccctggtgatgccaatgcctacatccgcaaacgcgccatgcgctcgctccggtag

SEQ ID NO: 493516 - DNA, 501 bp, Stenotrophomonas maltophilia
atgatcgaagccaagcatcaggccctgctggaggaatcgcagcgacgcggccacgccaacatcgcgcaactgcgcctgtgcttccagctgctctcgttgtcctcgtcgatcgatcgcgactgcgccgcgcggctggcaccgcatgggctcagcgagggccgcttcatcgtgctgttcctgctgcacggggccggtggcacgctgccgccgcacctgctggccgagcgtgccggcgtgacccgtgccaccatcagcggcctgctcgatggcctgcagcgtgaaggcctgctgcagcgtcgcagcgatgacggggatggccgccgtctgcagatcgtattgaccgcaccgggaaagcgcttggccgagtcgttgttcgagcagcacacgcaatggatcagcggcctgttcgacggcctggatgcgggtgaacagcagcagctgtcgcagctgctgcacaaggtctggcagcacacggacggtgggcgggaatcggcagcatga

SEQ ID NO: 493517 - DNA, 1299 bp, Stenotrophomonas maltophilia
atgctggcgctggccagcctgctgctggcaaccctggtcagcgttgcagtggtgggttggatgccccggcccgcgccgccaccgatgcggctggaccatgcgatgcaggtactgcgtggggaacaggcgccggcgtcactgggattgcgcagggcgacgcaggacgcgcccccccaaggtagcgccagcgactggctcgcgcagctggcggccgcgcagatgggcatgccggccgaggatgtacgcctggcatggacggggcagggcagggcgcccgatgtgcaggtcatcgagggtggcgcggtactggacgcctccggtcgtgctggcgtgctgaaatcacaggccgcgctgctgaccgcgatgcagtggccgccgtttgaactggggatgcgccaggccgacggccgctggcgggtggtcggcagcgaccatagtgacctggcggcctggcgccgccaggtgatgctcgccctgttgggcggtgcgatcctgctggcgccgttggcggcgtgggcgtcgatccggttggggcgcccgctgcggcgcctggccgaagcgagcgcacgcgtcgacctgcaggccgagtcgccattgcccgacgatggcccacgcgaagtgcagatgctggccgccgcgatcagcaccggtcgcgaacgcctgcgggtccaggcacaggacatgacccatatgctggcggcagtggcgcatgacctgcgcacgcccctgaccggcctgcgcctgcgcgccgagttcgctcccgcaccacgggccgcccggatggtggcggacatcgaacgcatggacgcgatgatcgagcaggtgctggactatgcacgcggcgagctgcagcccttgcagatgcgctcgctggatctggctgccctgctgcaggaatgcctgcaaggggcgctgctgcgcggggtcgacatttcgcttcagtgcccggatacgctgccgtggcatggcgatgcgctgctgctccggcgcgcggtcgacaatctcatcgacaacgccgagcgttacgcgggcgccgtggagctgcatgtcgccgtgtgggggcatggggtgcagctggatgtgatggatcgcgggccgggcatcgccgaagctgatcgtgtccgcctgctgcaaccgttccagcgcagcgaaagctcgcgcagtcgcgctaccggtgggaccgggctgggactggccatggccgccaacgtggccaggcgtcacgcaggcgaactgcagctgctgcaccgcgagggcggcgggctgatcgcgcgcctgctgctgggaaagctcccctga

SEQ ID NO: 493518 - DNA, 708 bp, Stenotrophomonas maltophilia
atgagtactcccatccgtgtcatcgtcgtcgacgacgatgccagcatccgcgacgccatcgccgaccacctgctgctgcacggctaccaggtacgcctggcggcggatgcggcggcactggacgtgctgctgcaggccgaacgaccggacctgatcatcctcgactggatgatgcccggtgaggatgggctgtcggtctgccgcaggctgcaggcgagggcgatcccgatcctgatgctgtcggcgatgggggctgcaccggaccgcgtgatcggcctggagatgggcgcggacgactacctggccaaaccctttgatccgcgtgaactgctggcgcgggtacgcgcactgctgcgccgtcaggacaagctgcgcacgcaggtggccagcgagctgcggtttgatggctggcgattgctgcccgaccagcgtcgcctgttcgcaccggacggtgccgagctggtgctgagtcgtggcgagttttccctgttgctggcgctggccgaacgtcccgggcgggtgctggggcgtgagcagctgctgcagttgagtcgcggagaagccagtgacagcgtggaccgtgccattgacctcgcgatcagccgcctgcgccgcaagctcgggcaggccgcgtccggggcagaagccctcgtgcagacactgcgcggggaagggtatcgcttcgacgctgaggtacaggtgctgtga

SEQ ID NO: 493519 - DNA, 654 bp, Stenotrophomonas maltophilia
atgcgcagcacgtcctggcagctgggcagctggcagctgcaggcccaagccatgaacgtcgatctgtcatcgttgccgaaggatgatgatccagccatcgacggcttgatcggcaacgatctgaccgggcgctgggacacccgttgggacttcggccgcaatcaactggcgctgtggacacccggcggattgaacctggaaggaccgggttgccagcgcaatgcgctgcccggccgcactggcggcctgcgccagttcggcttcatcacgcttgcactgggcgcgcccgcggtggacgccatcgccgtggtcgacaccggtgccgcacagaccgtcctcaacgccgaagccgcccgcgcactggggctgcgcaccgacggcagcgacgcgcgggtgcgggtgcgtgaaaagggcaccgaaggcctgggcggcggcaagcaggcaacctggctgtacaccctgcccggcatggccggcggcggctggcagcacccgtcgatggaggtccgcatcagcgaactgccggtgttcaaggcgatcggcctggagggccggccggcgctgatcctcggtgccgatgcaatgcgcggcggccaggtggacatcggtgccggcgcggcgcggatctgcctgcgccggccgcaggccggctga

SEQ ID NO: 493520 - DNA, 1164 bp, Stenotrophomonas maltophilia
atgtgccgtgccaccctgatgttgctgacgctgctcccgctggcggtactggccgcgccgccacccgtgccctcgcccactcgcatcgatgccgaagcacggcggctgatgcaggcggcccatgcgcgcgggatggcgctggcggtgatcgatgacggcaaggtggtgcatgtggccgcctacggtgaacgcaacgccgcaggcgagccgctgcgcaccgacaccgtgatgtatgccgcatcgctcaccaagatggccttcggccacctggtcgcacagctggcgcaggacggggtgatcgatctggatgccagcatcgccacagctctggacgtgccgctgccagactacccgcccgaaccgaaaaagtacgccgactacagcgtgctggcgagtgatgcacgctggcgccggctcacgccgcgaaagctgctgaatcacgccagcggctttgccaacttcggctttctcgaaccggatggccggttgaagttccacttcgagcccggcagccgctacggctattccggcgagggcctgatcctgctgcagttcgtgatcgaacgtgggcgactgggcgaggatgtgggtgcgttgatgcagcagcgcgtgttcgatcgcttcggcatggcgcgcaccagcatgtcgtggcgcgcggatttcgccggcaacctggccgatggctggaccgtcgaaggcaatacagagccgcacgatcaacgcagccgtgtgcgggcggcaggatcgatggataccaccatcaccgacatggcccacttcgccgccggttatgtgcgcggcgatgggctgtctgcggcaatgcgcagggaactggtgcggccgcagctgccgatcaccaccgccagccagttcccaacgctgcagccggagctgcccgttgcgcagcagcaccgggatctggccgcgggcctgggcgtggtgaccttccgtggcccccagggtgcaggcttctacaagggcggccacgacgatgcggtcggcaacaccctggtgtgcatcgagcggcacaaacgctgcgtggtgatcctgggcaacgatgtacgggccgaggccaccttcccggcactggtggcgttcgtgctgggtgataccggcgtgccatggcagtgggagtacggcgcggcgaaggccttcgtcgaatga

SEQ ID NO: 493521 - DNA, 612 bp, Stenotrophomonas maltophilia
atgcctacctcgttcatcgtcgtcgacgacttcctttctcctgccgatgcgcaggggctgcgccaggcggcgctgggcctgacctatccggtgcaggagggtgcattccccggccgcaattcgcagcagcggctggaactggatgggctgtccggcgcggtctcgcggctggtcaacgaaccgctgcggccggtcaacccactgcagtcgcacggcaagttccgccttaccctggccggtgacaccggccgcgccaaggtgcacgccgatcactcgcactggtcgggcatcctctacctgagtgcaccggagcactgcgagggcggcaccgagttcttccgccaccgccgtaccggcaccgagcgcatggccctggatgcagcggagctggccgcattgggctatgccaacggcggcgacatgcatcgtgacatcatcgagcgcgacagcaacgacgacagccagtgggaaatgaccatgcgcatcccgatgcgtttcaaccggctggtgctgctgcggccctggttctggcataccgccgggccagcgttcggcgaccgcccggagaatggccggctggtgtacctgatgttcttcgagcaggcgcgctga

SEQ ID NO: 493522 - DNA, 1650 bp, Stenotrophomonas maltophilia
atggctgccaaggatattcgtttcggtgaagacgcccgttcgcgcatggtgcgcggcgtcaacgttctcgccaatgccgtcaaggccaccctgggcccgaagggccgcaacgtcgtgctggaaaagagcttcggcgcgccgaccatcaccaaggacggcgtctccgtcgccaaggaaatcgaactggctgacaagttcgagaacatgggcgcgcagatggtgaaggaagttgcttcgcgcaccaacgacgatgccggcgacggcaccaccaccgccaccgtgctggcccaggccctgatccgcgaaggcgccaaggccgttgccgccggcatgaacccgatggacctcaagcgcggtatcgacaaggccgtctcggccgccgtcgccgagctgaagaacatctccaagccgaccgccgacgacaaggcgatcgcccaggtcggtaccatctcggccaactcggacgagtcgatcggccagatcatcgctgacgcgatgaaggaagtcggcaaggaaggcgtcatcaccgttgaagaaggctcgggcctggacaacgagctggacgtggtcaagggcatgcagttcgaccgcggctacctgtcgccgtacttcatcaacaaccagcagtcgcagaccgctgacctggatgacccgttcatcctgctgcacgacaagaagatctccaacgtccgtgacctgctgccggtgctggaaggcgtcgccaaggccggcaagccgctgctgatcgtggccgaggaagtcgaaggcgaagcgctggccaccctggtggtcaacaccatccgtggcatcgtcaaggtcgtggccgtcaaggccccgggcttcggcgaccgtcgcaaggcgatgctggaagacatggccgtgctgaccggcggcaccgtgatctccgaagaagtcggcctgtcgctggagaaggccaccatcaaggacctgggccgcgccaagaaggtgcaggtctccaaggagaacaccaccatcatcgacggcgtcggcgacaaggccaacgttgatgcacgcgtggcgcagatcaagacccagatccaggacacctcctcggattacgaccgcgagaagctgcaggaacgcgtggccaagctggccggcggtgttgccgtgatcaaggtcggcgcctcgaccgaaatcgaaatgaaggaaaagaaggatcgcgtcgacgacgccctgcacgcgacccgtgcggccgttgaagaaggcgtggttccgggcggcggcgttgccctggtccgcgcgatcaccgcgctggccggcctgaagggcgccaacgaagaccagaaccacggcatccagatcgccctgcgtgcgatggaagccccgctgcgcgagatcgtggccaacgccggcgacgagccgtcggtcatcatcaacaaggtcaaggaaggcaccggcagcttcggttacaacgccgccaccggcgagttcggcgacatgctgcagttcggcatcctggacccgaccaaggtgacccgttcggcgctgcagaacgccgcctcgatcgctggcctgatgatcaccaccgaagccatggttgccgaagctccgaagaaggacgagccggccatgggtggcgccggtggcatgggcggcatgggtggcatgggcggcatggacttctaa

SEQ ID NO: 493523 - DNA, 288 bp, Stenotrophomonas maltophilia
atgagcatcaagccgctgcacgaccgcgttgtggtcaagccgatcgaagccgacgaaatctccgccggtggcatcgtcatccccgactcggccaaggaaaagtccaccaagggtgaggtcgtggccgtcggccccggcaagccgctggacaacggcaacgtgcgcgcgccgtcgctgaaggtaggcgacaaggtcatctacggccagtacgccggcagctcgtacaagagcgaaggcgtcgaatacaaggtcctgcgcgaagacgacgtgctcgccgtcatcggctga

SEQ ID NO: 493524 - DNA, 126 bp, Stenotrophomonas maltophilia
atgaaaaaatttttccgcccgcgcgcctcggccaaggcgtcggtcctggacaatttcggtgacaagcgtcgcactgtcagatatctgacgttcatttacgacaaagtgtcactggatcggccttag

SEQ ID NO: 493525 - DNA, 1791 bp, Stenotrophomonas maltophilia
atgcgattgctgtccccgcttgccgccgcctgcctgctggcactggccgccttgccggcccaggccgaggttttcatcaacgaactgcactacgacgacagcaccgccgccggtgacgtcggcgaagccatcgaagtggtcgccaccgcgggcgaggacctgtccggctaccgcctctacctctacaacggcagcaatccttcggcggccgcggtctacgccaacaacccggtcccggccggcagcgccgccggctgcggcagcgcgaccatcgccgtggtcaactacccgaccaacggcatccagaacggccccaacgacggcatcgccctggtcgatgccagcggcaaggtggtccagttcctcagctacgagggcgccatcaccgcctccggtggccctgccgccggcatgaccagccagaacatcccggtggccgagaccaacagcacggccgcgggcacctcgctgcagctgaccggcagcggcagccagtacacccacttcacctgggccgagtcggccaggcagaccttcggcagctgcaacaacggccagaccttcagtggcggcggaaccccgggcccgaacacaccgccgtcggtctccaccaccaccccggcgcagggcagcagcaccttcccggccgccgccgacctggaagtggtgttcagcgagacggtgaacctggccagtggcgccttcgccctgagctgcggcacctccggcagcgtgccgttgaccttcccggccagcggccgcagcgtgaagctgtccaccaacactgcgctggtggccggtgaggcctgccgcttcgacatccgcgccgcgcgcatcaccgacctgcagggcgcgcacccggccgccgacagccgcatcgccttcaccgtggccagcaccggcggcaatccggaccccggcaacccgggcgtgccggccggctactactccaaggtcaacagcagcagccccagccagctgcgctgctcgctgcacgccaccatcaagggccacaccgcctacccttacagcggctcgggcaccagtacctggaccattctggaaatcgccgacgaggatccgaacaattccggcaggatcctcgatgcatatcgcaaccacagctacgccaaggtgaccgatcgcgccggcagtggcagtggcctgaagtacaaccgcgagcacacctggccgaactcgctgggctttgccaccaccaccggtgacaagggcctgccgtacgcgccgtataccgatacccacatgctgtacctgaccgacgcgcagtggaacgccgaccgtggcaacaagccgttcggcaagtgcgacgccaactgcggcgagcgcgccaccgaggccaacaacggccagggcggcggcagcggcggctatccgggcaactccaactgggtgcgcacgccggacggcaacaccggcaccttcgaggtgtggggcaagcgcaagggcgacatggcgcgtgcggtgatgtacatggcgatccgttacgagggcggcaaggatgcggccaccggccagtccgagccggacctggagctgaccgacgaccgcagcaaaatcgtcaagaccagcagttcgccggcctacatgggcctgctgtccacgctgatcgactggcacctgtccgatccgccggatgatgccgagcgtgcgcgcaatgacgtgatctacagcttccagggcaaccgcaacccgttcatcgaccaccccgagtgggcaaccccggccctgttcacctcggccaagccggccacctgccagctggccaactga

SEQ ID NO: 493526 - DNA, 339 bp, Stenotrophomonas maltophilia
atgtcgaccgtcgatcccgtcctgctgctgttgaccacctgcccggaccgggccagtgccgagcgcatcgcgcacgcgctggtcggcgagcgcctggcggcatgcgtgacccgcctcgatggcgcgcagtcgacctaccgctggcagggggaggtgaccaccgacgccgaactgcagctgctggtgaaaaccaccgcgagccgcgtcgatgacgcaattgcccggatcgtcgcactgcatccgtatgaactcccggagtgcatcgcggtcgaaacccgggccggcctgccggcgtatctggactggatccgggcacagacccgggaggacactgattga

SEQ ID NO: 493527 - DNA, 2382 bp, Stenotrophomonas maltophilia
ttgaagactctgtttgcgcgcggcgccgccttgtgcgccctgttgtggctctcgctgccggccttcgcgctggatgagaaggacctgctgccggtggaccaggcgttcgcgctgaccgccattgcccccgaacggggccaggtgcaactgcagttcaagatcgcaccgggctattacctttatcgccaccgcaccagcgtcaaggccgacccggccttcaatgccggcgcgctgcagatgcccaagggcgacaagcaccacgacgatttcttcggcgaagtcgagacctatcgcgagcgcctgcaggccaccctgcccggcacgccgtccgaggctgccggcaccatcagcctggaagtgcgttaccagggctgcgccgatgccggtgtctgctacccgccgcagaagcgcgtggtgcaggtcaccctgccgggcgccggtgcggcggcggcggtgcctgccgcgcgtgccggtgcggccagcccgttcaacaacccgctggcaggtgccggcaacagcggtggcctgcgcctgccgggcgcggccaacaacagccaggccctgccgctgccgtcggaacaggcgttcggcttcgatgccatcgccagtgacggcaacaccctgctgctgcgcttcagcccagcgcccggctattacctgtatcgcgaccgcacctcgctgaagctggaaggcagcgccggcgtgctggccggcaagccgcgctggccagccgcgcaatcgcatcgcgacgagcacttcggcgatgtctcggtctacttcaaccaggtggaagtgccgctgccgctgcgccgcactgtcactgatgccgtcgacagcaccctggtggtgaccttccagggctgccagaccgatggcatctgctacccgccgatgacccgccgggtgaagctgtcgattcccgctggcaagctgtccgccagcattgaccaggcgccagcgcgcaacgaggtgatcagcccgctgcccgccgccggcgtgccacgtgaatccgccaacggcgcaccgttgcgcctgctgccgaccgtccccaacgacggcattgccactcccgccgccagcggcagtgagggcgcgcgcaatgagttcgccgccgacgcgcgcgatggcaacgcactgcgcacgcgcccaccggcgacaaccccgaacccggaccgttcgttcgtctgggtgctgctgctggcgctggccggtggcctggtgctgaacctgatgccctgcgtgctgccgatcctgtcgctgaaggtgctgagcctggcgcagagtggcgaaagccctgagcgggcacgcagccatgccctctggtacacgctgggcgtgctggtcgcgttcgcggtgatcggcgcgctgatggtgggcctgcgcgcgatcggcaacgccgtcggcatcggcttccagctgcagcacccgggcgtggtggcggcgctggcctacatcatgttcgcggtgggcctgagcctgtccggcgtgttcaccctgggcggcggcatcggcaacctcggccagtcgctggccagccgcagcggcccggccggcgatttcttcaccggtgcgctggcctgcctggtcggcagcgcctgcgtcggcccgttcatgggcggggcgatcgcctatgccttcattgccccgccgctgaaggcgatgaccgtattcctgttcctcggcctgggcctggcgctgccgttcctgctgatcggcttcgtgccggcgctggcacgccgcctgcccaagcccggcccgtggatggaaacgctcaagcacgtgctggccttcccgatgtatgccaccgcgctgtggctgctgtgggtgctgggcaaacagcgcggcgtggacggcatggcactggtgctgggcggcctgctgctgttcgccttcgggctgtggctgttcgagcgcaatcgctggaccggctcgcgtgcggtgaccctgctcggcgtgctgctggcgatcggcgcgctggttcctgcctggggcgtgacccagctggcaccaccggcgcgggccgcacaggccgccagcgagaacgtggtcgagtattcgccgcagttgctggaccgcctgcgtgcggacaaccgcgtggtgttcgtcaacatgactgccgactggtgcgtgagctgcaaggccaatgaacgtgccgtgctgtcgcggccggagttcaaggaactgctcaagcgcaccaacgcggtgtacatgcgcggtgactacaccaacgtcgacccgcagatcaccacgttccttgaagagcacaaggccgtgggcgtgccgctgtacgtggtgtacggcccgggtgcgccgccgaccgtgctgccgaccctgttgacccaggcggtggtcgaggaagcgctgctgcgcaccgcacgatga

SEQ ID NO: 493528 - DNA, 564 bp, Stenotrophomonas maltophilia
atgaagtggcaacggccagcgctgctgtggacagcggtgctggccgccggcctcggcctgtgggccgggcatcgattctcacccggcccgtctgcaccggccgcggcaacgacggcttccacagcgacggccgtgaagcctaccctgcaggtgggtgatcccttgccggcgctgatcctgccggacctggcggaacagctgctggacctgcgcgcccgcttcgccggccggccgctgctgatcaatgtctgggccagctggtgtgcgccctgcgtggaagagatgcccgaactggcccgcttcgccgaagcccagggcgacaacggtgtgcaggtgctgggcattgcgctggatgccccggacgacgtgcgcgctttcctgctgcgggtgccggtggactacccgatcgtgatcgagaccccggggccgcgcgatgccagcgtgcagctgggcaatacccagggcctgctgccctacagcgtgctgttcgatgcgcaggggcggctggtgaaggcaaagctggggccgttcgcccacggcgagatcgacggctgggtgaagtga

SEQ ID NO: 493529 - DNA, 2523 bp, Stenotrophomonas maltophilia
atgttcaagaacgtcctgttccaactgcattggctgctgggcattaccgccggtgccgtcctggccctgatgggcctcagcggcgccatgctgtctttcgaggacgagctgctgcgcgcggccaatcctggcttcgctgaaatcgccgagcaccatgcggacggccagcatccccttgcactcagcgaactggtgccgttgctgcaggctggcagcgagcgtcccctgcaacgcctgcgcgtggatgccaccggacagcggccgtcggtcgcgcgctttgccggcggcaaggaacactgggtgtacttcgatccgtacagcggcgagcgcttcagcgccctgcgcgggcaggcattcttcgacgtcgtcgaggacctgcatcgccacctcgctgccggtgagcgcggcaagtggatcaccggcagctgtgcaatcgcgctgctgttcttcaccctgtccggtctctacctgcgctggccacgacgctggtggcactggcgcagctggctggcggtggagtggacgcgcagcggccgaggcttcctgtggagcctgcactcggtggtcggcacctgggtgctgctgatctacctgatgagtgcgctgaccggcctgtggtggtcgtttgactggtaccgcaacgcggccaacacgctgctcggtgtggcgccggcggcaaagcacacggttgccgccgacgcggcactggacgtccatcgcatcgaggccacgctgtacgcgctacccggcgtgcgcaccggcttcatcgacctgcgcctgccggagaagccggggcaggcgctgaacgtgcgggtgatggccggtgatccgtcgcagcgcggcggccaccacgaccgtgcgcatgacctgctgcagctcgatccggccagcggcgcggttctcgatgcccgcccgtacgcacgccagggcgcgggcggacagctggccaccagcgtgttcgcgctgcattcgggcagctacttcggtgtgcccgggcgcgtggtggtgatgctcagcagcctgggcatgagcctgttcttcatcaccggctggatgctgtacctggaccgccgccgcagccagcgtgcggcgcgagggctgcgccgcgcgctgccggccacgaccaccgatggccgtggtccgccgtggctggtggtgcatgccagccagagcggactgggcgaacaactggcgtggcgtgcggccgcgcagctgcaggcgtccggtcatgcggtgcaggtgcagtcgctggtccgcgtcgatgccgcgacgctgcaggccacctcccaggcgctgctcgtgctgagcacgttcggcgacggcgagccaccggatgccacgcgccgcgcggcgcggctgctgctcgcacaacgcctggacctgtcgcgcctgcagttcggcctgctcgcgctgggcgaccgccagtacccgcattactgcggcttcggccgccagttcgatggctggctgatcggcaacggcgcgcgcccgctgttcgagcgcatcgatgtcgatgccgcttcggtgccggcattgcgccaatggcagcagcagctgggtacgctcaccggcatcgtcaccgatgacagcgtgctgcctgcggctacgcagatgcatgagtggcgcctgctcggccgcgaccacctcaacccgggcagcgtcggcggagccatctggcgtatccgtcttgccgcaccggccgacgtgcagtggcaggcgggtgacatcctgcacatcgcaccccgccacaacgcgcggcatgccggtgccgtgctgaagggacacggtctggatccgctgcagcccctgctggtcgatggccatccgcgcacgctgctggcactggccagtgaacgcgagctgcccgaggccgatgccgcgctggcggtgcaggatgcctgcctgtggctggccgggctgccgctgctgcccagccgcgagtattcgatcgcctcctgcacggatgatggcgtggtggagctggtggtgcggctggtgcatgacgcctccggtcgcgccgggttgggctcgggctggctgtcgttgcatgcaccgatcggtgccggcatcgtcgcccgcgtgcatcgcaaccccggtttccatcgcgtcagcggcgcgccgatggtgctgatcggcaacggcaccggcatcgccgggctgcgcagcctgttgcgcgaagctgcccacgcaggcgagcgcgggcactggctgctgttcggtgaacgccagcgcgcacacgacttcctgttcgccgacgagatcgaagcctggcaggccaatggccatctcacgcgggtggacctggcgttctcgcgcgatggcgagggtggttacgtgcaggatcgcctgcgtgcggccgtcgatgcgctgcgcgactggatgcagcgtggtgcggtgatccatgtctgtgggtcgttgcagggcatggccgaaggcgtggaccaggtgctgcgaaccgcgctgggtgatgaagcggtggaaacgctgctggaaaacgggcgctaccgccgcgacgtgtattga

SEQ ID NO: 493530 - DNA, 2538 bp, Stenotrophomonas maltophilia
atgtcggccgtcgtcccccacctccggtccctgcgcatgcggcttgccgcactgcgctcggcgtcccccggcctgctgctgtggctgcagccgcatcggctcagtgtggccagcaagctcaaggcgaccctgtgggtctgtgggctgggcctgatcgcgatcgccgccgtctacgcctggaccggccatgccagcacgcaggcggcgcgcagccaggccagctaccagcacggcagcgatctggccgcgagcgtggccacgcaggtggccgaggcgcgtcgtctgcagacccagtatgcacgtagtttcgacgatgccgaccgcgcgcagctgctggcgacgcagaaggcgctccaggccgatcttcaggcgctgcgcgcgatgccgatggatcccggccggcgcgaggcgctgcaggcactgaccgaagccgccggcgcgttctcgcagggtgtggccgccctgttcgaacgcgtcgatgagatgggtcgtggcgatgccggcctcgccgcgcaattgcagcaggccgccgacgccctgcaggcgcaggtggatgcgttgcagcggccttcgttggcgttgtccctgcagaagatgcgccgacaggaggcactgctgctgctcgatggcgactccacccatgccgaccgtgcgagcgaagaaaagctgccgttcgatctcgcactggtgggcctgccgaccgatgcgcaggatgcccttcgcaacggcatggaggcctatcaggccgcattgctgggctataccgccgcccgcgtgggcctggatgtagaggcgcaatcgctgctggataccgccgccggcgtggcgccggcgctggccgccttccagcaggcccaggtggcggcgctggccaaggcacaggcgcgccagcaggccggcgcacgcaccatgagcgtgctgttcgcggtgaccctgctgctggtcgccggtgtgttgatcaccagcctggtgctggtgcggcgtgcggtgcgccagccgatccaggacaccctgcgcttcgccagcgacatcgccgacgaccgactcgacaccaccctgcgcgtctacaacgccaacgatgaaatcggccagctggcgcagcgcctggtcgacatgcagcagcgcctgcgcgcgcgcatcgaggccgagcgtgccgtggcgcgcggcaacacccgtgtgcggcaggcattggacagtgcgcagaccgggctgatggtgatcgatgccgagggccaggtggcctacgtcaatccggcactgctgcagcaactcgagcgcgaggccgaagatctggtgggcagcgatgccgtgcgcctgcatccggcgctggccagcctggccggcgcgcgccagcgcgaggagcgcgagatcggccatgccggcgtgcgctaccagctgattgccaaccccatcatcgacgaagggcagttcctcggcgtagcggtggaatggagcagtcgtgcgctggagacgctgctggaaaccgaggtcgctgccctggtcgacgccgccgcacatggcgacctgcacggccgcatcgcgctggagggaaaacagggcttcgtgcgcaccttgtcgaccagcataaaccgcctgctggccacctttgaaaccaaccttggtgacctgcaggcactgctggctgcgctggcccgcggcgacctcagcgtgcgcatggagggggacctgcagggcgtgttcgcgcgcatgcgcgacgatgccaatgccaccgtcgcgcagctgggccgcatcgtcacccgcatccagcaggccacctccagcctggataccggcgttggcgagatcgtcgccggccatcacgatctgtcgcggcgcaccgagcagcaggccgccaacctggaagagaccgcggcgtcgatgcaggagctgaccgataccgtcggccgcaacgccgatgccgcaggccgcgccgatgcactggtgcagggcgcggcggcggtggcccagcggggtggcgaggcggtcggccaggtggtcgcgaccatgcatggcatcagcgaagcctcgcgacggatcggcgacatcacccagttgatcgacggcatcgccttccagaccaacatccttgccctcaatgcggcggtggaagcggcgcgtgccggcgagcagggccgcagcttcgccgtggtggccgccgaagtgcgcctgctggcgcagcgcagtgccgaggcggccaagcagatcaaggggctgatcgaggattcggtggcgcgtgtcggccagggcaaccagcaggccgcgcaggccggcaccacgatgggcgagatcgtcggcagcgtgcagcagctggccgagctgctggcaggtatccgcagtgcgtcgcaggaccagcatgcgggcatcgctcaggtgaaccagaccatcgtgcagatggaagccagcacccagcgcaacgccagcctggtggaagaggcgggggcctcgactgcgcagatgcaggcgcaggtgcgtgccttggcagaagccgtgggcgcgttccgcttgcagtcgatgccgcaggcgcgcgcggcggcctag

SEQ ID NO: 493531 - DNA, 840 bp, Stenotrophomonas maltophilia
atgacgacgctcgatgtcccccgctacctgcaacgcctgcagctggatgcaccgccaccgctgacgctggcgggcctgaccctgctgcagcagcgccacaacgcactgctgccgttcgaaaccctcagctgcctgctgcgcgatgcagtaccgatcgacctggacagcgtgcagcgcaagctgctcgacgaccgtcgtggcggctactgcttcgaactcaatggcggcctgctggcactgctgcaggcgctgggcttcgatgcacagccgttgagcgcgcgcgtgctgctggccgcccaggacggcgaactgaccgcacgcacccacctgctgctgcgcgtgcaggtggacggcgatgactggctggtggatgccggtttcggcagcctgaccccgaccgtgccgctgcggctgcatgatccgcagccgcaggccacgccccacgagcgcttcctgttgcagcgcctgcccggcgagggggatttcgtgctgtccgccgagtccggcgatggctggcgggcgatgtatcgcttcgacctgcacgcgccggcaccgatcgacaacgtcgtgggcaactggtacgtgtgcacccatcccgattccagtttccccggccagctgcgcgcatccctgaccgggccggactggcgacgcaccatcggcagtggcaactacaccgagtaccgtcccggccaggcaccggacaagcgtccgctgcgcgatgtgggcgacgtgcgcgaggtgttgcagcagcgcttcggcatgcagctgccggacgacccacggctggacccggcgatcaacgactggctgcagcgctcgcgcgccgcgcccttgtag

SEQ ID NO: 493532 - DNA, 372 bp, Stenotrophomonas maltophilia
atgaaccccatcctgcacgtcgagataccggtcactgacctgggccgggccatcacgttctaccagcactggctgcaggtggcggtggacgaaccgatcctgctgcacgactgcaggatggcctacctgccgtttgccgatgaggccaccggtgccagcatggcgctggtgcggggggccgactatctgccctccgtccacggtgcgcgcatctacatcggggttgacgacctggatgccagcctcgagcgtgcgctgcaggccggggccgagctgcgcttcggcccggccgacgcgggtgactggcgtgtggccgagatccgcgacagtgaaggcaaccggatcgcagtgcaggcgcgcgcgattccgtag

SEQ ID NO: 493533 - DNA, 717 bp, Stenotrophomonas maltophilia
atgtccctggccgatcatcgtggtgcgctggcaccgctgggcttcctgcgcgtggccatcaacctgggcaatccagtgctggcgcagggggacgcgcgctcaccgcgcgggccgtcactggaactggccacggcattggcgcagcgcatgggcgtgcaggcacgcttcacctgccacgacgccgcggccgcggtggtcgctgcagccagcaaggatgcctgggacctggccttcctggccatcgatccggcgcgcgccgaccgcatcgccttcagcgccccctatgtggagatcgaaggcacctacctggtgcgcgaggacagccctgcgcagcaggtggccgacctggaccgcgatggcctgcgcatcgcggtcggtcgtggcgccgcctacgacctgttcctcagccgcgaactgcgccacgccatgatcgagcgggccgagacgtcggccgctgccatcaccctgttcgatctgcagcgcctggatgccgccgccggcgtgcgccagccgctggccgcctgggcgcaggcgcatcccggccaccgcgtgctggccgaccgtttcaccgtgatccagcaggcggtcgcggcgccggcctcgcgcccggccgatgcattgcaggcgctgttcgaggaagtggaggcgatcaaggcaggctcgttgctgggcgaagccttcgcccgtgccgggcaggcggttacgttggtacggtga

SEQ ID NO: 493534 - DNA, 900 bp, Stenotrophomonas maltophilia
atgtcccgtccgccccttcacgccctgcagggtttcgtggccgccgcgcggctgggcaacctgtcacgcgcagcggcgtcgatgaacctgaccgtcagtgcgctcagccatcagatgcgccagctggaagagcggctggggcagccgctgctggtccgccagccacgcggcgtcaccctcaccctggaagggcagcgcctgctcgaccaggtaggcccgcatctggatgcgatcaacgaggccttccagccctatgccgcacgcgccgagcacgtgctgacgatcagcgcggtaccgtcgatggcgtcggcgtggctggtgccgcgcttggggcacttcgttgccgagcatccacagatcgagatcaacctgcagtcgagtgaacgcctgattgacttcgagcgacagcgccagttcgacgccgcgctgcggctgggcagcgggcagtggccgggcctggtggtggagccgctgttcgacgagtggctgctgccgatggccagcccggcgctgatcgaacgcatgggagggatcgaccgcgtgccgctgaaccagtggccgctgctgggggatcccgatggcgcgtggggcgcctggttcgcgctgagtgggcagaacccgccgccgcgcttcgtggcggtgctggatgattcggaggcgcatcaccgtgcggcgcttgacggggtgggcgtagcgctgggacgggtgacgcgggcgcgcctgctgctggattcgggccaactggtggcgctgtccagcctgcgactgaaaaccgcctggccgcattggctggtctacccgcagcgctcggcccgccatcgcggcttcctggccttccgcgactggctgcacgctcaggcggccgagcacgtccggcacatggcaggcgcgcatttatag

SEQ ID NO: 493535 - DNA, 144 bp, Stenotrophomonas maltophilia
atgaacatctacggcagcctgttgttcctgcagggccacgtggccaacgccgaactggcccggcagctggcctgcccgtccaccggctcccccacgggtgcgccgcaaccggccgcgctggttcagaaaccgcgtggccgttga

SEQ ID NO: 493536 - DNA, 567 bp, Stenotrophomonas maltophilia
atgcagtcgcatatccgcatcgacggtcgtgtcttcgcctacgtcttcccctgtgcgtgggaggactacgcgaagatcggcttttcacgcgatccgctcgggcgcatcagcgcattgcaccggcgctggttcgagttcttcgaccttgatgccggtacgctggtggaagcggagagcgagcgcgatgcgcgtgatctggagctgcagctgcgttcgccgttcaaggcgcaccgcgcgccggcgccgatgacggtccaggacaaggccggaggtcgcaccgaatgggtgcgtggtgccaaccaggcgttgtcgctcgcggttgatgcgttgggcgcacagggctatcgctgtttccagctcaaggcttggctgcaggccgcccagcgcctgcgcatggaccggctgcacgactgggcggcggtgcagcttccggaagaggatggcctgcgcatgcccggtggccccggcgagcgcgtgctgcgtgacaccctcgacggttgccgggcgctggatatcgacccaatgccatggctgcctgaacacgtccagcgttggtatgcaggttga

SEQ ID NO: 493537 - DNA, 795 bp, Stenotrophomonas maltophilia
atgcctgctcctgcgcctgcccacctgccggtctcgtccatcaccctggaagcggcaaccttcgcggtggtccaccagcacaacgcggacatcgcgcggcaaccggcctcgctgaccaagctgatgaccgcctacgccgcttacggatgcgtcgaagagaacggtggcacgtgggaccaggcggtcaccatcgccgccgaggatgtgcatgccgtagccgatgatgaaacacgcatgggcctggtgcccggcgaaacggtcacgctggcgcgcctgctggaagggttgatgatcgtctccggcaatgatgcggcgctggccatcgcacgccatctggacggatcacagcctgcgttcctgggccgcatgaactggcacgcgcgccagcttggcctgcgcagcacgcggttcgccagcgtgtccggcatcaccaccccgcaccatgcctccagcgcgcgcgacatggcggtactcgccgcctgcctgctgaatgaccatccgcagatcctggcaatcaccgcgcagcgcacgttcgcgcatggccgcttcagccgcagcaaccagaacgccctgcttggcgaagacggcgtggatggattgaagaccggctacacccaggccgcaggcttctgcctggccgccactgcctgccgggctgtgcccgggcggaacctgccggtacgcctgatcaccgtggtgctgggcgctgaaagccgcgacgcacgcgatgcccttgtgcgcgagcggctggccgccgggtttgcggcgctggccgacaccaccgccgacgcctga

SEQ ID NO: 493538 - DNA, 594 bp, Stenotrophomonas maltophilia
atgcctgccaacgccgctcccacgcgccgccgattgacccgcgagcaacgcgcccgccagttgctggacgtggcctgggcgctggtcggcgacgaaggcaccgacgcattgacgctggggcggctggccgaggcggccggtgtgaccaaaccggtggcctatgatcacttcgtgacccgcaacgggctgctggccgcgctctacgatgactatgacgggcggcagacggtggtcttccacgagcgtatcggccgtgccagggcgcacctggccgatcgtgcggcggccatcgcctccggctacatcgactgcgtcctcagccagggcagtgaagtgcagggcatcctcgctgcgctggtgggcgcgccggaactccatgaagtgcgtcggcgctaccagcaggacttcatcgacaactgcgacacctggctgggcccgtttgcggccgatggcacggtccccctggccggacgctgggcgattctcggtgcggccgaagccctgtccgaagccgtggcggcaggcgcgctggacaaggtcggcgccgaggccgagctgcagcgcttgatcgtggcgacggtcaagcgacgctga

SEQ ID NO: 493539 - DNA, 597 bp, Stenotrophomonas maltophilia
atgcacaccctcatcgttaccgcccaccctgaacccggcgcgttgacccatgccatcgccaggcgcatcggcgaagccatcaccgcgtcggatgccgccaacagcgtgacccacgccgatctgatggctgaaggcttcgatccgcgcttcaacatgcaggaccaggcgctgttccgtggcaccggcgcaactccggctgacgtcgccgccgagcaggcgcggctgcaggctgccgacacgctggtactggtctatcccctgtactggtggtccttccccgcgctgctgaagggctggatcgatcgtgtgttcacccagggctgggcctaccaggacggcgccgatggcaaggtgcagaaaaagctgcagcggttgggcgtgcatctggtcggcatcggcggggctggcgcggacatgatcgaacggcgcggctacggtgcggcgatgaagacccagatcgacatgggcatcttcgactactgcggcgcgcgcgtgctgtcgtccgacctgctgctggacgccgattccggtgcagccgaagcgcatctgcagaccgcgctggcgatcggccgtaaaatcggtgctccgatgcgctga

SEQ ID NO: 493540 - DNA, 534 bp, Stenotrophomonas maltophilia
atgcaccggtatctgcttgcccttctgctggccctgccgatggcaatggacgttacgcccgcgctggccggtgaactcagtccggaagactcggccgcattgcgcaaggaggtgcaggcgatgatgggcgccttcgcccgtggcgataccgagctgatcatcgcgcgtacccatcccagcctgaagcagctggccggtggcgacgaggcctatgcgcgggcgacccgcgacaccgtgaaggcgctgcgcaaggccggcgtcaccatcatcagcgacgaggcaggcgtgccgggccgcacctatgcggccggtgacgaggaagtctgcttcgtaccgcgccagtcactgctgcgcgtgcgcgaagcgccgatgcgcagcacgtcattcatggttgctgtgcgacgcgtcggtacaacgcaatggcgctatctggacggcgcggcgatgctggacaacccggcactgctgcggcaactgctgccggcgctggagccgggcgtgacgctgcccaggggtgggatggaagcgctgtag

SEQ ID NO: 493541 - DNA, 828 bp, Stenotrophomonas maltophilia
atgaccccgcttgatgccgacacccagcgcaagcgcgcgcgtttccgccagctgcatgcgcgcggttgtttcgtgctgcccaatccgtgggacgtgggcagcgcccgctacctgcagcggcagggcttccaggcactggccacgaccagtgccggctgcgcctggagtgaagggcggccggatggggcggtttcgctgcaggccacactggaacatctgcggctgatggcggccgcgacaccgctgccgttgaacgccgatttcggtgatggcttcggcgccacgccacaggcagtgggcgaggcggtggcggcggccatcgacaccggtatcgcggcgctgtcgatcgaggacgccagcggcgtggccgatgcgccgctgcggccgatcgggcaggcggtcgagcgactgtgtgcggcacgtgcggccatcgaccgcgcggggggcgatgtgctgctggtcgcgcgggccgagaatttcttcgttggcgtgccggatctgcaggacaccctgcagcgcctgcgcgcctatgccgaggccggcgccgatgtgctgtatgcaccgggcatcagcacgcgcgaacagatcagcgcggtggttgccgctgcgggggcgaagccggtgaacctgctggtgggtggaccgacaccgctgagcctgcaggacatcgccgcactcggcgtgcgacgggtcagcctgggcggtgcgctggcgcgagctgcgtggggtgggctgatgcaggccatcgagccgatcatgcaggacggccgcttcgatggcctgcagcaggcggcttcgggcgcggcgttgaacgcgctgttccgctga

SEQ ID NO: 493542 - DNA, 729 bp, Stenotrophomonas maltophilia
atgcacccggacccgcagaccctgatcgacgccggcgacgatgacgcccattgggccgacctgctttcacccgcgcgccgtcgcctgatcgcgtcggccgggctggccgctggcggcctggccagcgcgtcggctgccaccgcagccgcgcgcagcgacaacgccgtgaacaccaccgaacccgggcgacccggcttccgcgccatcgttccgccagcgcccgagggccgcagcccttggggccaggccacggccagcgagcctaccccgcggccggccagcgtgcgccccggcgaggccacgctgcccacccggccacgtgcctacaccgccatcaagagctaccacgcccacatctacttcgacgaggacagcttcgagaaggccgcgctgctgcggcgctgggccgccgagcgcttccctgtggagctgggcaactggaaccttgagccacgcgggccgcacgtcaccccgtcgttctatttcggcttcaccaacgacctgttgccggtgctggtgccctggctgcagctcaacagcctgggcctgaccatcctgatccaccccaataccggcgatggccgcgctgaccatctgcattacgcgttgtgggtgaaccgcgcgcagccggtcaatgcctacaactggccggcgccgaagcccgggcagccggaaccgctggaagaggtgttcccgaacgtggtgccgacggtgccgctggagatctga

SEQ ID NO: 493543 - DNA, 450 bp, Stenotrophomonas maltophilia
atggcgaagctgctggtcctgcacggccccaacctcaacctgctcggcacccgcgagccggaggtctacggccacaccacgctggccgacatcgaccaggccctggctgcccaggcatcggccgccggacacaccgtggaacgcctgcagtccaacgccgagcatgtgctggtggaccgcgtgcaggctgcgcgcagcgacggaaccgctttcatcctgatcaaccccgccgccttcacccacacctcggtcgccctgcgcgatgcgctggcggcggtggcggtgccgttcatcgagatccacctgtccaacccgcatacccgtgagccgttccgccagcacagctacttcagtgacaaggcagtgggcgtggtatgcggtttcggtgcagacagctaccgctacgcgatggacgcggcgctgctgcgcgtgcaggcggccagcgcgtga

SEQ ID NO: 493544 - DNA, 420 bp, Stenotrophomonas maltophilia
atgccgccgcgtgtgcttgccggcatcctgctgtgggccggtctgtgcggcgccagtgtcgctgccgagcgcgcggccgcgggcatcgactgcgcacaggcaagcggcggctacgagcgcgacatgtgcgattccgatcgcctggatgatgccgacagcgcattgaacgccgtctacgcgcaggcgcgtggcgaactgaaggcgcaggcaaccgatggcagctgcagccgctgcgcggcggccgaacagcagctggtgaaggcccagcgcatctggatcaccttgcgcgatgcagattgcgaggcggtgtatgccttcaatgcagacggcacctcgcgcaaccccgcgaagatgcaatgcctgatcacccagacgcgcgaccgtacgcggcagctgcgcgagttctacgaactgctttga

SEQ ID NO: 493545 - DNA, 480 bp, Stenotrophomonas maltophilia
atggatctccgcaaaatcaagaagctgatcgacctgctggaagagtcgaacctggctgaaatcgaaatcaaggaaggcgaagagtcggtgcgcctgtcgcgcgccccggtggccggctatgccgccccggtcgccgcgccggtgtatgccgctccggccgccccggcgccgcaggcgatgccgatgcagtcgccgaccgaagcctccaccggcggcagcgccaagccgggcccggcactgccggaaggccacgtgctgcgctcgccgatggtcggcaccttctacgcctcgtccgccccggacaagccggccttcgtcaccgtgggccagcaggtcaaggaaggcgaaaccctggccatcatcgaagcgatgaagatgttcaacccgatcgaagccgacacctccggcaccatcgttgccatcctcggcgagaacggccagccggtggaattcgaccagccgctgttcgtgatcggctga

SEQ ID NO: 493546 - DNA, 1368 bp, Stenotrophomonas maltophilia
atgctcgacaaagtcgtcattgccaaccgaggggagatcgcgctgcgcatcctgcgcgcgtgccataccctcggcatccgcacggtggccgtgcactccacggtcgaccgcaacctcaagcacgtggccatggccgacgagtcggtctgcatcggtccggcgccgtcgccgcagagctacctcaacatcccggccctgatcgcggcggcggaagtcaccgatgcccaggccatccacccgggctacggcttcctgtcggagaacgccgacttcgccgaacgcgtggaagagtccggcttcatcttcatcggccccaaggccgacaccatccgcatgatgggtgacaaggtcgaagccatccgcgcgatgaaggccgccggtgtgccgtgcgtgcccggctcgggcggcccgctcggcgaggacatcgtcgccaacaccaagatcgcccgcgagatcggttacccggtcatcatcaaggcggccggcggtggcggtggtcgcggcatgcgcgtggtgcatgccgaagcctcgctgaagacctcgatcgaaaccaccaagagcgaggccaaggccgcgttcggcaatggcgaggtctacatggagaagttcctggagaatccgcgccacgtggaaatccaggtgctggccgacggacagggcaacgccatccacctcggtgagcgcgactgctcgatgcagcgccgccaccagaaggtggtggaagaggcaccggcgccgggcatcaccgccgagcagcgcgagcagatcggcaaggtctgcgtggaagcctgcatccgcatcggctaccgcggcgcgggcacgttcgagttcctgtacgaggacggccgcttctacttcatcgaaatgaacacccgcatccaggtggagcatccggtcaccgaaatggtcaccggcatcgacctggtggccgagcagctgaagatcgccgccggccagaagctgtcgatcaagcagagcgacgtggtgctgaccggccatgccatcgagtgccgcatcaacgctgaagatgctgaaaccttcgtgccgagcccgggcaccatcaccggcttccatccgccgggtggccccggcgtgcgcgtggacacccacatctacagtggctaccgcgtgccgtcgaactacgactcgatgatcggcaagctgatcgtgcacggcccggaccgcgaaaccgccattgcccgcatgcgggtggcactgagcgaaatggtggtcgatggcatcaagaccaacatcgccctgcagcagcggatcatgcgtgacaagggcttccaggccggtggccagaacatccactacctggaaaagcgcctggccgagcgcaagaacaagccgatcgcattgacctga

SEQ ID NO: 493547 - DNA, 375 bp, Stenotrophomonas maltophilia
atgaattaccgtcgattcctgcatggggccaagttctggttctgggtggcgctgttcgtggcctactcggctggggcggttggcctgctgatgatcgatacctacgaggaccgctaccggcatctgtcgaaggtggagctgaccacggtgaaggcgcaggaagacgtgcgccgcgccggtgccagccaggtcgctgcggtctaccgcgcgcagagtggcatgccattcgcttcactgccggccggcagcaccttccaggtggtgtggcccgatggttcgaccgaaaccatggtgatcgtcgatccgacctcgcccaatggcgtgcggccgctggcccattcgcagattccggccgacgtggccgacaagcgctga

SEQ ID NO: 493548 - DNA, 972 bp, Stenotrophomonas maltophilia
atggccttcgctccgaccctgaaaacctggttgctcgtgctgccggcggtggccgtgctgggcgtggccgggtatcgggccagcggccatgccgcgggcgtggcgtcgacgtcggcgtcgccggacctgccgctggccatggccagccgtgacggcggagcgccgctgccggtggtgccggaagccctggcgcggcggctggcggctttcgagcgcggcaacacgctgccgtcgggcctgccgctggacctgcgcgccgacatcgaagacgccagcgacctgtatgcctacgcccagcgcctgcgcgcacaggccgacaccggcaatcacgaggcgcgctggatgctcagccgcgtctatgactattgcgcgcagtacgcactcgatccgggtggctaccgcctggacaacaacgtactgagcgggttgggcctgactgcggcgccggcgatgatcgaggcacgcgagcgcgtggcacagcggtgtggcggtttcgtgccgggcgacaagctgggcgcggcgctggtgctggccgaacgccgcaaggcggccgcgcagggcaacctggccgcggaagcgtcgctgttcgccgagggcgagcccttgcatgacagtgccgagtaccgccgcgacctggtcgagcgcgtgcgcacctcgcgcgaccccgaggcctacatggccatcgcgccaggcatgggcgtgcgtgcggccggtgaccgcgcgcttgacgggctggtggcgggcgagcagctcagtgaacttgcatggcggcttgcggcctgtgaactcggcctggcctgtggagcggacagcgtgctggtcaacaatttttgtgcgaacggagggatctgttcgcaggatggagcgcaggatttccgggatttcgtgtatgacgctgcggtatcgcggcaaggtgctgggaaaatgaaggaatggatcaagcgattggttggaaagagggacgggcgatga

SEQ ID NO: 493549 - DNA, 921 bp, Stenotrophomonas maltophilia
atgccgttcctggaactgaccctgcgctgcaccgaagccacccagccccgctatgagaatgcgctggaggacgtcggcgcactggccgtgaccctgcttgatgccgaagccgacaccagcaacgaacaggccatcctcgaacccggcgtgggggaaacgccgctgtgggacaccctggtgctgagcgcgctgttccccgccgacagcaatgcgctgctgctgctggccgccctggaatccttcgacccggaactggactggagcaatggcagcttccgcgcggtcgaagacgaagactgggagcgcgcatggctggaccagttccagccgatggatttcggcagccgcacctggatcgtgccgtggaaccatgaactgccggacgctgcacaggccgccgatgccgccgtggtgcggctggacccgggcctggccttcggctcgggcacccacccgaccaccgccctgtgcctgcgctggctggaccagctggccgtggacggccagctgcagggccagcgcgtgctcgacttcggctgcggctcgggcatcctcgcgctggccgcgctgaagctgggcgccgccgaagcgatcggcgtggacaacgacccgcaggcgctggtcgccaccgccgacaatgccgagcgcaatggcgagcaggcccgcatgcaggtgtacctgccgcaggacgaaccggtcgccacctacccgatcgtggtcgccaacatccttgcctcggcgctggatgcgctggccgagctgctggccgcacgcgtcgccgccggcggtcgcatcgccctgtcgggcatcctgcagggccaggaaggcgaactgctgcagcgttatgccgcgtggttcgacgatctgcaggccacccaggatggcgactggatgcgcatcaccggcacgcgccgcgcctga

SEQ ID NO: 493550 - DNA, 768 bp, Stenotrophomonas maltophilia
atgtccgagccgaacccgccgcgccgccctttggccaccttcctgcgccccgcgtcggaaggcgaggccgcacctgcgaccgacgcgcgcacgcccgacccgtcggcgcatgacatccctgccgcgaagtccggggacccggtcgacgcggcgctgccgccgatggcggagacgcgacagctcgatgacaccgtcatcctcgacgaagcgaccgtgatcgaacccgtccttgccgtccccgccgcgcaggcggtggccggcgatgcgccgagcttcctgggcacttcgcggccgcgcgcgctgccgacgccgcgctggcactgggtgctggtcgccgggctggcactgctgctggtactgcagagcgtgctggccgatcgtgcgcgcctggccgccgacgccggcaaccgcacctggctgggcgcactgtgcggcgtgctgcgctgcagcctgccagcctggcacgagccgaccgcgttcaccatgaccagccgcgagatccgccccctgcccggccaggccggtgtgctgcaggtgcaggccagcatccgcaacgatgcgcgctgggcacaggcctggccggacctgcgcctgtcactgtccgatgccgatggccgggtgatcggcagcggcgtgttcacgcccgcgcaataccttggcgaaagcccggccacgaccgtgctggaaccgggccagagtgcgcgcatcgcgttccgcgtgcaggagcccgccgcgtccaccgtcgcattcaccttcgacttcctctga

SEQ ID NO: 493551 - DNA, 198 bp, Stenotrophomonas maltophilia
gtgcgccgctacctgcgtgatcttgatggctgcgacgcggacgatgtctacgagatcgtgctgcgcgagatggaaatcccgctgttcgtggaagtgctcaaccactgcgaaggcaaccagagccgcgccgccgcgatgctgggcatccaccgcgccaccctgcgcaagaaactgaaggaatacggcatcagcgcctga

SEQ ID NO: 493552 - DNA, 996 bp, Stenotrophomonas maltophilia
atgagtttcgtgctggatgtatctggcgatctggcaacgcagagtgtcggccagcagaccggcctgctgtttgccggcgtcggcgcggtgctggtgctggccacgctggtggccgagaccctgcgctggcgccagcgcggtcagcccagcgcggtgatcgccaacctggtgtcgcgtatccgtgcatggtgggtgatggcgatcgtggtcgggctggcgctgttcttcggccgcgccggggtgatcgtgctgttcgcgatcatttcgttgttcgcgctgcgcgagttcatcaccctggcgccgacccgttcaggcgactactacgcgctgctggctgcgttctacatcgtgctgccgtggcagtactacctggtgtggatcgactggtacggcatgtacacgctgctgatcccggtctatgcgttcctgttcctgccgatcctgtcgaccatcggtggcgataccacgcactacctggagcgcaccgcgaaggtgcagtgggggttgatgatctgcgtgttctgcatctcgcacgtgccgctgctgctgaacctgcacgtgcccggtcacgacccctcgcgcaacgtgctgctgttcgccttcctggtgatcgtggtgcagtcctcggacgtgttgcagtacatctggggcaagctgctgggccggcacctgatcgcgccgaagctgtcgccgtcgaagacggtggagggcttcgtgggtggcgtgctgagcgccagcgcgcttggggcggcgctgtggtggatcaccccgttcacgccgctgcaggcgttcggcctgtcgctgctgatcaacctgatgggattctggggcggcctggtgatgtcggcgatcaagcgcgaccgtgggatcaaggactggggccacatgatcgagggccatggcggcatgctcgaccggctagattcggtgtgcttcgccgcgccggtgttcttccatgtggtgcggtactactggaaggcgggcggcggcgggtga

SEQ ID NO: 493553 - DNA, 630 bp, Stenotrophomonas maltophilia
atgtttgccgaactgattgcccgcgcctgcagtggcgcgatccatgtggtgaccggcgcacgcgcgctgtggatcggttgcgcgccgtccagcgagcgccgcgtgtactacggcaaccacgccagccatggtgacttcgtgctgatctggtcatcgatgccaccggcactgcggcgccaggtgcgcccggtggccgcggccgagtactggcagcgtgatggcctgcgtcgctacctgatcgatgcggtgttcaacggtgttctggtcgagcgcgaggccggccatcgccagcaggacccgttgcaggtactgcgcgatgcggtggacgaagactgctcgctgatcctgttcccggaaggcacgcgcaatatcggcgatgaaccgctgttgccgttcaagagcggcatctaccacctggcgcggcaacggccggagctggagttcgtgccggtatggatcgacaacctgaagcgggtgatgccgaaggggcgattcctgccgttgccgctgctgtgcacggccaccttcggcacgccgctgcggctgcaggccgacgaggacaaggccgcattcctggcccgcagccggcaggcgctgctggacctggcgccgaatgggggtcgtgcatga

SEQ ID NO: 493554 - DNA, 438 bp, Stenotrophomonas maltophilia
atgagcacggttcccgatctggcgaccatgcagctgctgctgcggcaggggcgttggccggcatgcctgtcgctggggctgctgctggtggcattgctgctgctcggcaccgagccgggcctggcgatgatcgctgcagggttgctgctggccagcatgtctgcaggggtggcccagacgtaccacgcgtggcgggttgcgctggacgccagcctgctgcagctgctgcgcgatgagcgtatggacggcgatgccgccgcgcgccgcactgatcagctgctgcaggacagcggcctgcgccgcgcgtcgcccgatgcgccactgcgtggctgggatgcgcgctggtccggcatgcgccgcctgctgctgcgccagtacctgctgaccgcagtgcagttcgcactgctggtgctggccgtggtgtggccgcagacgtga

SEQ ID NO: 493555 - DNA, 1329 bp, Stenotrophomonas maltophilia
atggcgacgctcgccgcaaccccgctggccgcggaagggcgcccttggcggcgcgccctgctgtggctggccctgctgggtccgttcttcttcgcaagctacggcttcgccaactggatggccggccgccacgccaccctgccggtgatggcgttcgcgtgggagacacgcatcccgttcgtgccgtggacgatcgtgccgtactggtcgatcgacctgttctacgcaatctcgttcttcctgtgccggcatcgcttggaactggaccggcatgcgctgcgactgttcagtgcgcaggtcatcgcggtggcctgcttcctgctgtggccgctgcgtttcagcttcgagcgtccggagatcggcggtgtgttcggctggctgttcgatgtgctgctgggcttcgacaagccgttcaaccaggcgccgtcgctgcacatcgtgctgttgatcgtgctgtgggtgaagttcgcgcagtacctgcatggcgtgtggcgcggggtactgcatgtgtgggcactgctgatcggcgtctcggtgctgaccacgttccagcaccatttcatcgatatcccgaccggcctgctggccggttggctgtgcgtctggctgtggccggagcagggcacgccaccattgcgggcctggcacaccgcgcgtgatgcgaggcgttggcgattggcagcgttgtacctgctgggggccgccgtattgctggtgccggtggtgcttctgcgtggcgccgcgttgtggctgctgtggccggtggcgtcgttgctgctggtggcgctggcctatgccgggctgggtacagcggtgttccagaagcgcgccgatggccgcctgacgatggccgcgcgatggctgctggcaccgtacctgggcgctgcctggatcaactcgcggctgtggacgcggcgtgcgccgcagccgttgccggtgatggacggtgtgtggctggggcgcattccctctgaggcattgccggcccccctggtgggcgtggtcgatgcctgcgccgagctgtcctgtcgcgcgcagggcgccgcgtatgccagcgtgccgatgctggacctggtggtccctgcaccggaacagctgcgcgaagcggccgaggccatcgagcgcctgcatgcgcacggcccgttgctggtgtgctgcgcgctgggctattcgcgcagtgccgccagcgtggccacctggctgctgcgcagtggtcgtgcggccgatgcggacgcggcggtggcgatcgtgcgtgctgcgcgccctggcatcgtgctgggtacggcccatctgcgtgccatcaccgacgcggcaggagtgcgcgcatga

SEQ ID NO: 493556 - DNA, 1752 bp, Stenotrophomonas maltophilia
atgcgtcaggcgcaggaacgggaattccacagcttcgaccaggtaccgctgttctaccggtactgggcgggcaccaccgcaacgccggccaccaaggccatcgtgctgctgcaccgcggccatgagcactccggccgggtcacccacctggtcgatgagctggacctgcccgacaccgccttcttcgcctgggacgcgcgcggcaatggccgttcgccgggcgcacggggcgatgcaccgggcttcccggcgctggtgcgtgatctggacagtttcatcgcccacatcggcgccgagcacggcattgcggtggaagacatcgtggtgatcgcgcagagcgtaggggcggtggtcgccgcgacctgggtgcacgattacgcgccacgcctgcgcgcgctggtcatggcctcgccggcgttcaaggtgaagctgtacgtgccgttcgcgcggtcgggcctggccttgatgcagaagctgcgtggcaacttcttcgtcaacagctacgtcaagccgcagtggctgacccacgatccggcgcgggtggaaagctatcgcaccgacccgctgatcacccggccgatttcggtgcgcgtgctgctgggcctgtacgaggcggccgaccgcatcgtggccgatgcgcaggcaatcagcgtaccggtgcagctgctggtgtccggctcggatttcgtcgtgcaccgtggcccgcaggaccgcttctacgagcgcctgtccagcccgatcaaggagcgtgtgcatctgccgggcttcttccacgacacgctgggcgagcgcgatcgggcaccggcactggcgcgcatccgcagcttcatccaggcgcgttttgccgagccgctgcgcgagctgtcacggcgcgacgcgcaccgtcacgggccaaccttcgaagaatccgagatcctggcctggccaccggagcgcaacagcctggccgacctgcgctggcgcgtggtgcgtggcggcctgcgcttcggcggcacgctgtccgaaggcatcgcgctgggcctgcggaccggtttcgattccggtagcacgctggactacatctaccggaatgaggcgcgcggcaagggcccattggggcggatggtcgaccgcaactacctggatgcgatcggctggcgtggcatccgcgtgcgcggccagcacctgcaggaactgctgcgcgacgctgcccagcgcctgcgcgggcagggcacgccggtgcgtgtgctggacgtggccgccggccatggccggtatgtgctggaagcgctgggccagggcgaacagcgcgccgaccgtatcgtgctgcgtgatttcagcgatctgaacgtgacccagggccaagcgttgatcgagcgcctcggtgcggccgacatcgcccgcttcgagcagggcgatgcgttcgatccggcgcaactggccaaggtcgatccagcaccgacactggcggtggtctcgggcctgtacgaactgttccccgacaacgacgccgtgctgcgctcgctgcagggcattgccgcaacggtgccggcgggaggctacctggcttacaccggccagccctggcacccgcagctggaattcatcgcgcgcgccttgactagccatcgcggtggcgcggcgtgggtgatgcgtcgccgtacccagcaggagatggatgagctggtgcgcctggccggcttcgagaaggtgacgcagcgcatcgacgacttcggcatcttcaccgtgtcgctggcgcgccggaccgcgtga

SEQ ID NO: 493557 - DNA, 618 bp, Stenotrophomonas maltophilia
gtgtcgatctatgcattgaaaggacgttttcaggacctgttgcgtccggccgtacgcggtctgtaccgcatggggatcaccgccaatgcggtgaccttgaccgcggccgcggtctcgctgctggtggctgccgccgtctggtgctgcgcgccggcccagcccctgctgtacctgctgctgccgctgtggatgctgctgcgcatggcgctcaacgccgtggacggcatgttggcccgcgagttcggccagcagtcgcggctgggcgcctatctgaacgagctgtgcgatgtgatcgccgatgcggcgctgtacctgagcctgctcagcgtgccgggcgtgcgcccggaagtgctgtggctgctggccttgacggcggcgctgagcgagtacgccggggtgctggggctgatggtcggtgccagccgccgctatgacggcccgatgggcaagagtgaccgcgccttcgtcgtcggcgtgctgggtctgctgctggcgtttgagtgggttggcgcgatgacggtcactggcgtggctgcggccatggcggtgctgtgcatgctgaccatgatcaaccgcgtccgtcgcggactgcgggaagcagcggtttcgccgaattaa

SEQ ID NO: 493558 - DNA, 1584 bp, Stenotrophomonas maltophilia
atgactgctgatctgttgcccgtccgccgggccctcctctccgtttccgacaagaccggcctggtcgagctggccactgcgctggcggcacgcggcgtggagctgttgtccaccggcggcaccgccaaggcgatccgcgatgcgggcctggccgtgaaggacgtggccgaggtcaccggcttcccggaaatgatggacggccgggtcaagaccctgcacccgatggtgcacggcggcctgctgggccgctccggcctggatgacgcagtgatggccgagcacggtatcggtgccatcgacctgctggtgctgaacctgtacccgttcgaatcggtcaccgcccaggccgactgcaccctggccgacgcggtcgagaacatcgacatcggcggcccggccatgctgcgctcggcggccaagaacttcgcccgcgtggcggtggccaccgatccgtcgcagtacgccgagctgctggcctcgctggaggccaacaacggccagcttacggcggccacccgcttcgcattctcggtggccgcgttcaaccgcgtcgcccagtacgatgcggcgatcagcaactacctgtcggcggtcaccgccactgacgccgccgtgccggcccgtgccgagtacccggcgcagatgaactccaccttcgtgaaggtgatggacctgcgctatggcgagaacccgcaccagagcggcgcgttctaccgcgacctgtacccggtgccgggcacgctggccaccttccagcagctgcagggcaaggagctgagctacaacaacctggccgacgccgatgcggcgtgggaatgcgtgcgccagttcgatgcgccggcctgcgtcatcgtcaagcacgccaacccgtgcggcgtggccgtcggcgccggcaacggcgatgcctacgagctggcctacgccaccgacccgaccagcgccttcggcggcatcatcgccttcaacaagccgctggatgccgccaccgccaaggtgatcctcgaccgccagttcgtcgaagtgctgatcgccccggactacgagccggccgcgctggagtacgcgcagaagaaggccaacgtgcgcgtactgcgcatcccgcacggcgacggcctgaacaacttcgacagcaagcgcgtcggctcgggcctgctgctgcagtcctcggacaaccgcggcatgacccgcgacgaactgaaggtggtcagcaggctggcgccgaccgacaagcagttcaccgacctgctgtttgcctggaaggtcgccaagttcgtgaagtccaacgcgatcgtctatgccaaggacaaccgcaccatcggtgtcggtgccggccagatgagccgcgtgtactcggcccgcatcgccggcatcaaggccgccgatgcgaacctggtggtcgagggctcggtgatggcctccgacgctttcttcccgttccgcgatggcatcgatgccgctgcagccgccggcatcaaggcggtcatccagccgggcggttcgatgcgcgatgccgaagtgatcgccgccgccgacgaacatggcctggccatggtgttcaccggcgtgcgccacttccgccactga

SEQ ID NO: 493559 - DNA, 1284 bp, Stenotrophomonas maltophilia
atgaagatcctcgtcatcggctctggcggccgcgaacacgccctggcatggaagctggcccagtcctcccgtgtcaccgaagtgatcgtggcgcccggcaacgccggtaccgccagcgaagacacgtgccgcaacgtggcagtcaaggtgaccgatatcgacggcctgctggcgttggcccaggccgaaggcgtagcgctgaccgtggtcggcccggaagtaccgctggtggccggcgtggtcgaccgcttccgcgccgccggcctgcgcatcttcgggccaaccgccgccgccgcgcagctggaaggcagcaaggcctacgccaaggacttcctggcgcgccacaacatccccaccgcgtactacgccgtgcacagcgacgtggacgccgcgctggcgtatgtgcgcgagaagggcgcaccgatcgtggtcaaggccgatggcctggccgccggcaagggtgtcattgtcgcaatgacgttggccgaagctgaagacgccgtgcgtgacatgctgtccggcaacgcgtttggcgatgccggtgcgcgcgtggtcatcgaggaattcctcgacggtgaggaagccagcttcatttcgatggtggacggcgtgcatgcgctgccgatggccacctcgcaggaccacaagcgcgtcggcgacggcgacaccggcccgaataccggcggcatgggcgcctattcgccggccccggtggtgacgccggaggtgcatgcacgggtgatgcgcgaggtggtgaaccccaccgtgcagggcatgatcgccgacggcatcccgttcaccggtttcctctacgccggcctgatgatcgatgccagcggcgcaccgaaggtgatcgaattcaacgtgcgctttggcgacccggaaacccagccagtgatgctgcgcctgcagtcggacctggtcgagctggtggaagcggccatcgatggccgcctggatgaggtcgaagcgcagtgggacgcgcgcccgtcgctgggcgtggtgctggcggccaggccgtacccggaagcgccgatcaccggcgacgtgatttccggcctggacgacgtgccggccagtgccaaggtgttccatgccggtacggcattggatgctcagggccacgtggtcagtgcgggcggtcgcgtgctgtgcgtggccgcactgggcgacagcgtgcgcgacgcgcaggccaatgcctacgccggcgtggccaaggtgagttgggccaacgcgttccaccgcaacgacattggctggcgcgcgatcgcacgcgaggggtga

SEQ ID NO: 493560 - DNA, 333 bp, Stenotrophomonas maltophilia
atgacaaagacggttgaacatagacgtgcaaagagtgcgatcctcgatgcggtgcatgaaggcgcggcgggcctttacgccagcggcttcatcgacaagcggcgcatgagcatgtacgaggcgctttgtctggagcctgtgcccgaatacagcagcgcccagatccgtgcacttcgcacgtcgttggaacttagccagccggtgttcgcaggtttgctcaacaccagcgtttcgacggtccgtagctgggaacagggcgagaagaagccgagcgggccgtcgctgaagcttttgaacctgattgatcggaagggtctcgaagcagtcctgtaa

SEQ ID NO: 493561 - DNA, 876 bp, Stenotrophomonas maltophilia
atgagccagaacacctctactgcccttgtggcaaacaatctcccgattcccagtgcgctcggttcgctggacgcctacatcggtgccgtgcaccagatcccggtgctgtcggtcgatgacgaacaggacctggcccgtcgcttccgcgacggcaacgatctggacgccgcccgcgagctggtgcattcgcacctgcgcttcgtggtgcacgtggcccgcggttacaacggctacggccttgccctgggcgacctgatccaggaaggcaacatcggcctgatgaaggcggtcaagcgcttcgacccggacatgggcgtgcgcctggtctccttcgccgtgcactggatccgtgcagagatgcacgagttcatcctgaagaactggcgcatcgtgaaggtcgccaccaccaaggcgcagcgcaagctgttcttcaacctgcgcaagtcgaagacgcgtctgggctggatgaacgcggcggaagtgagcgcggtggccaaggacctgaacgtgtccgagcgcgaagtcatggaaatggagtcgcgcctgtccggccgcgatatcggtttcgacgcgccgaccgacgaggacaacgaacacgcaccgccgtcgccggctgcgttcctggttgccgatgacgaagacccgtcgatggcctacgagcgcgaggacagcgaagacaaccagatgcagctgctgcgcgaaggcctggccgaactggatgcccgctcgcgcgacatcatccgccgtcgctggctggacgccgacagcaaggtgacgctgcaggagctggccgacgagtacggcgtgtccgccgagcgtatccgccaggttgaggcgaacgcgctgaagaagatgaaggcgctgttcaccgcgtaa

SEQ ID NO: 493562 - DNA, 714 bp, Stenotrophomonas maltophilia
atgatggatgaagtagccgacaccccgacgatccagctggaaccgagctggaagcagcatgtcggcgattacctgttgcagccgcagatgcgcgagctgtccagcttcctgcgccagcgcaaggccagtggcgcggcggtgttcccgcccggcccgcagatcttcgccgcgttcgacgccacgccgttcgagcaggcgaaggtggtgatcctcgggcaggacccgtaccacggtcgcggccaggcacatggcctgagtttctcggtgccgccgggcgtgccggtgccgccgtcgctgctgaacatctacaaggagatcgagagcgatctcggtatcccgcgtccggaccacggctgcctgattccgtgggcgcagcgtggcgtgctgctgctcaatgcggtgctgacggtggaagagggcaaggccggtgcgcaccagggtcgtggctgggaaggcttcaccgaccacgtggtggatgtgctcaaccgcgagcgcgaagggctggtgttcatgctctggggcgcctatgcgcagcagaagggcaaggtgatcgacacccgccgccatcgcgtgctgaagtcgccgcatccgtcgccgctttcggcccatcggggcttcctcggctgtcgtcatttctcgatggccaacgagtacctgcagcgccgcggccaagccccgatcgactggtcgctgccgccgcgctcggcactctga

SEQ ID NO: 493563 - DNA, 843 bp, Stenotrophomonas maltophilia
atgcaaccgcaagcgctgaaacaccttgaagggcccgcgacgcgggtgatggtggtcgatggctcgaagctggtgcgcaagctgatcgccgacgtcctgcagcgtgacctgccgggcgtggaggtgatcggctgcgacagcatcgaggacgcacagcaggcgctggcacaggggccggtggacctggtgacgacctcgctgaccctgcgcgatggcgacggcctggcgctggcgcggatggtgcgcgaagcggccggccaggcctatgtgccggtgatcgtggtctccggcgatgcccagcagcacctggagcagcgccgcttcaccgagtacgtcaccgactatttcgacaaatcgctcggccatgaagcactggcgaccttcatccgcggctacgtgcagccgcagaccatccccggtgccaccatcctctatatcgaggacagccgcgtggtggccgaggccaccaagcgcatgctggaacgccagcagttgaacgtgctgcacgtggtcagcgccgaagaagcgttcaccctgctcaccgccgagtcgctgggccgcagtcgccaccgtatcgacctggtgctgaccgacgtcaccctgaagggcgaactgagtggtcgcgacgtggtgcagcgcgtgcgcgtggatttcggctacggcaagcgccgcctgccggtgctggtgatgaccggcgatggcaacccgcacaaccagaccgggctgctgcagtccggtgccaacgacctggtgctcaagccgatcgaagaacggctgctggtcaccaaggtgctgttccagctgaggctggcccgattgaacgatggacctctgttgcgatga

SEQ ID NO: 493564 - DNA, 948 bp, Stenotrophomonas maltophilia
atggcgaagaacgaaaacagcgaagccgccgccccctcacgcgtgggcgtctggttccagcaccacgtgcacagcgtggtgttcagcctgggccgcgcctgccgcaagccatgggcgaccctgctgacggtgatggtcatggcgctggcgctggcgctgccgctgggcctgtcgatcgcgctggacaacctcaagcagttcgccggcagcgtgcagcagtcgcgcgacatcaacgtgttcctgaagggcaacgtcgatgcacccggcgcgctgcgcctggccggccagctgcgcgaccgcgacgacgtggccgaagtgaacgtgcgcacgcccgagcagggcctgcaggaactgcgcgatgccggcctgggtgaggcgatcgacgcactcaacgacaatccgctgccttcgctgctggtgatcactcccggccagggcaaggacgacgcacgcctggcgcgcgcgctggaaagcctgcccgaggccgatctggtgcagcacgatgcgctgtggcgccagcgactggatgcctggcttgccttcggtgcgcggctggtgcaggtgctgtcggtcctgctcggcgcaggtgccgcgctggtggtcggcaacacggtgcgcctggacatccaggcccgccgcgaagagatcggcgtgctgcagctgctcggcgccagcgatggcttcatccgccgcccgttcctgtacctgggcgcgtggtacggcctgggcgccggcgcggtggcgctggccctgatcggcgctgcaggtgccgccctgcgcatgccgctggccgaactctcgcgcagctacggcagcccgttcgtactgcacggcctggacctgctgcacggcggcctggtcctgctcggcacgctgctgctgggttggctgggcgcctggctggtcaccggccacttcctccgccagacccgcccgaccgacacctga

SEQ ID NO: 493565 - DNA, 687 bp, Stenotrophomonas maltophilia
atgagtgtcctgcgcttcgacaatgtcagcaaacagtacgccggtggccacgaggcgctgatcgatgtcagcttcgaggtcgcgccgggcgagatgctgttcgtcaccggccattccggtgcgggcaagagcaccctgctcaagttgatccacctcgacgagcggcccagccgcggcgcggtggtgttcgacgagcgcaacctgctgaaggtgcgcggcggcgacgtgccccgccaccgacgcgcggtgggcgcggtctaccaggaccaccggctgctgatggaccgctcgatcgccgagaacgtggcgctgccgctgatcctgcgcggcacccgccgtggcgacatcagcaagcgcgtgcgctcggtgctggagcggatgggcctgggccatcgcgagaaggcgctgccctcgcagctgtcggccggcgagcagcagcgcgtgggcatcgcccgcgccatcgtcggcgagcccaagctgctggtggccgatgagccgaccggcaacctcgacccgaccctggcggcggagatcatggccctgttcgccgagctgccctcgcgcggcaccagcgtactggtggtcagccacgacctgccgctgctgcgccgcatgcgcaagcgcgtgctgatcctcgaccatggccggctggtggatgacatctcgccgcaggacctggcggagtaa

SEQ ID NO: 493566 - DNA, 1722 bp, Stenotrophomonas maltophilia
atgagcgacaaaccgctgaccgatttgaccttctcctccttcgagctgcatccggccctgcaggccggccttgaaggagccggattcacccgctgcaccccgatccaggcgctgaccctgccggtcgcgctgcccggcggtgatgttgccggccaggcccagaccggcaccggcaagaccctggccttcctggtcgctgtcgtgaaccgcctgctgacccgcccggcgctggccgaccgcaagccggaggatccgcgtgcgctgatccttgccccgacccgcgaactggccatccagatccacaaggatgcggtgaagttcggttccgacctgggcctgcgtttcgcgctggtctacggcggcgtggattacgacaagcagcgtgagctgctgcagcagggcgtggacgtgatcatcgccaccccgggccgcctgatcgactacgtcaagcagcacaaggtggtctcgctgcatgcctgcgagatctgcgtgctggacgaagccgatcgcatgttcgatctgggcttcatcaaggacatccgcttcctgctgcgccgcatgccggaacgcaccatccgccagaccctgctgttcagtgccaccctcagccatcgcgtgctggagctggcctacgagcacatgaacgagccgcagaagctggtggtcgaagccgagaccatcaccgctgcgcgcgtgcgccagcgcatctatttcccggccgacgacgagaagatcccgctgctgctgggcctgctgtcgcgcagtgaaggcgcgcgcaccatggtgttcgtcaataccaaggtgttcgtcgagcgcgtcgcccgctcgctggaaaaggccggctaccgcgtcggcgtgctgtccggcgacgtgccgcagaagaagcgtgagagcctgctcaaccgcttccagaagggccagctggaaatcctggtggccaccgacgtggccgcgcgtggcctgcacatcgacggcatcaagtacgtctacaactacgacctgccgttcgacgccgaagactacgtgcaccgcatcggtcgtaccgcgcgcctgggcgaagagggtgatgcgatcagcttcgcctgcgaacgctacgcgatgggcctgccggacatcgaggcctacatcgagcagaagatcccgtccgagccggtcaccaaggaactgttgacgccgctgccgcgcccggaacgcccggccccggctgctggcgaggaaggtgaggagaacgagagcgtcggccagatcttccgtgaagcgcgcgaagcccgcgccgctgaagaagagcgccgtggtggtggtcgcagtgggggccgctccggcggtggccgtggcgagcgtcgcgacggtgagcgcagcggcgagcgccgttcgcgtggcccgcgcaagccgcgcgtggaaggcgagcaggttgcagctgccccggccgaaggtgctgaagccgctgtcgcccaggctccgcgtccgccgcgcccgccgcgcgccgagggcgcgccggaaggcgccgtggatggcgaacgcaagccgcgcaagcgccgtcgtcgtcgccacggccgtccggtcgagggtggcgagggtgtgcaggccaacgccggcaacggcgccagcccggtgaccccggtgcaggtggtggccaagccggtgcgcacggcggccgacagcggcgattcgttcctgacccgcatcggccgcaagatccgccggatgctgtcgggcagctga

SEQ ID NO: 493567 - DNA, 330 bp, Stenotrophomonas maltophilia
atgagcgacaaggttgtacatgtcggcgacgccgacttcgatagcgcagtgctgaattccaaggaaccggtgctggtcgatttctgggccgagtggtgtggcccctgcaagatgatcgccccggcgctggacgaactggccgatgcctaccagggccgcgccaagatcgccaaggtcaacgtcgaccacaaccgcgcactggccgccaagtaccacgtgcgttcgattccgtacctggtcgtgttcaaggacggcgagaaggtcggcgagcagatcggtgcggtgggcaaggcccagctggccggcctgctggacaaggccctggcctga

SEQ ID NO: 493568 - DNA, 1746 bp, Stenotrophomonas maltophilia
ttgtccgataacacttccgaaaccggcagcgccgatgcgcccgccgaaaagcgcgtgcgcaagccccgagtgagcaaggccgccgccccggcagccgccgaaaccagcgccgctccggcgcaaccgaccctgccgctggcagccgcgcccgaagcgccggcaccggctgcagccgcccccgcgccgagcgcgcctgccactgaagcccccgcctccggcggcggtgagggtggcgaaggccgcgaatccggacagcgccagcagaaccaccagggcggtgggcagcaccagggccagggtcagaacaacaacccctacaaccagaacggccagcagggccagggcaatcgccgcgaccgtttccgcaaccgtcgcgaccgcgaccgcaaccgcggtggccgcgatgacggcatgccgcaggacggcggcgagcagcagcccttcgtgccgcgcccgcacgccaacgtgcccgagggcttcccggtctactcgctgagcgacctcaagcgcatgccggcacagaagctgctggagatcgccgagcagctgcagatctccgaaggcgtggcccgtgcccgcaagcaggacgtgatcttcgccctgctgaaggtgctgacccgccacggcgacggcgttgccgccgatggcgtgctggaaatcctgccggacggcttcggcttcctgcgcgcggccgaagccagctacctggccggcccggacgacacttacatctcgcccagccaaatccgccgcttcaacctgcgcaccggcgaccacatctccggccgcatccgcttcccgaaggacggcgagcgctacttcgcgctgaacatcgtcgacaccatcaacggtgagccgatcgaagcgtcgaagaacaaggtgctgttcgagaacctgaccgcgctgttcccgcgccgccgcttcaccctggagcgtggcaacggttcgtcggaagacattaccggccgcatcctcgacctgatggcgccgcagggcaagggccagcgctcgctcatcgtgtcccagccgaaggccggcaagacgatgatgatgcagcaggtcgccactgccatcaccaccaaccatccggacgtgcacctgatcgtgctgctgatcgacgaacgcccggaagaagtgaccgaaatgcagcgcaccgtgcgcggcgaggtcatcagctcgaccttcgacgagccggccgcgcgccacgtgcaggtggccgaaatggtcatcgagcgcgccaagcgcctggtcgagcacaagaaggacgtggtgatcctgctcgactcgatcacccgtctggcccgcgcctacaacaacgtggtgccgagctcgggcaaggtgctgaccggtggtgtggacgccaacgccctgcaccgcccgaagcgcttcttcggtgccgcgcgcaacgtggaggaaggcggcagcctgaccatcatcgccaccgcgctggtcgacaccggctcgaagatggacgaggtgatctacgaagagttcaagggcaccggcaacagcgaagtgcacctgagccgccgtatcgctgaaaagcgcgtgttcccagccatcgacatcaaccgttccggcacccgccgcgaagacctgctgatcgagccggaactgctgcagaagatctggatcctgcgcaagctgctgcatccgatggatgaaatggccgcgatggagttcctgctggacaagatgaagaacaccaagtccaacgacgagttcttcggctcgatgaagcgctga

SEQ ID NO: 493569 - DNA, 1068 bp, Stenotrophomonas maltophilia
atgcgatttctgctgcagagcttgagggttcttccttgcgcaacccatcgaggccactttgtcgaatcccatctttcgcgggttcgcatgcacctgaatgccggtgaccatgcttcggccgaggccgtgatggcgggggtgccggctgaaacccatgagcaccttgtctggcgcttgtcggtggaacgtcgggttggtcgatggatcaagacgtggacgcaggcgttgccacagtcctctcaccctctactggtttctgcatatgcggaaatcaacaaggcatggtcagtccgcggtgagagctacgcagcggatatcccgatgttgcggcgacgcagataccccgggatcatgatgcaggcatatcggaagctctcggacatcgtggcccaggagcctggcaatgcaatggcgttggctggcctgattcactgtgacgtcgtggtcggcaccggtgacggaaacagggatgactggctcaatgcggcgatggcggccgagccgttccattgcccttcgatcgtgcagtatgcgagagggacatggcagcgctggggaggcgagccggatgatcactttcgatttgccgattgggtggttgagaacgcgcccgctggcagctgctcgcacatcgtggctgcacaagcgctgctggatgatgccctgaccgtggcggacggcttcagctcaatgcgaggaatctcccgccatctcggaaacgagacaaccgctgcgtggctacgccgcgcaatactgaaatgggccggtgccacgccggaaaccctggagtgtcgtctgcgggacattgcatcccttcatggcgacagctatcacgggatctgcatggagacatttgcatttgcggcgtatctcgcgggtgccaaagatgaggcccgccagctgctgatcgcattgagggggcgattgcaggctgatgtatgggagatgctcttgccgtccattcccggctggctggctgccgttggcctcaggcatcgggcggcgcacctggcgcatgatcgcatctgtcgtgatctggagttggacccgcggcagatctgccgatag

SEQ ID NO: 493570 - DNA, 1575 bp, Stenotrophomonas maltophilia
atgcgaacgctgtctccccgcctcaacctgggcaagctgatcctcgccctggccctgctcagcgccatcatcgccctggccaataccctgctggccagctaccgcgtgcagcgcgaccagctggtcggcaataccctggaagccaaccgcgtctatgccaccaagctggccgagaccacccagaacttcctgttggccgcgcagcaggagctggcctacgccgccacccggctcggccagagtgacctcgatccggcacaggcgcaggacgaggccagccgcctgcagctgcagaccaacagcttcaattcctcgctggtggtggacgccgacggcctggtgatcgccacctcgccgcagaccctgcagctgcagggcgagatcctgcacagcgtcggcaacaatgccgcattggctgcacgccagccgatgatcagcgacccgtaccagtcgaccacaggcaagctgctggtctcgctgtcgcacccgatcttcgaccgccagggccactatcgcggctacgtcagcggcaccctgtacctgcgccagcgcagcgcgctgcatacgctgctgggcaagcactactaccgcgacggctcctacctgtacgtggtcgaccgccatggccgcctgctgtaccacgccgacagcaagcgggtcggcgactacgtggtcggcaacccggcggtgaaggcggtggtgcgcggtgagcgcggcgcgcagcaggtccgtaacaacctgggcgtgtcgatgctggccggttacgcgccggtaccggccactggttggggcatcatcgcccagcggccgaccgaggccacattgcagccgttgtcacggttgatgaccgcggtgatctggaacgcgatcccgctcggcctgctgtcactgctgatcacctggtggttcgcccggcgcatctcgatgccgctgtggcagctggcgcgcaacgtgcagggtggcgaggacaccggcagcgcgatcaaccacgtcagcggcatccgcgcatggtacttcgaggttgcccagctcaagcaggcggtcctgcacagcttcaacgccctgcaggaccgcattggcacactcaaccgcgccaaccgtaccgatccgctgaccggcctgctcaatcgccgcggcctgcagcaggcgctggatgcgctgcaggtgcagggcattccgttcgcgatcctggcgctggacatcgatcgcttcaaatcgatcaacgacagccacggccatgacgtcggtgacgccgccatcgtccatatcgccgaccagatgcgccgctactcgcgcgacagcgacatcctctgccgtgccggtggcgaggaattcctgctgctgctgccgggcatcagtaccgactcggcgcgccaggccggcgagcgcctgcgccagcacatcgccgatcatccgttcgagccggtcggcaccatcaccgtgtcgctgggcgtggcccacttccccagcttccatgtcgatgccgagcaggcgctgcggctggccgacaaggccctgtacatggccaaggaacagggccgcaaccgcgtggtggtctacccgtacgcggactga

SEQ ID NO: 493571 - DNA, 891 bp, Stenotrophomonas maltophilia
atgatgcgttcccccctgttccttgcgctggccctggcgttcgccgccggtgctcccctgctgccggccgatgccatggcccagaacgcgcgcgccgtgcgcgccactgccgagatgagcatggtgctgtcgggcagtatcgacgtggcggccgatggttcggtcagcacgctggtcctggaccagcgtgccatgctcgcacccggcatcgtgtcgttcgtggaaggcgccatccgcggctggcagttcgaaccgacgttgcgcgatggcacgccggtggccgtccacgcgccgctgcgcgtacgcctgcgtggcaagcagcaggaagacggcaactaccagatcagcatgaccagcgtcgacttcagtgaatatgatccgaaggctaccgattcgatcacccagaagcgcatgccgccgccgcgctaccccgaagaggccttccgcaatggggggcagggtgacgtactgctgctggtcaaggtcgcacgcgacggcaccgtggccgatgtcattgccgagcaggtgaacatgaccgtggtcgcaccggaacggaccatggccaggatgcgcgacatcttcgccaaggccagtatcagtgcggcccgcaagtggaccttctcgccgccgaccaccggcgaggacagcgcgcgggattcatggaccgtgcgcgtgccggtcactttcgccctgaacaacagcgacaacggccagccggaacgctacggccgctggcgtgccttcatccccggcccgcgccaggccgcaccctggcgcacgccggatggcgccggacaggcgggaagtgatctgctgccggccggcggcgtgtacatggtcgatggcacccagcgcggcctgcgcctgctgacgccgctggcgcagcgctga

SEQ ID NO: 493572 - DNA, 1731 bp, Stenotrophomonas maltophilia
atgtccgagcctgacaccgttgccgacttggcgtcgcgcatcgccggcgccattcacgccggcttcgagcagtatcacgcccgctttgcggcgatcaccgcccgtgcgcggcagcgtttcgagcagcgcgactgggtgggcgcgcgccgggatgcagtcgagcgcatcgcgttgtacgacctgtgcatcgccgaacagatggatgcgctgcggcgtctcgccggcgaagccatcggggaacgcgcgctgtggctgcaggtgcatgcgcgctatagcgcactgctgcgggggctgatcgacgccgaactgtacaagaccttctacaacacgctgtcgcggcgcttgttctccacccgtggcgtggacccggcgctggagttcatcgccttcgatgtcgagccgtccgatgcgatcacccacccggtcgcacggcatacctatgcggtctcgccgacgcggccggtggaggctctccagcgcgtgctggccgattaccgcttcgacattccctatgcgcaccagctgcgctgcgcggcggccatcgctgtgcgcctgcaggatgatctggcccactggggtgatacgccggtgcgcagcatcgagctgctcgacaccgtgttctaccgggagcgccgcgcctacctggtgggtcgcgtgttcggcgaacaccgcttctcaccgtgcgtgatcgccctggtcaacgatgggcagggcctgcgtgcagatgcggtgctgacccggcgtcgcgatgtcgcccatctgttcggcgtgtcgcgcagctatttccaggccgaccttgccacggtgggcgatgcggtggtgttcctgcgcagcctgttgccgggcaagcccatcgatgagatctacaccgtgctgggtcgcgccaagcagggcaagaccgagcgctaccggaccttcttccgccacttcaacgaacatccgcaggagcggctggggcccgccgaaggcacgccgggcatggtcatggcggtgttcaccctgcccagctatccgctggtgttcaagctgatccgcgaccgcttcgcctggcccaaggcgatgtcgcggcagcaggtggaagagaagtatgcgctggtgttcaatctcgaccgcgtcggccgcctgctcgatgcgcagccgtatcgccacctgcgtttcccgcgcgaccgcttcgccccggccttgctgcaggagctgcttgcgcaatgcgcgcagagcgttcgcgtcgatggcgaccaggtggaagtcgcactgtgctatgtgcagcgtcgcttccgtccattgaacctgtacctgcgcgagcagggcggcgaggcggtgcgcgcggcggtactcgactacgcgcaggcgatcaccgacatggcgcgcaacaacatcttccccggcgacatgctgccgaagaacttcggcgtatcgcggcatggccgggccgtgttctacgactatgacgagctgtgcctggtcagtgactgcgtcttccgcgcctggccgcagccgcgcacgccggaggaagccatggccgacgaaccctggttccatgtcgggccacgcgacgtgtttcccgagcgcttcggcccgttcatgggcctgccggcgggcgagctggcggcggtgcgcgaacattaccggcacctgtttgatcccgcgtggtggcagggcctgcaggcgcgcttcgccagcggtgattatccggataccccgccctatgcggcggtccatcgcctggcctga

SEQ ID NO: 493573 - DNA, 522 bp, Stenotrophomonas maltophilia
atgcagcaaatgacctttattccgcgcgtggaggaaggcaacgtcatcccgcagcgcgcccgcgacggctacatcagcgcgaccgccctgtgccagtccgtcggcaagcgctggtccgactaccgggcactgaaatcgacggaggagttcctgcaggagctcatggcgcagacgaagctgtccgagaacgagctgatccacgtggtatccggtgggaacccggccatgcagggcacctggatccacccgtacctcgccatccacctcggccagtggctgtcgcgcaggttcgcagtgaaggtctcgcagtgggtggtggaatggcagcagggtcgcgccaatgcgttgctgcccgtgcacatcgaccgctacatgcagaaccgtgccaaggtgccgtacacccatttctcgatgctcaacgagctgacgttgaacctgatcgcaccgctggagcaggcgggctatacgctcccgcaggcgctggtgccggacatctccggaggccgcctgttctgcaagtag

SEQ ID NO: 493574 - DNA, 153 bp, Stenotrophomonas maltophilia
gtgccggccaagctgtatcccaacgagttctacgaggacttccgccgccacttcaacgaagtgtggctgccagatcatgcgcccaggtacttcgccgcacgcgacagcaaggctctctcgttggtctctgcactgctgcttccagcagcctga

SEQ ID NO: 493575 - DNA, 417 bp, Stenotrophomonas maltophilia
gtgagcccggccgcaggggaacaaggggctcggaccaacatcgacaaggggtgcgacgtggctggattgaatgattcgttgaacgcactgatgggcatcgacggcgcgcaggcagtggcgctggtcgattacgaaagcggcatgctgctgggcgaagccggtgctggcatggacatggaagtggccgccgccggcaataccgaagtgatccgcgccaagatgaagaccgccgcatcgctgaacctcaacgacagcatcgaggacatcctgatctcgctgggcaaggcgtaccacatcatgcgcccggtggcgaagaagaagggcctgttcttctacatcgtgctggaccgtgccaagtccaacctggcattggcccggcgcaaggtgcaggacgtggaggccgaactggcgatctga

SEQ ID NO: 493576 - DNA, 417 bp, Stenotrophomonas maltophilia
atggctgacgggcagctggcggtactgcccgacgccggtcagcgtgagcgcctgcagcccctgctgcaggacctgcagcagcgggtcgaaggcgtgcgcacggtcgtgctggccagcgtcgatggctttgccctggtcagcgccggcgccgaagggcgcggcgaacggctggcggcgatgaccagcgcgatgctggcgctggctgcggcggtcgggcgcgaactggtgctgggcgatctgcagacactgatgctggaagcggcgggcggaaaggtgctgatgctggcgatccaggccgaagggcgcgcaccgttgctgctgatggcggcctgcgaccagcgcagcgtgatcggccaggtgctgtggcagagcagggaatgtggccaggcgatcctggccgaactcggcggatcgtga

SEQ ID NO: 493577 - DNA, 549 bp, Stenotrophomonas maltophilia
atgcgtgagcacaaggtggtcgtgctgggcggcatgggcagcggcaagtcgacgctggtacgcagcatcgcggctggcgcggtggtcgacacggatgtggccaacagtgatcgcctcggcgccgacaaggcctccaccaccgtggcgctggactacgcagacatcgacctgcccaacggcgaacgcctgcgtctctacggtacacccggccagcagcgtttcgatttcctgtggccgatcctgctgcagggcgcccgtggcgcggtgctgctgctggatgcgcgccgcgccggcctggccagcgagctggaaggctatctgcaggtgctgcagccgttcgcatcatccttggcactggtcgtggcggtcacccacctggaccaggcaccgcaggccgcactggatgactgggccatccgtgcctgccttgacgaccagccgctgccgctgctggccgtggatgcccgtgaccgaggacagggactgctgctgatggatgtactgatgagcgaaatggaagcgcacgcactggtggctgcacatggctga

SEQ ID NO: 493578 - DNA, 966 bp, Stenotrophomonas maltophilia
atggcacgcgtgctggtagtgggaaccgatatccagggcgagcaggccctgctgcaacggctgcgcctggcctcggcgctgccggatggccaggtccgccgcagccaggatctggacgattgcgatctgctggtcatccgcgataccccggcgctgcgcaacgccgcccaacgcatgcgacagcaacgtccgcgcctgcagtgctggatcgaggacatcggcggccagctgcgtgatggcgacgggcatcaggacgtgcttgatgacggtgccatcggtcgcgcgttgcgtcgcatgcagttggcaccggagcccctggccatgcagacacctgcgccgatccgcctggcagatggcgcgcacgccatcacccgcctgctgcgcgagcggctgccgctgcgacagggccaggcactgctgggtgatgcgggcgagcctctgctgctgatggatctggagcacgatcaggccgtgctgttgcaggagccggctgcggcgctggtggagcggctggccgatgcctttgagcgcctgcagctggacgcgctgacaccggcgcgcctgcaggccctggccggcgagcggccacgccagccgctgcggccactgctgtggcaatgggcgcaacgcagccgccattggcaggcgctggacgagcgcctgcgcggcgcctcggtgaagctgctgcgctggccggacttccgcgtactgggccatgaccacgatggcttccgcctgtgctcgctgctgctcaagcgtgcgtgcacggttgaggaatgcgcgatgctgctcgaactgccggcggcggcggttcgcgatttcatccatgccgcctatctgtgtggctacgcgcagctgcaggccgccccggcgacgctgatgatggcggcaggtggcactcgcaccgacaacggactgctcgcccgcctgtggcggcacctgcgcgggagcgagcgcaatgcgtga

SEQ ID NO: 493579 - DNA, 2223 bp, Stenotrophomonas maltophilia
atgtccaagattctctacacgctgaccgacgaagcaccgttcctggccacccagtcgctgctgccgatcgtcggcgcctacaccgccaccgcaggcatcgtggtggaaacccgtgacatctcgctgtccggccgcatcctgtcgctgttccctgaactgctcagcgacgcgcagaaggtcagcgacgacctggccgagctgggccagctggcgaccaccccggacgccaacatcatcaagctgccgaacatctccgcctcggtgccgcagctgaaggcggccatcaaggaactgcaggaccagggctatccgctgccggattacccggaaaccccggccgacgaccagcagcgcgactacaaggcgcgctacgacaaggtcaagggcagtgcggtgaacccggtgctgcgcgaaggcaactccgaccgccgtgcaccgctgtcggtgaagaactacgcgcgcaagcatccgcaccgcatgggcgcctgggcgtcggattcgaagtcgcacgtcgcgcacatggccgccggtgacttctacggcagcgagaagtcggccaccctggccaacgccggttcgctgaagatcaccttccacggcaaggacggcagcgccgtggtgctgaaggaaaagaccgcagtgaaggcgggcgagatcgtcgatgccgccgtcatgagccgcaaggcactggccgcgttcatcggcgagcagattgccgatgccaaggcccagggcgtgctgttctcgctgcacctgaaggcgaccatgatgaaggtctccgacccgatcatgttcggcgtggcggtgaacgagttctacaaggacgtactgaccaagcacgccgacgtgctcaagcaggccggtttcgatgccaacaacggcattggtgacctggctgcgcgcctgccgtcgctgcctgaagccacccgcgccgcgatcgaggccgacctggccgccgagtacgcgcagcgcccgggcgtggccatggtcaactcggacaagggcatcaccaacctgcatgtgccgagcgacgtgatcgtcgacgcctcgatgccggcgatgatccgcgactccggcaagatgtggaacgccgaaggcaagctgcaggacaccaaggcggtcattccggaccgttgctacgccggcgtgtaccaggccgtcatcgacgactgcaaggcgcacggtgccttcgacccggccaccatgggctcggtgccgaacgtcggcctgatggcgcagaaggccgaggagtacggctcgcacgacaagaccttccagatcgccgccgacggcgtcgtcaaggtcaccgatgatgccggcgccgtggtgttcgagcacgccgtggaagctggtgacatctggcgcatgtgccagaccaaggacgcgccgatccaggactgggtcaagctggccgtcgagcgcgcccgcctgagcagcaccccggccgtgttctggctggacgccgcccgcgcccacgacgcgcaggtcatcgccaaggtcgagcagtacctgaaggaccacgacaccaccggcctggacatccgcatcctgccgccggtggaagccaccgcgttctcgctggaccgcatccgcaagggcgaggacaccatctcggtgaccggcaacgtgctgcgtgactacctgaccgacctgttcccgatcatggaactgggcaccagcgccaagatgctgtcgatcgtgccgctgatggccggtggcggcctgttcgagaccggtgccggtggttcggccccgaagcacgtgcagcagttcgttgaagaggactacctgcgttgggattcgctgggtgagttcctggccctggccgcgtcgctggaacacctgggcaaccgctacgacaacgccgctgcccgtgtgctggccaaggcgctggacgaagccaacggccagttcctggacaacgacaagtcgccatcgcgcaagctgggtggcatcgacaaccgtggcagccacttctacatcgcgctgtactgggcccaggccctggccgcgcaggacgaggacgccgccctgaaggcgcgcttcgccccgctggccaagacgctgaccgacaacgagcagaagatcgtcgaagagctgatcgcagtgcagggcaaggccgtggacatcggtggctactaccgcccggacgtggccaaggccagcaaggcgatgcgcccgagcgcgaccttcaacgccgcgctggagcagctgcgcggctga

SEQ ID NO: 493580 - DNA, 513 bp, Stenotrophomonas maltophilia
atgatcaagaccaccccgctacagaccgccctgatcgccgccctgctgggcagcgttgccctggtcggttgcaagaagaaggaagagtcgaccgacagcaacgccgctccggcagcgaccgccccggccgaacccgcagctcccgcgccgatgaccggcgcaccgccgccgatggccgaagcctctgcggtcaacgtctcgtcggtcaccgtcggcaagaccgccgccgccgacaagtcggttgcgacgacggctttgttcgcaccgaaggatgacatcatcgtctcggtcaagaccgacggcgctgcaaacaacgtcaccgttggcgccaagctgacctatcaggacggccaggtagccggcgaacagaacgctaccctgaacaccagtggtgcggaaaccaccaacgtcacgttcaagaatgcaaagggctggccggccggcaagtaccgcgccgaggtcaccgtcgatggcaaggcggccggaacgccgcaggagttcgaggtcaagtag

SEQ ID NO: 493581 - DNA, 294 bp, Stenotrophomonas maltophilia
atgagtaccgagaagaaagccgatttctccggcgtcagtggcagtgtcgacagtaccgccgagcaggtgccgaaggcggacttctccggcgtcagcgcttcggtggacagcaccgcagacgttgtcagcggcggcacctataccgtgcagaagggtgactcgctgtcgaagatcgccaagcagcatctgggcgacgccaatgcctggaaaaagatcttcgaagccaaccgcgatgtgcttgatgacccggacaagatcttcccgggccagaccctgaaactgccgccgaagtaa

SEQ ID NO: 493582 - DNA, 819 bp, Stenotrophomonas maltophilia
atgaacaccccacaggattccagcctcggtcgcgaggtcagttacccgtcgcagtacgatcccggcctgctgtttcccatcccccgcagcggcgcccgcgccgagatcggcctcgatgacgccgcgctgccgttcgttggccacgaccgctggcatgccttcgagctgagctggctcgacgcgcgtggcaagccgcaggtcgccgtcgccaccgtgcaggtgccgtgcacctcgccgcggttgatcgaatcgaagtcgttcaagctgtacctgaactccctcaacagcacccgtatcgacagcgccgaggcactgcgcgcgcgcatcgtggcggatctgtcggcctgcgccggtgcgccggtggaggtcgaattcggcctgccgggcctgcgtgagacgccgctcggcgaatccatcgatgggctggacctggagatcgactgctacggcccgccgcaggcagacttcctcgccgctgatgccggcgaggtggtggaggaaagcctggtctcggcgctgctgaagtccaactgcccggttaccggccagccggactgggccacggtcagcctgcgctaccgcgggccgaagatcgaccgcgccggcctgctgcgttacctggtcagctaccgcgagcacgccgagttccacgagcagtgtgttgaacggatcttcagcgaggtgtctgcgcgctgccagccgcagtggctggaagtggaggcccgctacacccgtcgtggcggcctggacatcaacccctggcgtgccagcccgggcatcgccgccccggccgcgacctaccgcgaactgcggcagtaa

SEQ ID NO: 493583 - DNA, 1161 bp, Stenotrophomonas maltophilia
atgaattccagagccgccttgctggcgcttgccgttggcgccttcgccattggaaccaccgaatttgccccgatgggcctgttgccggtcatcgccgacggcgtgggcgttgggatccccaccgccggcatgctgatcaccgcctacgccgtgggcgtgatgctgggcgcgccggtgatgaccctgctgatgggccgtttcggcaagcgcaccgcgctgatgctgctgatgtccatcttcgtggtcggcaacctgctgtccgcgctggcgccgaactacgggctgctgctgctgtcgcgcctggtcactagcctcaaccacggtgccttcttcggcatcggtgcggtggtcgccgccagcctggtgccgaaggaaaagcaggctgccgccgtggccaccatgttcatgggcctgaccatcgccaacatcggcggcgtgccgctggcgacctgggtcggccagcagctgggctggcgcctgtcctttgccggtactgcggcgctgggcctgatcgcaatcaccgcgctgggcttcgcgctgccggcatctgcaccggggccgcgcccggacgtgcgccgcgaactgaaggcgatcctgcagccgccggtgctgctggcgatggccaccaccgtgctcggcgccggtgccatgttcaccctctatacctacgtcgcaccggtgctgaccgaattgaccggcgcctccaataccttcatcgcgatctcgctggcgctgatcggcatcggcttcaccctcggcaatggcatcggtgggcgcatggccgactggtcgctggatggcgccacacggatcctgctggccgtcctggcggtgctgatgttcgtgctgccgctggccttcatgagccacgccaccgccgccctcggtgtgctgctgttcggcgcggcgaccttcgccctcgtaccgccgctgcagatccgggtgatgcaggcggccagcgaggcgccgggcctggcgtcgtcgatcaacgtcggtgcgttcaacctgggcaatgcggtgggtgcggcgctgggcggtgcggtgatcagctcgggcctgggctatgccgcgattccggtggccggtggcctgctggcggcatcgggcctgctgctggcgtggctggggcgtccccgcactgcggtggctgaggcctgctga

SEQ ID NO: 493584 - DNA, 750 bp, Stenotrophomonas maltophilia
atgtcctttgagttcctcgccgaccccaatgcctgggtgaccctgttcacgctcagcgcgctggaaatcgtgctcggcatcgacaacctggtgttcatttccatcgcggtcagcaagctgccggaagagcgtcgtccgttcgcacgcaagctgggcatcgcggtggcctgcatcacccgcatcggcctgctggtctcgctggcctacctggcgcacatggcggccaacctgttcaccgtggccggcatgggcatttccatccgcgacctggtactgatcgttggtggcctgttcctgatcatcaagggctgcatggagatcaaggaactgatcagcggtggcgaggacgaagaccccagcaccaccaaggcctcggccgtgttcggctacgtgatcgcccagatcgcggtgatcgacatcgtgttctcgcttgactcggtgatcaccgccgtcggcatcgccgaccacatcccggtgatggtggcggccatcctgctgtcggtgctggtgatgctgctggccgccaacccgctgggccgcttcatcgacgccaacccgaccgtgaagatgctggccctggccttcatcctgatgatcggtgcggtgctgatcctggacggcctggacgtgcacgtgcccaagccctacatctacgccgcgatgggcttctcggtgctggtggagtggttgaacctgctgatgcgccgccgcgcccgcgaacacaacgtgccgggcgccggcaactggtaa

SEQ ID NO: 493585 - DNA, 396 bp, Stenotrophomonas maltophilia
gtggctgatcagttcggccacatgccccgcggtccgcgccgcatcttccaggccgcccgctggtcctggcagggcctgcgcgccgcctggctgcacgagtcctcgttccggctggaggtatacctgctggtgatgctgactccggtcgcgatctggctgggccagaccccggtcgaacgcgcgctgctgatcggctcgatgctgctggtgctggcgatggagcttgccaactcggccatcgaagcggtgatcgaacgctacggcagcgagatccacgagctggctggccgcgccaaggacatgggctcggcagcggtgttcgtgctgatgatgaacgtgctgctgtgctgggcgctggtcgtggttccgcacgcgctggccggcagctacggctga

SEQ ID NO: 493586 - DNA, 702 bp, Stenotrophomonas maltophilia
atgtcccgtcgccgtacctgcctgctgatgctgggcctgctgactgccgcaccgcttgcccaggccctgagcccggccaggccgccgcaggtgcccgaacaggtctccaatgtggcctgggccggcgacatggcccgcttcgccagcgccgaccaggccaacccgccgccgcgtggtggaatcgagttcatcggcagctcctcgatccgcttctgggagagcctggccaccgacttccccggccagccggtgttcaaccgcggcttcggcggttcggaagtgcgcgacagcacctggtatgccggccagatcgtggtgccgtatgcgccgtgcaaggtgttcttctacgccggtgacaacgacctcaacagcggccgcagcgccatgcaggtgcgagatgacgtggtcgccttcgtgcagcgcgtgcaccgcgacctgccgaagaccagggtcgaatacctgtcgatcaagccgagcccgtcgcgtgcgcacctgctgccggcgatcaacgaagccaacgcgctgatcaaggctgcgctggccaggctgcccaacaccggcttcaccgacatctacacgccgatgctcggcgccgatggacagccggacgcgacgctgttccgcgaggacatgctgcacatgaccccggccggctatgcgatctggaccaaggcgctggcgccgaaggtcaactgcaactga

SEQ ID NO: 493587 - DNA, 1272 bp, Stenotrophomonas maltophilia
atgccgcacggcctgccgcgcaagatccgtatcgccttcatcctgcaggcagtcctggccagcctgggcatcctgctcggtgcctggctggtttcgctggtgatcaagcacagcctggtcggcgccgccctgcgcgaggaagcggcctattactggacgctgcacgaggcctcgccggtgcagccaccgcccaacacccagaacatccgcggctacctgctggaaagcgggcagtcggcgctgtcgttgccggccaacctgcgcaacctggaacccggtttccacgagctgcccaaggatgaccagctggtactggtcgatgtgcgtccggccggccgcctgtacctggtgttcctgcgttcgcgtgcggagatgctggcgttctggttcggcatcgtgccggtgctgctgaccctgttggcggtgtatggcgccagctgggtcacctaccgggcctccaagcgcctggtgtcgccggtgaactggctggcacggcgcgtctcgcgctgggacccgggacacccggaggcggccgacctggaaccgaacaagctgcccgcggacatgcagggcgagacccggcagctggcggccgcgctgcattcgctggccaaccgggtcagcgcgcatgtggcgcgcgagcgcaatttcacccgcgacgcgagccacgagctgcgcacgccgttgactgtcatccgcgtggccagcgacatggccctgggcgatgaaaccctgcagccgcgcctgcgccgcagcctgcagcgcatccagcgcgccggccgtgacatggaagcggtgatcgacgcgttcctgatcctggcccgcgaggccgacgtcgaaccccagatcgagctgttcgacgtcaacgacatcgtccgctacgaggtggacaacgccaacgaactgctgggtacgcgtctggtgtcagtgcacctgcacagcgaaggcccggtgcagctgcacgcgccgccgcgggtgctgcaggtggtggtcagcaacctggtgcgcaacgcctgcagctacaccgacgaagggcgtatcgacgtgcacgtgctcaatgaccgggtggtggtgcgcgacaccggcatcggcatgtccgccgaggcgctgtcgcgcgcgtttgaacccttctaccgcgccgagccgagccgcccgcagggcaccggcctgggcctgtcgatcgtgcgccggctgtgcgaccgcttcggctggaaggtcagcctggccagccagccgggcaagggcaccgaggccacggtggtcttccggtaa

SEQ ID NO: 493588 - DNA, 714 bp, Stenotrophomonas maltophilia
atgcgtcagacgaaggagacctccggcttggtgctggtggtcgaagacaaccgcaacatctccgagatgatcggggaatacctggaaggtcgcggcttcgaagtcgactatgcacaggacggcctggatggctaccgccttgcggcggagaacagctatgacgtcgtggtgctcgacctcatgttgccgcgcctggatggcatcgaagtatgccgtcgcctgcgcaacgatgcgcgcaagtccaccccggtgctgatgctcacggcacgcgacacgctggacgacaagctcaccggcctcggtttcggcgccgatgactacctgaccaagccgttcgcgatccaggagctggaagcccgcctgcgcgcgctgatccgccgtgaacgccgccaggtgggttcggaagtgctgaaggtcgccgacctggtgctcgatccggtcagcatgcgggccacccgtgccggtaccgaactgcagctgtcgccgatcggcctgcgcctgctgaccatcctgatgcgcgaatcgccgcgcgtggtcacccgccaggagatcgaacgcgagatctggggcaatggcctgccggattcggacaccctgcgcagccatctgtacaacctgcgcaagatcatcgacaagccgttcgaccgtccgctgctgcacaccgtgcagagcgccggttaccgcattgccgatatcgcccagccgatggcctga

SEQ ID NO: 493589 - DNA, 642 bp, Stenotrophomonas maltophilia
atgcgcaagacgggatggagccggcgagccggcgcgatgatggtgctgctgctgggattgctgctgcccgggctggccggagccaaagacccggcaggcacggtgctggtgctcggcgacagcctcagtgctgcccacaatatccctgccgacgccggctgggtcagcctgttgcagcagcgggtcaggcaacagtcgaaaacaccggcgcgcatcgtcaatgccagcatgagcggggaaaccacggccggcgcgctgactcgcctgccgggcctgttggcgaaggaaaagccgacggtggtggtgatcgcgctgggcggcaacgacgcgctgcgcgggctgaccccggcacaggtgcagggcaacctggaaaagatggtacaggccagccagaaggccggcgccagggtgctgctgctgggcatcgacgtgccgcccaactatgggcccgcttaccgccagcgcctggcggcggcctacaaggcgctggccacgcagtacaaggtgccgctgctgccgttcctgctggagggcgtggccctgcagccgggcatgatgcagcccgatggactgcaccccacggcgcaggcgcaatcgagggtgctggacaacgtctggccactcctgcggcccctgctctga

SEQ ID NO: 493590 - DNA, 648 bp, Stenotrophomonas maltophilia
gtgcagggcccggagggtgaagtccacatactggacaacatcaccctgaccgtccatgaaggcaccagtgtggccatcgtcggcgcttcggggtccggcaagaccaccctgctcggcctgctggccggactggacctgcccagccgcggccacgtcgcgctggcgggccagaacctgggcgacctggatgaagaagcacgggcccagctgcgcgcgcgcgcggtcggcttcgtgttccagagctttcatctgctgccggcgctgactgccgccgagaatgtcgcgctgccgttggaactggccggacgcgaggaccgcgcgcgggtggacgaggtgctggcgcaggtcggcctggcccatcgcgcccgccactacccgcgccagctgtccggcggcgagcagcagcgcgtggcgctggcacgtgccttcgtcacccgcccgcgcatcctgttcgccgacgaaccgaccggctcgctggaccacgccaccggccagcacatcagcgacctgctgttcgaactcaacgccggcagcggcaccaccctggtcctggtcacccacgacctgcgcctggcccagcgttgccagtacatccaccgcatcgatgacggccgcctgctgccggtcgagcgtggggcacaggcatga

SEQ ID NO: 493591 - DNA, 2511 bp, Stenotrophomonas maltophilia
atgaacgtgctgcgccacgcgtggcgcgcgctgcgccgcgaggcgctggccggcgacctgctgaccgtgttcgccgcgctggtgctgggcgtggcggtgatgactgcggtgggcacgctggtgaaccgggtcaacctggcgctgaccggcagcgcggcggaaatgctcggcggcgacctcggcatcgccgggcgcgatgatccgccgcaggcagtcgccgacgaggcgcaacagcgcggcctggcgcatacccgcatcgccagcttcggcagcgtgctgttcaacggcgatgccagccagatggccagcatcaaggcggtacaggcaggttatccactgcgcggcacgctgcgggtccgggccacgcccggcggtgcgttgatcgccgatgccggcatgccgcccaagggccaggcctatgccgacccacgcctgctgcagggattggggctgaaggccggcgatgacctcgagttcggcgccggcacgctgcgcatcgccggcatcatcgaggccgagccggacagcggtggcgacctgctgacactctcgcccaccctgctggtcaaccgcgctgatgtggagggcaccggcctgctcggcccgggcagccgtatcaactaccggctgatgttcgccggcgcagcggagccgatcgcggcgctgcgccagtggctgctgccgcaggtgaaaggcctgcgcctgctgagcgtggacgacacccagcgtggcgtgcgccaggcattcgatctggccgggcgcttcctcggcctgagcgcgctgctggcggtactgctggccggtgtggccaccgcgctggcggccaaccgcttcgccctgcgtcgcatcgaccaggtggcgatcctgcgctgcctgggcgcacgccagcgcgacatcctgctgggcctggcgctgcagctgctgatgctggcggtgccagcctgtgcgctcggcatcggcctgggcatggccgcgcaggaaggcctggtgcaggtgctgggcagcctggtgccgcagcgcctgccgctgccggaagcgatgccggcgctgaccggtgccggcatcggcctgctgctgctgttcggcttcggcctgccaccgctgctgcgcctgcgcggggtgccgccgatgcgggtgctcaaccgttccttcgccgccctgccgccggcgtcgctgctggcctatgtggcggcgctggcggccagcctgctgctggcggtgcaggtcaccggcgatctgaaactggcgctgtgggtgctgggcggcctggccgcgctggcgctggcggccggtgcgctcggcttcgtgctgctgcagctgctgcgcggcctgcagcaccgcctgcatggcaactggcggttgggcctggccgcgctgacccggcgccggctgctggcggtgatgcagctggtggggctgtcgctgtcgctgtgcgcgttgttgctgctggcggtgaccggacccggcctgctgcagcagtggcgcgagcgcctgcctgcggatacgccgaactacttcctgatcaacatccagcccgaacaacgcgacggtgtgctggccgcattgcgtggactgggcgccggcgacgccagtatcgagccgatggcgaccggccgcctgatcgcgatcaacggcaagccgccgctgcgcgtggaccaggccgccgccgaggggaacggcgcgaacaacggcccgcgcgaggacgacgacgagaaccggccgctgaacttcagctggcgcagcagcttcccacccgccaatgcgctgctggagggtcgcttctggcaggccggcagcaccgcggcggaagcctcggtggaaaccggctgggcgcggcgctacggcgcgcacctgggtgatcgcattacgatttccgtaggcgagcagcagcgcgagttcaccgtcaccagcatccgcaaggcggactggaacacattccgcccgaatttcttcgtgctgttgaaccccaatgcggtgggcgataccccgcacaacctgctgtcggccttccatctgccgtccggcaacgcggccgggctgggcgagctggtgcgcgcgcagccgaacctgtcgctgctggacgtggacgcggtgatctcgcaggtgcgcgatgtgatggagcgcgtggcgcaggtagtgcagctggtgatggtgttcagcctgctggccggcgtgctggtgctgctggcggcgctgcaggccaccgccggcgagcgccgctacgacagcgcggtgctgcgcacgctgggcgcgacccggcgccagctgcgcggcgcggtgctggtggagttcggcgcgctgggcacgctggcggcgttgctggcggtgggcgcggccgcagcgatcggcgtggcggtgtcgcagaaggtgttcgagctgcccttgctgccgccgtggccgggcctgctgatcggcggcgtggtcggcatcggcttgagcctgctggcgggctggtggggtacgcgggcgatcctgcatacgccgccggcattggcgctgcgcgaggcctga

SEQ ID NO: 493592 - DNA, 936 bp, Stenotrophomonas maltophilia
atgaagctccagacagccagcgtcctgctgctgctcgccaccagcggcgtggccagcgcgcagccctccggcatcgcccgcgaccacgacagcatccttgccatgcagggcgagtacaccgtcgatttcgcattcgacgagaccgtgctgctgaagcccggctacgagcgcgccccggcgatgcgcagcggcggcaacgaactggtgatcgtggtcgaggacacgccgaagcgcatcgtgctgcagcacctgctgctggacgagaagagcggccacatcaccaagcactggcgccaggactgggtctacgaagcaccgaaccgattcgagttcagcgccgaccagacctggcaggtacgccgcattcccgcagcggtgaaccagggcgcctggacccagtgcgtgtacgaagtgagcgacgcaccgcgctactgcggcaccggcaaatggacctacaccaacaacgtgccgagctggaccagcgacctcagctggcgcccgttgccgcgccgtgagtacaccaagcgcagcgactacaacgcgctggccgtcgtcaaccgccacacgctcacgcccaatggctggacccacgagcagttcaacaccaaggtgcagcgcaacgccgacggcagccaggtggagatcgcacgcgagttcggcttcaacgactacgtgaagaccaccgaggtcgacttcaccccggcgcgtgactactggaaggccactgccggctactgggccaaggtgcgccagcgttgggacggcttcctcggccaggccccgggcgtgcacctgaagaccaagatcgatggcatggcgatgatcattccgctgttcacccaggccgaagcgatccagtccggcaaaaaggtgaaggacaagcagatcgacgaggtgttcgccaagtacgtggaaaaggcgccgaaggaaggctga

SEQ ID NO: 493593 - DNA, 600 bp, Stenotrophomonas maltophilia
atgagccgagccttgtccgcacgcaggaacgacgccatcgccgcgcagggcagcgcggcctggccgacgccggcacagctggccacgctcggcaccgtgttgtgcctgtaccgcgccgacggcaacgagctcggtggctggcgccaggcagtacgcgtgcatgcctgccagggcgtggacagcgagggcgtgcgcgaaagcctgtgtttcctcgatgcccgcggccgctgcgtgtggcggctgtacctgctgcccgacagcgatttcctggcctgggaccggctggtcgcggcgctgccgccgggcccggagcatgacagcgagggcagtgtcggcgaacgcctgtggcggcgcctggccggccatctcggtggccagcgctggcgactgtgcgcgctgcgcctgcatgccgccgacgacggccgcaccctggctgcaagcctgtcgacgttgtcctcgctgggcgcagccaccgcgcgtcgcatcgcgcggctggaaggtgccgaaggcgagctggcgatcgacgattgctgctgcgccgatgctgcacgtcgctcggcgccgcgggttcccggcgacctgccgctgatccggctgtaa

SEQ ID NO: 493594 - DNA, 2157 bp, Stenotrophomonas maltophilia
atggccctgccgctgtctgcccatgctgctgccgcggccaccgccgcgcccgatgcgcgcgaattcgaccgtgtgcaggtcaccgccacccgcaccgagcgggcggtgagcgatgtggcggccaccgtggacgtcatcgaccgcgagcagatggaccggcacctggtgcaggacatcaaggatctgctgcgctacgagccgggcctgtcggtcagccgcagcgccgcgcgcttcggccttggcagcatccgcatccgtggcctggacggcaaccgcgtgcgcgtgcagaccgacggcatcgccatgcccaccagcttcaacatcggctcgttctccaacgccaaccgcaacttcaccgatctggatacgctcaagcgcgtggagatcgtgcgcggcccggccagctcgctgtatgggtccgacgcgctcgggggtgtggtcgccttcgtcaccaaggatcctgccgattatctgaaggatggcaaggacagctacgtcggcctgaagttcggctacgacggtgagtggaagggcctgctcggcggcgtgaccagcgcgttcggcggcgaacactggagcggcatggtcaacatcaaccatcgccagggccaggaaaccggcaacaagggtgatgtacgcagcctcgacaatacccgcaccgcgcccaacccgcaggaccgcgatggtcgcagtggcctggctaagctggtctatgcacccagcgaggaccagcgcttccggctgaccgtggaaggcaacgaagacaacaccgataccaacgtgctgtcctcgatcgaccgcaccaccaccaccggcatgaaggcgcgcgatacgcagaaccgcacccgcgtgtcgttcgcccatgaaatggatgcgctggacaagggcttcgccgacagcctgcattggcagctgtatacccagcacagcgaaaccacccagatcaccgatgaggaccgcgccaaccgcagccgccgccaccgcgagttcaacttcgaccagcgcgtctacggcctgcaggcgcagttcaacaaggcgttcagcaccggcagcgtcgaacacgcgctgacctacggtttcgagggcgcgcataccgagatccgccagaagcgcgacggttaccaggtgctggccaatggccacaccagcaccaccatcctgcccgacgccttcccggtgcgcgatttcccgatcagcaagaccaccgagctgggcctgtacgcacaggacgaaatgcgcatggccaacggcaagctgtcgctggtgccgggcgtgcgcgtggaccgctacgagctgaagccggaggtggacagcatcttcgccgacgacaatcccggcgttgcggtggccaggctgaccaagaccagcgtctcgccgaagctgggcatggtctatcgcttcaccgacgaatggtcgctgtttgctggctattcgcatggcttccgctcgccgccgtacaacgacgtcaacctgggcttcaccaacttcgccttcggctacaccgccattcccaatccggacctgaagccggaaaccagtgacggcatggagctgggactgcgcttcctgtcgccagcggcctacgtcagcctcagcggctactacaacgagtacaaggacttcatcgagtcgcaatcgctggtcggcaccaacgcccagggcctgatggtgttccagtcgcgcaacatcgcggatgcgcgcatctatggtgccgaaatgaaggccggcgtcgacttcggccagatcagcccggcgctgcagggctgggcgctgcgcagctcggtggcctggtcgcgcggcgacaacaggaccgaagacaccccgctggattcggtcgacccgctgcgtggcaccgtcggcctgatgtacgacaccgacacctggggcgtcgaactggccggtaccttcgtcaagcgcaaggaccgcgtcaccgccgccacggtgtaccgcccggccggctacggcgtggccgacctgatggcgcactggaacttcgccccgggcgccaccttcaacgtcggcgtgttcaacctgggcgacaagcgttacatcgactggtccaacgtgggttcgacgctgtcgccgggcagccgcgtgctggaccgctataccaacccgagccgcaccctctccgccagccttgccgtttcctggtga

SEQ ID NO: 493595 - DNA, 201 bp, Stenotrophomonas maltophilia
atgctcatgaatgctcaacctgtactgctgcgccccgaaacgctgaccctccgcgatcgtccggtccgtgtcgttccgccggaagaggtcatcgacagcgaagccctgctcaagggccgtcgtgaaatcctgatccagcacggcgaccgcttctatcgcctgcggcacaccagcaacgacaagctgatcctgaccaagtaa

SEQ ID NO: 493596 - DNA, 972 bp, Stenotrophomonas maltophilia
atgcaataccgtcgcctgggctccaccggcctgccgatttccgccctgtccttcggcgcctgggtgaccttcggtgaccagatcccgcgcgacgaggcccgcaacctggtggccgccgcctgggaccacggcgtcaacttcttcgacaacgccgagggctatgccaacggccgcgccgaacaggtgatgggcgatgtgatcgccgacctgcgcctgccgcgcgacggcatctgcgtctccagcaaggtgttcttcggcagcgccaaggacccacggccgacccagcgcggcctgtcgcgcaagcatgtgaccgacgcctgccacgcggcgctcaagcgcctgcgggtggactacctggacctttattactgccatcgcccggatccggacgcgccggtcgccgagaccgtgcatgccatggataccctggtgcggcaaggcaagatcctctactgggggacctcggagtggtcggcagtgcagatccagcaggcgctggacatcgccgaggcgcgcaacctgcagggcccgtcgatggagcagccgcagtacaacctgctgcaccgcgaacgggtcgaggtcgagtacgcgccgctgtatgccggtgccggcctgggcaccaccatcttctcgccgctggcctcgggcctgctgagtggcaagtacgaccagggcattccggccgatgcgcggctgggccgcgaaggcatggaatggctgcaggcgctggtgctgggtgacgacgccgaggcccgcctggcccaggtgcgccgcttcagcgaggtggcgcgtgcgctggggcaggcgccggccacgctggccatcgcctggtgcctgcgcaacccgaacgtctccagcgtgatcctcggtgccagccgggtcagccagctgctgcagaacctgcaggcgctggaggtgctggagcaggtcgacgccgccggctgggccgacgtcgaagccgccttcgcctga

SEQ ID NO: 493597 - DNA, 1299 bp, Stenotrophomonas maltophilia
atggtcgaaggtttgggcaggatcggcttcggcctgttcgggttggcggtgctgatcggcatcacctggttgttttccaacaacaagcgtgcggttgactggaagctggttgccaccggtatcaccctgcagatcgcgttcgcggcgctggtgatcctggtgccgggcggccgcgacgtgttcgatgcgctgggcaagggcttcgtcaaggttctcagcttcgtcaacgaaggctcgggcttcatcttcggctcgttgatggacaccaagaactacggcttcatcttcgccttccaggtgctgccgaccatcatcttcttctcggcgctgatgggggtgatgtaccacctcaacgtcatgcaggcgatcgtgcgcgtgatggcgtggtcgatcaccaaggtgatgcgcgtgtccggcgcggaaaccaccagcgtctgcgccagcgtcttcatcggccagaccgaggcgccgctgaccgtgcgcccgtacatcgccaggatgacccagtccgagctgctgaccatgatgatcggcggcatggcccacatcgccggcggcgtgctggcggcctatgtgggcatgctcggcggtggcgacccggcgcagcaggccttctacgccaagcacctgctggcagcgagcatcatggccgcaccggccaccctggtcgtggccaagctgctgattccggaaaccggcaccccgctgacccgcggcacggtgaagatggaagtcgaaaagacctccagcaacatcatcgacgcggccgctgccggtgccggtgacggcctgaagctggcgctgaacatcggcgcgatgctgctggccttcatcgccctgatcgcgctgctgaacgccccgttgacctggatcggcgaggtgaccggcctggccgctgccatcggcaagccgaccaacctgtcgaccatcttcggttacgtgctggccccgatcgcctgggtgatcggtaccccgtgggctgatgccaccaccgtcggttcgctgatcggccagaaggtcgtgatcaacgaattcgtcgcctacaccgaactgtcgcagatcgtgaacggccaggtggccggcgtgagcctgtccgaggaaggtcgcctgatcgccacctacgcgctgtgcggctttgccaacttcagctcgatcgcgatccagatcggcggcatcggcggcctggccccggaacgtcgccacgacctggccaagttcggcctgcgcgcggtgctgggcggtaccattgccaccttcatgacggcgaccatcgccggcgtgctgacgcacttcagttga

SEQ ID NO: 493598 - DNA, 966 bp, Stenotrophomonas maltophilia
atgagcagcagtgtcgttgtcgtcggttccttcaatgtcgatcacgtgtggcggtgtgagtcgctgccggcaccgggtgcgaccattgccggccgctacagcaccggccccgggggcaagggcttcaaccaggcggtggcggcctgccgcgccggtgccgacacgcacttcgtgtgcgcgttgggcgatgacgccggtggcgccaccgcgcgtgaactggctgcgcaggatggcttcgcgctgatcgccgaggccagcagcgaaccgaccggcaccgcgggcatctacgtggacgcgcgtggccgcaacaccatcgtgatcggcccgggtgccaacgccgcgctgggcaccgatttcctgcaacagcagcaggccctgctgacccgcgccaaggtggtgctggtgcagctggaatcgccggtgcagaccatcgaagcggcgctggccacggcccgcgaggccggcgtcaccaccgtgctcaacaccgcaccggccgatgccccctcgaccatcggcctgctcaagctggccgatgtgatcaccccgaacgaaaccgagttcgctgccctgctcggccgccatgtcggtgagcgcgtggatgccaacgacgtcgccgcgctggatggcgccagcctgcacgcgctgtgccgcaagctggtcggcaacggcaccgtggtggtgaccctgggttcggtgggcgtgttcgtgtcgcatgccgacgagaacctgcgcggcgatacccagccgtactaccgcgtgggtgccgaacaggtgcaggcgatcgacaccaccggtgccggtgacgccttcaacggcgcgctggccgcgtcgctggcgcaggtggccgacgccccgttcgcccgccacgtgcgcttcgccaaccagttcgccggccgttcgaccgagaaggaaggcgccgctgcggcgatgccgcgcttcaccccggccgacgctgaaaccaggtaa

SEQ ID NO: 493599 - DNA, 432 bp, Stenotrophomonas maltophilia
atggacggattcccctggctgctggtcgcggccgccggcagtgccgtggcggcgctgctgcatatcggctgcatcgccttcggcgccgcgtggtacaggtacttcggtgccggccagcgcgtggtccggttggcgcatgcggggcactggtggccaccgctgatgaccgccggcatcactgccgtgctggtggcctggaccctgtacgcactggccgccgcgggctggcattcgccgctgccggccagccgcctggtcctgcccggcatcgccgcgctgctgttgctgcgtgccgcgatgggcttcggcctggcgctgttccggccggggtacaacggcacgcgcttctgggcggtcagctcgctggtctgcctgggcctggggctggccttcgcgctgggtacccgccaggcctggcagagcctggggtag

SEQ ID NO: 493600 - DNA, 1074 bp, Stenotrophomonas maltophilia
atgaggtcggtgccgatcggcctgaaccggaccgcgcccggcacggccgtaccgccgcccgcgccctacaatgggcgcatgcagatcggcccgtacaccattgcccccaacgtcgtgctggcacccatggccggcgtcaccgacaagcccttccgcctgctgtgcaaacggctgggtgcgggactggccgcctcggaaatgaccatcagcgacccgcgcttctggaacacgcgcaagtcgatccaccgcatggaccatgacggcgagccagccccgatcagcgtgcagatcgccggcaccgagccgcagcagctggccgaggccgcgcgctacaacgtcgaccacggcgcgcagatcatcgacatcaacatgggctgcccggccaagaaggtgtgcaacgcctgggccggttcggcgctgatgcgcgacgagcaactggtggcgcgcatcctcgaggccgtggtcaacgcggtggacgtgccggtcacgctgaagatccgcaccggttgggactgcgaccatcgcaatggcccgctgatcgcacgcatcgccgaggacagcggtatcgcggcactggcggtgcacggccgtacccgcgaccagcactacaccggccaggcggagtacgccacgatcggcgagatcaaggccgcgctgcgcatcccggtgatcgccaacggcgatatcgattcgccgcagaaggccgcctacgtcctgaaggaaaccggcgtggatgcggtgatgatcggtcgctcggcgcagggccggccgtggatcttccgcgaagtggcgcactacctggccaccggcgaggaactgccaccgccgtcgctggcggaagtgcgcgacatcctgcttggccacctgcacgcgctgcatgcgttctatggcgagccgcagggcgtgcgcatcgcgcgcaagcacctgggctggtacgccaaggatcgtccggagaacgccgcgttccgcgcggtggtcaaccgtgccgaagacccgcagggccagatcgcgctgaccacggaatacttcgaccgcctgatcgccggggaacccgcgttgtcatctgctgcctga

SEQ ID NO: 493601 - DNA, 828 bp, Stenotrophomonas maltophilia
atgaccccgccgatttcctccccgacctacctgcacggattttccggcaccgaacagcagcgcctgatgacccaggcccggctgctggaatcgagcatcttcggccagatcgactacagcggcgcgcggcgcctgctggaagtcggcagtggcgtcggtgcgcagaccgagatcctgctacgccgcttccccgagctgcacgtgaccggcgtggacctgagcgaaacgcagctggccaccgcgcgcgagaacctggcgcgcacgccgtggtgcagcgaccgatacaccctgcagcaggccgacgccggcgagctgccgttcgaggcacgcagcttcgactcggcgttcctgtgctgggtgctggaacacgtgccttcaccggcgcgggtgctgagcgaagtgcgccgcgtgctggctccgggttcgccggtctacatcaccgaagtgatgaatgcctcgttcctgctcgacccgtactcgccgcacatctggcgctactggatggccttcaacgacttccagtacgaccatggcggtgacccgttcgtcggtgcaaagctgggcaacctgctgctggccggcggcttccgcgacgtgcacaccgagatcaagaccatccacctggacaaccgcgaaccggcgcgtcgcaagacgatgatcgcgttctgggaacagctcctgctgtcggccgccgaccagctgctgcaggccggctcggtggacgaggaaaccgtggaaggcatgcgccgcgagttccgcctggtgcagaacgacccgaacgccgtgttcttctactcgttcgtccagggccgcgccacggtgtattga

SEQ ID NO: 493602 - DNA, 1068 bp, Stenotrophomonas maltophilia
atggactccctgacccagatcgtgctcggtggcgccgtcgccgctgccatcgccccgcccggacatcgccgcgcggccctgctcgctggtgccgcgcttggcaccctgccggacctcgacgcgctgtggctcggtttcaccgcagccgatccggtggcgaacatgatcgagcaccgcagtttcagtcattcgctgctggtactgccatgggtggcggcattgatctggtggctgttcaagcgcttcggcaatggccgcgtcgcgcagtcaccgctgtgctggttctgggcgatccagctggcgctggtcacccatccggtgctggatgcgttcaccgtgtatggcacccagttgtggtggccgctgcgcccgcatccgaccatgggatccagtgtcttcatcatcgacccggggtatacggtgtggcttctgctgggctgcgtgctggcctggttcggccgcgcccggccctgggcgggcaaggtgctgggcgtggccctgctgctcagcagtggctacctgggctggggcctgatcgccaagtcacaggtcgaccgtgccgcacagcagagcctggccgcgatgggcctgggcgatgcgccgcgcttctcggtaccgatgccgttcaacaccctgctgtggcgggtggtggcgatgacgcccaatggctacgtggtgggtgaccgctcgctggtggccgaccacgggccgatgcggttcgaaggccatgcgtccaacgtacaggccttgcgcgaagcgcaggccatcccggcggtgcagcagctgacgtggttcaaccgcggtttcatgcgtgcgcaggtggttgacggccggttggtgctgagtgacctgcgcatggggctggagccggactacaccttcaacttcgtcgtggccgggcaggccgacgggcagtggcgggcgatcgttcccgagcaggtgcgggtggactacagcagtcccgccgcgcgtgccgacgccggtcgccgcctggcggcgatgtggcagcggatctggcaggagccggcggcggcgccgggcgcggccgaccacaccgccgtgcattga

SEQ ID NO: 493603 - DNA, 801 bp, Stenotrophomonas maltophilia
atgagcacgctggcgaacctgtcgccgcaccggcgcgcagtgttcgtctccgacgtgcacctgggctcacgtcattgccatgccaccgagctggcgcggttcctctcgcagctgcgctgcgaacggttgtacctggtcggcgacatcatcgacctgtggtggatggcgcatcgccgcgccaactggcggcagtcgcacagcgaagtcatccaggccctgcacgcgctgcgccgtgcagggaccgagatcatctacattcccggcaaccacgatgcctcgctgcgccaggtgtgcgggctgatgttgccggccatgcaggtgcgccgccgtgccatccacgtgaccgccgatggccgccggctgctggtcgcgcatggcgacgactacgacggcgtgacccatttcggtggcctgcaggaaaagttcggcgactggctgtactaccgcatcctgaccggcaaccaggcgctgaacgcggtacggcgccggcttggcatgcgctactggtcgctgtcggagttcctgaagaagcgcagcggggccgccgaacgctacatcgagcgcttcgtgcaggccgggctggacgacgtgcgccggcgcggcctggatggcatcgtctgcggccacatccaccgcgcggcgctggtcgaacgcgatggcctggtctacgccaacgacggcgactgggtggagagcctgaccgcactggccgaggaccatgatggtgcgctgcgcctgctcgaccataacggccagaccctggtggaactgccaggcgcgcggttgtcgcaggcggcataa

SEQ ID NO: 493604 - DNA, 1716 bp, Stenotrophomonas maltophilia
atgcaggaactcgaacagcgtctccagcaacgtttccccgattggttccatggccgtcgcggccaactggcgcggccgctgctgcgcagcgtcgggcgctggtcgcgcctggaccagatcgaagccttcctgcagcgcagctcaggactgcgcggcttcggtttcgtcgccgccggcctggaattcatcggcggccagtaccaggtggatccggccgcgctggccaggatcccggccaccggccgcctgctgatcgtcgccaaccacccctccggggcactggatgccctcgcactgctggacgcggttggccgtatccgccgcgacgtgcggatcgtggccaacgatctgctgggggcgatcgcgccgctgcaggacctgctgctgccggtgcgcatcctcggcggcaaggcccggcgcggcagcctgcatgccgtggaggaagcgttgaacgccgagcagtgcgtgatcgtattcccggccggcgaggtctcgcggctgtcgctgcgcggcatccgtgatggccgctggcagcgcgggttcgtccgctttgcccgcgcagccggcgcgccggtgctgccggtgcgggtggaagcgcgcaactcggcgctgttctacggcgcctcgaccctgttcaagccggccggcaccgcgctgctggcgcgcgaaatgttcgcccgtcgtggccgcccgctgcggctgagcatcggcgagccgatgcagctgggcaagggcggtgacccgggcgcacagctgctggcggtgcgccgcgcgctgtacgcgctgggccgcaacggcgcggccggcaatgccgctgcctgcgctggccccgagccattggcgtctccggtgccgccttcgcaggtcgccgccggcattgccgcggccacccagctgggccagaccgccgatggcaagcagatcctgttggcgacctgtaccgccgattcaccgctgctgctggaactgggccgcctgcgcgagctgaccttccgccaggtgggcgagggcaccgggcgcagccgcgacctggacgcctacgatccgcagtacgagcacatcgtgatctgggacgcggcggcgcagcgcattgccggtgcctaccgcatcatgcgcggcgcccaggccctggcccggcacggcctgtccgggctctacagcgcgtcgctgttccgctattccgacgatgccatcacccacattgccgagggcctggagctgggccgcagcttcgtggtgcccgattactggggcagccgcagcctggactacctgtggcagggcatcggcgcctacctgcagtgccggccgggcatccgctacctgttcggcgcggtctcgatcagcgcagcgctgccgcgcgatgcgcgcgagcagctggtggcctactaccagcgctactacggcggaaccgccgggctggccgaatcgaaccgccccttcaagtacttcgccgcaccgccaagtttcggcgagctggatgcgggtgccgcgttcgatgtgctcaaggccaacctggccgcactgggtaccggcgtgccgacgctgtaccgccagtacaccgatctgtgcgaacccggcggcgcgcgcttcctcgccttcggcttggacccggacttcagcgattcgatcgacggcctgatcgaagtggacctgtgcgcgatccggccgaacaagcgcaaacgctatctgcgcgacgcgggtgcgccggcatga

SEQ ID NO: 493605 - DNA, 1212 bp, Stenotrophomonas maltophilia
atgtccagctatctcttcacctccgagtcggtctccgaaggccatccggacaaggttgccgaccagatctccgatgcggtgctggacgcgatcctgacccaggaccagcgcgcccgcgtggcctgcgagaccatggtcaagaccggcgttgccatcgtggccggtgaaatcaccaccagcgcctggatcgacctggaagcgctgacccgcaaggtcatcacggacatcggctacgacagctccgacgtcggtttcgacggcgccacctgcggcgtgctgaacctgatcggcaagcagtcgccgcacatcgcccagggcgtggatcgcaagaagccggaagaaatgggcgctggcgaccagggcctgatgttcggctatgccaccaacgagaacgacagctacatgccggccgcgatccacctgtcgcaccgcctggtcgagcagcaggccaagatccgcaagaagaagaactcgccgctgtcgtggctgcgtccggacgccaaaagccaggtcaccctgcgctatgaaaacggcgtggtctcggccatcgacgccgtggtcctgtcgacccagcacgcccccggcatcaagcagaaggacctcatcgaggccgtccgcgaagagatcatcaagccggtgctgccggccaagtggctgcacaagggcaccaagttccacatcaacccgaccggcaagttcgagatcggtggcccggtgggcgactgcggcctgaccggccgcaagatcatcgtcgacacctacggcggctgggcccgtcacggtggtggtgccttctccggcaaggacccgtccaaggtcgaccgttcggcagcctacgcggcccgctacgtcgccaagaacgtggtggccgccggcctggccgaccgttgcgaagtgcaggtctcctacgccatcggcgtggctgagccgacctcgatctcggtcaccaccttcggcaccggcaagatcagcgacgacaagatcgagaagctgatccgcaagcacttcgacctgcgcccgtacggcatcatcaagatgctggacctggtgcacccgatgtaccagcagaccgcggcctacggccacttcggccgcaagccgaaggagttcagctacctcaacggcgaaggcgagaccgtcaacgccacggccttctcctgggagaagaccgaccgcgccgccgccctgcgcgccgatgcgaagctgaagtaa

SEQ ID NO: 493606 - DNA, 507 bp, Stenotrophomonas maltophilia
atgtcgaccgaactgaaaacccaccagctgtccatgaccgtgctgatgtcgccggagatggccaatttctccggcaaggtccacggcggcgccatcctgcgcctgctcgaccaggttgcctacgcctgcgccagccgttacgccggcagctacgtggtcaccctgtcggtggaccaggtgatgttccgccagccgatcgcggtgggcgagctggtcaccttcctggcctcggtgaaccataccggcacctcgtcgatggagatcggcatcaaggtggtggccgaggacatcctcaagcgcagcgtgcgccacgccaacagctgcttcttcaccatggtggccgtggatgaggaaggccggccgacgcccgtcccgcccctgcagccggcgacgtccgacgagaagcgccgccaggccgccgcgcagatccgccgccagctgcgccaggaaatggaacagcgccatctggaactgctggcatcgaatccgccgtcaccggaggaatga

SEQ ID NO: 493607 - DNA, 2712 bp, Stenotrophomonas maltophilia
atgaacgagtaccgcagcagcatcgagtttgcttctcccgatcttccgcttcgcgatgacgtgcgccggctcggcgcactggtcggtgacctgctggtcgaacaggtttcggccgcgtttctcgacgatgtcgaggacgtgcgcacccgcgccattgcccgccgcgagaaccaggcgccgctgtcggagctggccgaagggctggccgggcgcacgccgcagcaggccgagaccatggtgcgggccttcagcacctacttccaggtggtcaacattgccgagcgtgtgcatcgcatccgccgccgccgtgactaccagcgcgccggtaccgccggggcgcagcccgacggcctgcaggatgcgctgcagcacctgaaggcgcagggcgtgggcctggatgagctggcgcagtggctgccgcgcatcgacatcgaaccggtgttcaccgcgcacccgaccgaagcggtgcgccgcgcgctgctggagaaagagcagctgatggtggccagcctggtcgacaacctcgacggccagcgcacgccgggggaagcggccgccgatgctgcgcgcttccgcatggcgctgaccgcttcgtggcagaccaccgattcctcgccggtgcggcctaccgtcgatgacgagcgcgagcacgtcggcttctatctggtgcaggtgctgtaccgggtgatcccggtgctgtacgaatcgctgcagcaggcgctgcgcgatacctacggcgaagaactgccgctgccgcgcctgctgcgcttcggtacatgggtgggcggcgacatggacggcaacccgaacgtggatgcccacaccatccgcactacgctggacgcgcagcggcaggccgtgctgggtcgttaccagaaggaactgctgcagctggccagcctgctcagccagtccaccgagcgggtgggcgtgagcgaggcgctgcaggcgcgcgtggcgcactaccagcagctgctgccgcaggtgcagtcgcgcccgcgccatgccgacatgccgtaccgcctgctcaacgaccgcatgcgtgcacgcctgcaggccacgttggatgacggcgaaggcgcctacgccggtccggacgaactgatcgacgacctgcagctgatcctcgacagcctgcgcgccaaccgcggcgaacatgccggtggcttcgccgtgcagcgcctgctgtggcgggtgaagaccttcggcttccacctggcgcggttggacgtgcgccaggaatcgagcgtgcacgcgcgcgcgctggccacggtgctgggcggcgacgcagcgtgggacggtctggatgcagtgggccgcgcacgcctgctggcgccgcatgccagtggtgacgcgccgttgccgaagggcgacgacgaaggcaaccggcgactggacgccgtgttcgccgcgctggccgatgctcgtgcgcggcatggtggcgatgcactgggcagctacatcatctcgatggcacatgaccgcagcgacgtgctggcggtgctggcgctggcgcgccgtggcggcctggtggaagagaacggatcagtaccgctggatatcgcgccgctgttcgagacggtggaggacctcaagcgcggcaccgcgaccctgcgtgatctgctggccgacccgatctatcgcgcgcacctgcaagcgcgcgatgacgtgcagatggtgatgctgggctattcggacagcagcaaggacggtggcatcgccgcatcgcgctggggcctgcagcgtgcacaggtggagctgctggaggtggcggccgaggccggcatccgcctgaccttcttccatggccgtggcggctcgatcagccgcggtggcggcaagaccacgcacgcggtggacgcatcgccgcgcggcagcatcgatggccgcctgcgggtgaccgagcagggcgaggtgatccatcgcaagtacggcatccgtgcgctggccctgcgctcgctggagcaggccaccggtgcggtgctgcgtgccagcctgcgcccgcgtgccgccgagccgcgcgaggatgagtggcgaccggtgatggacgcggtggcatcggccagcagcgaggtgtatcgcgcgttcgttggccaggccggtttcatggactacttccgcaccgccacgccgatcgacgtgatcgaacgcatgacgctgggctcgcggccatcgcgccggctcggccaggacgccgcgctgggcaacctgcgtgcgattccctgggtgttcgcctggagccaggcgcgcgcggtgattcccggttggtacggcgtgggcagtggcctgcaggcggcggttgatgccggccacgaacagaccctgcgcgagatggcgcgggactggccgttcttccgcaccttcctggacgacatcgcgatggtgctgtccaagggcgatatcaccatcgccgagcagttttcgctgttgtcgggtgaacggcacgggcacttcttcccgcaggtgcagcgcgaactggaactcacccggcactggctgctggcgctgatggaccagcggacgctgctcgaccacgatgcgcggctggcgctgtcgatccgcctgcgcaatccctacgtcgatccgatcagcgtgctgcaggtggacctgttgcagcgctggcgggccagcgggcgcgaggatgacgggttgctgcgcgcgctggtggcctgcgtgaacggtgttgcgcagggcgtgcagaacaccggttga

SEQ ID NO: 493608 - DNA, 2517 bp, Stenotrophomonas maltophilia
atgagcatgcacgcgcgccgtacgcggcgctggaccggcctggtcctgtcgatgggactgctggccgtggccccgctagcctgggcgctggccccacagcccgctgcagcacaggcccagggtgccaatggctacgaactgccctcggcggcgctgcaggcggtggtcgacgcaccgcgcgcgccgtcgctgcacctgtcgcctcgccgcgacatggccgcgttgatgcagatgccgtcgctgccgtcgatccgggtggtggcgcagccggaactgaagctggccggcctgcgcatcaacccgcgcacgttctccgacagccgtttcagcttcggcgagaagctgtggctgatgaacgtggccgatggcaaggaacggcagatcagcggcctgccggccacgctgtcgatcgccagcctgatgtggtctccggatcagaagtggctcgctttcaaccaggtcgacgccaccagcggcgccaacgaactgtggctggtggacgtggccgccggcagcgcccgccgcctggttgccggcttgaacacggtgatcggcagcggttaccagtggctgccggacagccgcgggctggtggtgttcacccgcccggccaacctcggtgcggccccggccaccgacggcatcccgaccggcccggccgtgcagcagacccgccggggcgatggcgtggtgtcgatccgtacctaccaggacctgctgaagaacgaggctgacgcgcgccagttcgactactacgccaccacacagccggtggaagtcagcctggatggcagcacccgcccgatcggcgcggccggcatcttcatgggcttctccgtgtcgccggatggccgcttcgtgctgcggcagccggtgcagcgcccgtattcctacgtggtgccggtgagcagtttcccgcgccgcattgaagtgatcgaccgtgccagcggcaagctggtgcataccgtggccgtgcgtccactggtggaaggcctgccgaccggcaacgacgccgaagtgaccggcgtgcgtgacatcggctggcgtggtgatgccgacgcgaccctggtctgggccgaagcgcaggatggtggcgacccgaacagggatgccaaggtgcgcgatgcggtgctgatgcaggccgcgccgttcgacacgccgccggtgacgctggcccagctgggtagccgcctggccggtatcagctggggccgtggcgacctggccctgctgaccgaatcgtggtggaagacccgcaggaccaagacctggctgatcgccccggacaatgccagcgccgaaccgcgcctgctgtgggatcgcgatgcgcaggaccgctacgccgatccgggccggccgctgcgggccagcgacgagcgcggccgttcgctgctgcagaccagcgccgatggcggcagcctgtacctggccggcgccggtgcttcgccggaaggcgaccgtccgttcgtggaccgcttcgacatcgccacgggcaaggcaacgcgcctgttccactcgcaggcgccgagctatgcgctgccggtggcattgctggacaagcagggcagctcgctgctgctgagccgcgagagcccggacgagccggccaacttctacgtgcagtcgctggccgatgccggtgctgcgccgcgtgcgctgacccacttcgcgcatccgctgccgcagctgaagggtgtgcagaaggagcagatccgctacaagcgcaaggacggcgtcgacctgaccgcgaccctgctgctgccgccgggatacgacccgaagcgcgacggcccgcgcccgctgctgatgtgggcctacccgggcgagttcaagagcgcggccgcggccagccaggtgaccgattcgccgtatcgcttcaatgcggtcagctactggggtccgcaggcgttcctggccaagggttacgtggtgctggccagcccgtcgatgccgatcatcggcgagggcgacaaggagccgaacgacacctacatcgaacagctggtggccaatgcgcaggcggccgtggatgaagtggtgcggcgtggcgtgaccgaccgcgatcacattgccattggtggccattcgtacggtgcgttcatgacggccaacctgctggcacacacccgcctgttcaaggcgggcattgcgcgcagcggcgcctacaaccgcacgctcacgccgttcggcttccaggccgaggagcgcaactactggcaggcgcaggacgtctaccagaagatggcgccgttcaattacgccgacaggatcaaggatccgatcctgttcatccacggcgtggacgacaacaactccgggacgttcccgatccagagcgagcgcatgttcgcggcggtgaagggcctgggtggcaccgcgcggctggtggtgctgcccaacgaatcgcatgcctaccgcgcacgcgaatcgatcatgaccatgctggccgagagcgagcgctggctggagcagaccatcggcccggccgagcagggcacggcgaagaagaagcgctga

SEQ ID NO: 493609 - DNA, 1446 bp, Stenotrophomonas maltophilia
atgaacgctgttgccaagaccttctccaccgaaggtgattacaagatccgcgacatcacgctggccgactggggccgcaaggaactggacatcgccgagcacgaaatgccgggcctgatgtcgatccgccgcaagtaccaggccgagctgccgctgaagggcgtgcgcgtgaccggctcgctgcacatgaccatccagacagcggtgctgatcgagaccctgaaggacatcggcgccgacgtgcgctgggcctcgtgcaacatcttctcgacccaggaccacgcggctgccgccatcgccgccaccggcaccccggtgttcgcctggaagggcgagaccctggaagagtactgggactgcaccctggacgcgctgaccttcaccctggccgacggcaccctgaccggcccggaactggtggtggacgacggcggtgacgtgaccctgctgatccacaagggctacgaactggaaaacggcagcgactgggtcaacaccgcgtccgcctcgcacgaagaacaggtcatcaagaacctgctcaagcgcgttgccaaggagcgcccgggttactggggccgcgtggtcaaggactggaagggcgtctccgaagagaccaccaccggcgtgcaccgcctgtaccagctggcccaggccggcaccctgctgatcccggcgatcaacgtcaacgactcggtcaccaagagcaagttcgacaacctgtatggctgccgcgagtcgctggccgacggcctgaagcgcgcgatggacgtgatgctggccggcaaggtagccgtggtctgcggctacggcgatgtcggcaagggctgcgccgcgtcgctgcgtgcctacggcgcgcgcgtgatcgtcaccgagatcgacccgatctgcgccctgcaggcggcgatggaaggctatgaagtcaacaccatcgaatcgaccctgggccgtgccgacctgtacgtcaccaccaccggcaaccgcgacatcatccgcatcgagcacctgagcgcgatgaaggaccaggccattgtctgcaacatcggccacttcgacaacgagatccaggtcgacgcactcgtgtccttcgccggcatcaagcacgtcaacatcaagccgcaggtcgacaagtacatcttcccgaacggcaatgcgatcttcctgctggccgaaggccgcctggtgaacctgggctgcgccaccggccacccgagcttcgtgatgtccaacagcttcgccaaccagaccctggcacagatcgacctgtgggcgaacaaggacagctacgagaagaaggtgtacctgctgccgaagaagctggacgaagaagtggctcgcctgcacctggaaaagatcggcgtgaagctgaccaccctgagccaggaacaggccgactacatcggcgtgccggtggaaggcccgttcaagccggaccactaccgctactga

SEQ ID NO: 493610 - DNA, 843 bp, Stenotrophomonas maltophilia
atggactgccaactgcaggccatgcgccgggacgcagacagcaaaggacaggacatgccgcgcaacaatgaccgagtgacccgggcgatgaagcccctgatgatcctgtgctgggtggccctgctggccgcctgcagcccgcctggcagcgatgccggtgccagcgcgccggcagcgaacaccggccaggcaagcaccgacggcaaggcaatcagcaccccggcagcggccacgggcagcagcgctgcctgcgccgagggggcatcacaggtgcagaccctgatctgcaacgaccccgccctgttgcagcaggaaggcgagctggccaaggctgaagcctccgcacgcgacaccctcgatgccgccggcaaggacaagctgcaggccgagcagcagcgctggatccagcatacgcgcgacctgtgcggtgacgcgcactgcctgcaacaggtatttgccgatcgcctcaaggtgctctcggccacgcgcgacggcctggtcgaccaggacgcctgcgaagtgcccgacggccagcagcagtgcgtggacctgctggtgctgcgcgaccccaacagccagttggcgaacttcaacacgctgctgggagaaaacggccaggaaggccgcctgctgggctgtacggccgccaccaacgtgggcggtggccccaacgccgtgctggcggccaactgcatccaggaaaccaccgccggcaagcgcaacgtgcagctgtgcagcaaccagatggtcggccagttcgccctcgaaccggcatcggccgcctacggcacccaggccgtccgccagctgctcggcttcacgcagcagcactgcgccggctga

SEQ ID NO: 493611 - DNA, 1335 bp, Stenotrophomonas maltophilia
atggcaaaggattccacccttacccgcgaacagctgtccacgctgttcctcaacacggagctgggcggcaacacccgccacctggaccacttctcatacgcgcagaaaggcgcaagcacctactcgttcggactggtgcagttcgatgtcggcggcaatccacaggccaggcgtttcctgcgcgacaacggcttcaccgccgctgacatcgaactgctgtcccagcagggcggattgagcacccggcagctggcggcgcttgacgccaagttgcaggccattccgcaggcgaagatggaccagctcaccaacgacaagctggacagcgccatcgagcgcgtcgatgaagccatcgccaaggtgcgtgccaccaacccggccgccgccgatgccatcgcggccaaccccgaactgcagctggccatggccgactatgacaaccagttcggcggcatgggcccgcagttcatcagctatctggccggcaacgcggaaaagctgcagggcggtacggtccaggccggcaatccgccgacccgcggcgacgtgcagaacttcgtcgatgccaccaagtacggcatccagtcgccggccgcggtgaccagccgcgatgagcgcttcgaccgggcgatgacccagctgggcatcacccccacccatgccccctcgcacgggtcgcccggcggcaacggcgtactggtcagcggcgccaggggcgatgaggtaaaggcgatgcagcagaagctggccgacctgggctatctgggcaaggacggcaagccactggtagccgatggcgatttcgggcccggcaccctggaagcggtcaagcagttccagcgtgagcaccagctcaccgtcgatggcaaggtcggtgccaccaccctgggtgcgctcgacaaggccatcgcgcaacagcaacagcaggccgccgaaccgaccatggccacccccggccacgccgacaacccgcgttaccagcaggtcgtggaaaagctggaaacgctggaagaacaacgccgccagggtggcctggcgccactgttcaatgaccgcagccagctcgagaacgccgcaggcctggtggcttacgagtccaagctggccggcatgagccaggtcgataccgtgctggcgcggccggacaaccagggcgtgttcgccgtgcagggccagcttggcgatcccgccatgcaccgcacttacgtcgacctgtcgcaggcggcgaaccacacgctgcaggacagcacgcggcatagccaggcgctggacaacgaactgtcgcagcgacagacccaggaacagattcagacgcagcagtcgatgtcgcgctga

SEQ ID NO: 493612 - DNA, 474 bp, Stenotrophomonas maltophilia
atgaccccggccatcaacctgctcaagcgcgagaagatcgcccacaccgtgcgcagctacgtgcacgacgcccacgccgaatcgtatggcggcgaagccgtcgacaagctcggcctcgacccggcccaggtgttcaagaccctgctggccagcacggaagcacacgaactgctggtggcgatcgtgccggtcgccggtcagcttgacctgaaggcgctggccgaagccgccggctgcaagaagtgcgagatggccgccgccgatgccgcacagcgcgcgaccggctacctggtcggtggcatcagcccgctggggcagaagaagcgcctgcgcacgttcctggacgccagtgccgaagcgctgcccgcgctgcatgtcagcgccgggcgccgcggcctcgaggtagaactggcaccggccgaccttctgcgcctcaccgccggccactacgctgccatcggcaagtcacgctga

SEQ ID NO: 493613 - DNA, 486 bp, Stenotrophomonas maltophilia
atgcgctggccgtggtctgcagcgccggtaccccggctcgacgatgcacaggccgacgtgctgctgcaggacctgctgtcgcgcgatgccacgcgcatcaccgatgccgcacgcacggtggcacggctgttcagcaccgcgtcgttggacgcgttggtcgcacatgtggatacgatcgaacgcagctgcgagggcatcgccctgggcggcatgctgatcagcaaccaggcgcacctgaaggcggccctgcaacggctgcgctactggcaggcgcgtgaggggtgcctgtgcgcactctacccttcttatgtgttcttcaaccctgcaccgctgctggaacagggccacgtgctgctgctcggacgaggcgaggccgaggatggctggggtgagtgctaccgggtgacgtgcacgtcctgcacgcagccgtggagcgccaccgagcgcgaataccactacccgtggtgggagtggaagcgcctctga

SEQ ID NO: 493614 - DNA, 636 bp, Stenotrophomonas maltophilia
atggcggtctgggcaaggatgatcctgatgttgctggcgggcacgctgcccgccaccccggtactggccgcgaagccctctgccgggatggcctgcgaacccatggcacgccttcccgggctgcgcgatgcaggcgtgaccgcgctgtcgatgcagccgcaggacggccgctgcgtgattgaagtggcggcggccaatggcaacgcgctgcgtcggcagcaacgaatgctggaggcgctggtgcagcatgcctgcgccgcgccggcgcacgtgaccgtgaatgaggtgcaggtatccctgcagctgcgcctgccgacgccctgcacggcacgcagcaaccgggatctgttcgcgggtgaaggtattccctggctgcctccacacggcgtgtcgccgcgctatccggtggaggccatgcggcaggggctgtccggccgcagcatgctgaaggcgttggtcgatgcgcgggggagcgttgcggccgtgatcgtggagacctccagcggtcatgcgttgctggatgacgctgcagcggaggagctgcagggctggcgtttcagccgcgccgatgcgaagggtacggtgccggcgttgaccctcgtgcgcatgccgatgcggtatgaattcgtggagtga

SEQ ID NO: 493615 - DNA, 585 bp, Stenotrophomonas maltophilia
atgtccatcgtcctcaccgatttcgcccgtccccgcctgttcccgcgcgtgccacgcggcaataccatccaggactgcactgccgagcagttcgaggcacacctcaatgcgcacgcgccgctgaaggtgctcgacggctacgccccgttctgcaagttgttcgtctacgagaactggaccagcacgcgctgcctgacggtgccggtcaccgaggccaaccgccaccagctgcgcagcggctacgaagcgcgcaaccgcgaggaactgccggtactggtgcgctggttcgagggcgtggagtcgccgcgcgcgaactacctggtggtgatcctgtacaacgccgagcagctggccagggaaggctcaccgatcgaagccgactggggcatcgtcggctgcatctacaccgccgaaccggaagaagtgccgatggcgccgatcaccatgatgcgcaatgcgctgggcgtggaggagggcggttccggcgtgccattggacaaggaggcctaccggcgctcggtggagttctgggagaacaacgccaactggcggccggggtcggatccccgcatcgcagggctctga

SEQ ID NO: 493616 - DNA, 732 bp, Stenotrophomonas maltophilia
atgactggcatgctgcgcgtgttgatcgtcgatgacgcacggctggcccggcaggagctgcgcacgctgctgtcggcgctgccgtgggtgcagtgcgtgggcgaggccgacgacgtgcccgccgcacgcgaggcgatcaccacgctggcaccggacctggtgctgctggatgtgcagatgccctccggcagtggtttcgacgtgctggacggcctggacacggtgccggccgtggtcttcgtcaccgcctacgacacctatgcggtgcgtgcgttccaggccaacgcgctggactacctggtgaagccggtggaggcgccgcggctgctggaagcgctcgagcgggcgcggcagtgcgaggcggttgcggccgacgtgccggaatcgcgcggcacgctgggcgcgcacgaccaggtgttcgtgcgcgagggtgaacgctgctggttcgtcgcggtctcggagatccgtcggctggtggtggatggcaactacacacggctatggttccgcgaccagaacgccctgctgacccgcagcctgagcgcgctggaagcacgcctgccgccggagttgttcttccgcgccaaccgcaacacactggtcaacctgcgccgtatccgtggggtgtcgcccagcatcggcgacggctatgacctgacgctggatgatggcagcgaggtggaggtatcgcggcggcaggcacgcgagctgcgcgagcggatggcgttgtag

SEQ ID NO: 493617 - DNA, 1050 bp, Stenotrophomonas maltophilia
atggacgccaccacgccttcccgccgtttctggacgctcaatgcactggcatgggccggctatgcgctgtacgggctgtgggtcggcatgcggatcggtggcggcatcgtgttcagtggcatcgtgctgatcaccgtcagcgtcgcggtctcactctggctgtgcagcggcgcattgcgttcggttgcactgcgccagcgctggtgggagggcagcctgggcagcctggtgctgaaactggctgccggcgtggtgctcggggccagcgtcgcacaggcggtaacggcggcgctgctgctgccggcgctggcgctgggttgggtgcagctgcctggcggccatgcggattaccagtggtcttcggtgctgctgtattggatgaacaccgcgttgttcctgctggtgtggaccggtttgtgggcgggcctgcacggcctgcggcgggcacgccacagcgagctggcacgcctgcgcgccgaagccgaacgcagtgcgctggaacgtgacgcactgcgtgcgcggctcaatccgcatttcatgttcaatgcgctgaacaacctgcgtgcgctgatcctggaagacccggaacgggcccgtgacatggtcacccgcctgtcgcgcacgctgcgccaggcgctcgcccacaaccgcagcgagcaggtcacgctggccgaggaactggcggtggtcgatgattacctggccatcgaggcggtccatttcgaacagcgcctgcaggtgcggcagcagattgatgccgatgccacgcaggcgcagctgccggcgatggcgttgcagttgctggtggagaacgcgatcaagcacggtatcgccagccgacccggcggcggcgaggtgcagatccgcgccacgctggacaatgacgtgctgcggttgcaggtggacaatccacttccaaccggcagcgaacccacccatggccatggcgtcggcctggcctacctgcgtgcgcagctgggcatgtgtggccgattcgtgctgcaaccggccggtgaccgcatgcaggccctgctggagattccgcaatga

SEQ ID NO: 493618 - DNA, 927 bp, Stenotrophomonas maltophilia
atgaagatcttcctggcactctggtacgcgatgaaggccctcgcccggctggcgatgatcggcatggcgatggccgtgctcggctccggttccgcgcatgccgccaccggctcgaccgctggcaaggtacaggtcgaggtggtcggcatggggcgaccgctgctgatgatccccggcctcaacagcagcgccgaggcctggcgcgagacctgcctggccctgaaggacgtgcagtgccacctggtgcagttgccgggctttgctggcgcggcagcggccgacccgcgcccggccggcttcctgccggcgatgcgcgggcagctgctggcctacctgcatgaccagcacctggggccggtggtggtggtcggccacagcctcggtggcgtgctgggcctgcagatggcgcaggccgagccgaaggcgatcagcgcactggtggtggtcgatgccctgccgttcctgccggcggcgcgcgacccgagtgccaccgctgacagcgtgcggccgatggccgaccgtctgcgcagcggcatgctggccgccgatgccgtgcaatggcaggcgcagttgaaggcgggcctgccgggcatgacccgcgatccgcagcgccaggccgagctgggccgctggggcgaagccagcgaccgccggaccacggccgatgcgatgcatgcggtgatgaccaccgacctgcgcgacagcatcgcttcgatcaccgcgccgacgctggtgctcggcagctgggccggctaccagccgttgggcggcaccgaggacggcacgcgtgcggtgttccaggcccagtacgcgaaactgcagggcgtgcagatcgcgatgagcgcgcagggtttccacttcctgatgtgggatgatccgcgctggttgcaggaacaggtgcagcgtttcctcgccgcgcatccctga

SEQ ID NO: 493619 - DNA, 828 bp, Stenotrophomonas maltophilia
atgaccgccatcagcttcgagttctatccgcccaagaccgacgaacagcgcagccagctggaccgcgccgcggccaggctgaaggactacggccccgagtacgtgtcctgtaccttcggcgccggtggctcgaccctgagctatacctccgagaccgtgcgccacctcaaccagcaccacggcttcgaggctgcaccgcacctgtcctgtgtcggcggcacccgccaggaaatccgcgaactgctcaagctgtaccgcgccatcggctgccatcgcctggtcgcgctgcgtggcgacctgccctccggcatgggcttccccggtgacatgcgctacgccgccgagctgatcgacttcatccgcgccgaacacggcaccgccttccgcatcgaagtcggtgcctatccggagacccatccacaggcctccgatgcactggccgacctgaagcacttcaaggccaagatcgatgccggcgccgacgcggcgatcacccagtatttctacaacccggatgcgtacttccacttcgtcgatgccgtgcgccggctcggcgtgcaggtgccgatcacgcccggcatcatgccgatcgccaacttcagccagctgcgccgcttctccgagcaatgcggtgcggagatcccgcgctggatcagccgcaagatgcaggcctatggcgatgacgccgaatcggtgcgggcgttcggtaccgaagtggtggccaaactatgccagcgcctgatcgagggcggcgcgccgggcctgcacttctacaccttgaacctggccaagccgaccacgtcggtgttgaagctgctgcacggctga

SEQ ID NO: 493620 - DNA, 585 bp, Stenotrophomonas maltophilia
atgaaccggttttccttcctgctgttactgctgttgttgtgttcggtatcgagcattgtccatgcgcagtccccgcgcttgaaccgctgcaccgatgcgcaggggcagagcgtgtataccgaccgcccctgcgacagcgttggcgcccagtcgcgattgccaccgcccgcgcccaccggcagcaccctgccacgcgacaccctgggtgcgcgctgcccacgacgcctgagcgagctggtggaggcactgcgcaccggcatcgtcagcaacgatgtgaaccggctgtcctcgctgtacctgtggggtgcggtctccgatgccggcgcgcagcgcatcctcggccagttggaatccttggcacggcggccactggtggacgtggtgccggtgtatccgccacaggggctggcgtcctcgcaggaagagggtcagagccctgcggcgcaggaatccgaccctgagccgccagcgccacggcatccggtcggcctgcgcctggagcagacgctgcccggcagcgcgtcgcgagcgtccacggtgctgggattgcggcggcaatacggatgcttctggatcacgctgtga

SEQ ID NO: 493621 - DNA, 954 bp, Stenotrophomonas maltophilia
atggtttctcccacccgatcgatccatgtcgtggccgccgtcatcaccgacgcccgtggccgcgtgctgctcaaccgccgtaccgagaaccgcgacatggctggcctgtgggagttccccggcggcaagcgcgaatccggcgagacctccgaacaggcgctggtgcgtgaactgcgcgaagagctgggcatcgaggccgatgtcgggccctggctgatggatgtgccgcagcgctatccggacaagcacctgaccctggaagtgcgccacgtgcgcagctggaagggcacaccgcgcgggcgcgagggccaggcgatcacctgggtggcgcaggacaagctgggccgctattccatgccgccggccgacctgccggtggtggccgcactgcgccaaccggatcgctacctcatcacgccggcgccggccgaagatgccggcggcgtgcagcactggcatgaacggctgcagcaggcagtggcggcgggccagcagcgcatccagctgcgcctgccgccggagcatccgcaacggcaggcgatgatcgaacaggccgtgcgcgcgcatcgtcgcggcgtgcagtggctgctcaaccgcgatgtcgcgttggcccgcacactgggcgtgggcgtgcacctgggcagcgagcagttgctggccctgcaggagcggcccttgccggaaggacagctggtcgccgcgtcctgccacgacctggagcagctgcaggcggcgcagcagctgggctgcgacttcgcggtgctcggcccggtgcaggccacggccagccatcccggggcggtgccgctgggctgggaggccttcgctgcgctgcgcgcgcaggtatcgctgccgatctacgcgttgggcggcatggccgccggccatatcgccgaagcgcgtcggcatggcgggcagggcatcgctgcgattcgtgggctgtggccggcgtga

SEQ ID NO: 493622 - DNA, 2733 bp, Stenotrophomonas maltophilia
atgatcaacagcctgcttacccgcgtatttggcagtcgtaacgaacgacagctgcgccagctcaaccgcatcgtcgccaagatcaatgcgctggagccggagatcgagaagctttccgacgagcagcttcaggccaagacgccggagttcaagcagcgcatcgccggcggtgaagccctggacaaggtgctgccggaagcgttcgcggtctgccgcgaagccggccgccgcgtgctgggcatgcgccactacgacgtgcagctgatcggcggcatggtgcttcacctgggcaagatcgcagaaatgcgcaccggtgaaggcaagaccctggtggcgaccctgccggtgtacctcaacgcgctggaaggcaagggcgtgcacgtggtcaccgtgaacgactacctggctcgccgcgacgccgcgcagatgggcaagctgtacaactggctgggcctgagcgtgggcgtggtgtacccgggcatgccgcacagcgacaagcgcgaagcctacgcggccgacatcacctacggcaccaacaacgaattcggcttcgactacctgcgcgacaacatggcgctgtccaaggccgaccgttaccagcgcggcctgcactacgccatcgtcgacgaagtcgactccatcctgatcgacgaagcgcgtaccccgctgatcatctccggtccggccgatgattccccggagctgtacatccgcgtcaaccgcgtcgtgccgcacctggtcaagcaggaagcggaagacggcgaaggcgatttctgggtcgacgagaagggcaagcaggtgcacctgtccgaagcgggcatggagcacgccgagcagctgctggttgaagccggcatcctcgacggcgagaccgaaggcctgtacgcggcgcagaacctgaccgtggtccaccacctcaacgccgccctgcgcgcgcacgcgatctaccagcgtgacgtggactacatcgtgcgcgacggcgaagtggtcatcgtcgatgagttcaccggccgtaccctggccggccgccgctggtccgacggcctgcaccaggcggtggaagcgaaggaaggcgtgccggtccagcgcgaaaaccagacgctggccagcatcaccttccagaacctgttccgcatgtacaagaagctgtccggcatgaccggtacggccgacactgaagcgtttgaattccagagcatctacggcctggaagtggtggtgatcccgaccaaccgcccgaccatccgcaaggacagtccggaccaggtgttcctcaaccgcaagggcaagttcaatgcggtgctggccgacatcgaagagtgcgccaagcgcggccagccggtgctggtgggtaccacctcgatcgaaacctcggaaatgctgtccgagcacctgagcaaggccggcgtgaagcacgaagtgctcaacgccaagcagcatgaccgcgaagcgaccatcgtcgccaacgctggccgcccgggcgcagtgaccatcgccaccaacatggccggccgcggtaccgacatcgtgctgggcggttcgctggaagccgagatccacgccctgggcgaggacgcgaccgacgagcagaaggcagcggtcaaggccgaatggcagaagcgccacgaggcagtgaaggcggcgggcggcctgcacatcgtcggcaccgagcgccacgaatcgcgtcgtatcgacaaccagttgcgcggccgttcgggccgccagggtgacccgggttcgtcccgcttctacctgtcgctggaagacaacctgatgcgcatcttcgcctccgactgggtgcagaaggccatgcgcatgatgggcatgaaggaagacgacgtcatcgaggaccgcctggtcagccgccagatcgaaaaggcgcagcgcaaggtcgaggcccacaacttcgacatccgcaagaacctgctggacttcgacgacgtcaacaacgaccagcgcaaggtgatctacgcccagcgcgacgagctgctggatgccgagtctgtgaaggcgaatgtcgatggcatccgcgacgacgtgatcttcgacatcgtggcgcgcttcgtgccgccgaactcgatcgacgagcagtgggacctgcgcggcctggaagcgaccctggagtcggacttcggcctgcagatgtcgctgaccgacctggtcaaggaacacgaagagctggacgccgaggccatcgccaccaaggtccaggagcgcgtcaaccagcacttcgccgagaaggaagccggcctgggcgaagaaaccatgcgcgcgctggagaagcacgtgatgctgaccgtgctggaccagagctggaaggaacacctggcgcgcatggattacctgcgccagggcatctacctgcgtggttacgcgcagaagcagccgaagcaggaatacaagaaggaagccttcgagctgttctcggacatgctggagaacgtcaagcgcgaagtggtgaccctgctggcccgcgtgcgcatccgcagcgacgaggaagtgcaggcgctggaagcggccgagcgccagcaggcgcaggcgcgcctgagccagtcgcagttccagcaccaggatgccggcggttacagcgccgacgaggaagccgcgcaggtcgaagccgcccagcagggcgtggccacgctgcagcgcgacgagccgaagatcggccgcaatgatccgtgcccgtgcggcagtggcaagaagtacaagcactgccacggccagctgagctga

SEQ ID NO: 493623 - DNA, 957 bp, Stenotrophomonas maltophilia
atggcattcaaaaagatcgtaatcaaaacgcgtgaaggacaggccaaggcgtcgccgatcacgcgtttgcggttctatttcgaggaccgcccccgcgccctgctgggcagcgtgctcggggtaggctgcattatcggccttgccggcggcattggcgccagtgcgctgaatgattcgcgcctgcaggccaaggtcgagcgccaggatgcggagctggccaaggtcaagcgcgatgcgcagacccaggtcaacgcgctggccgcccgcctcggcgagctgcaggcgcaggccacccgcctgaacgccctcggcgaacggctgacccagatgggcaagctggaagatggcgaattcgacttcaacgagacccccggcctcggcgatggcgacgccggcggcccgaccagcgacattccggtcaaggacgtcaacgccgacttacaggtgctggagcagcgcttcgctgcttcaggccgccagttgtcggtgatggaatcgctgatgttcgaccaccagctgcagcagaacgccgtgccgtcgcgcatgccgatccgcaacagctacgtgacctccggcttcggcacccgtgccgacccgttcggccgcggcgccgccacccacaagggcatggacttccacgccaaggtcggtgacccggtgatggccgtggccgaaggcgtggtcagcttcgctggtgtgaagggcggctatggcaacgtcgtcgatgtcgaccacggtaacggctatgtcacccgctacgcgcacaattcgcgcctggtggtgaaggccggtgacctggtccgcgccggccaggaagtggccaaggccggttccaccggccgttcgaccggtgcccacgtgcacttcgaggtgtgggagaacggcaacgtggtcaacccgcgcaagttcctcggcgacggcggcaacacgccggtcggccgcgtcagccgcggctga

SEQ ID NO: 493624 - DNA, 450 bp, Stenotrophomonas maltophilia
atgtctgagccgaaatccagcgttcgccccgcgtcagtgccgaaaccggcgctggatgcggtaatggcggacaaaagcgggaacccgctgcgtcgggccttgtggctcgacgcgctggaccggcagttgcgcccccagttgccgccacctctgcgcagccgctgccggctggccaatgtggacggggaacacctcgtttttctcgtcgagtccccggtctggcatgccaagttgcggcttgccgaagcccagttgctcgacgcggcccgttccatcgggctgaaggccaccagggtgaccatcaagactgcgtccaccactccctcacgctccccagcgatcgacaaccggaatggcccccacgcagtttcagccgccacgcacaaagggctacgcgacgccttggcttgcctgcaggacgttccctcgaagccgaagaagcggtcctga

SEQ ID NO: 493625 - DNA, 912 bp, Stenotrophomonas maltophilia
atgatccagcaacgcaccctcaagaacacgatccgcgccaccggcgttggcctgcacagtggtgacaaggtctacatgaccctgcgcccggcaccggtcaaccatggcatcgtgttccgccgcgtggacctggacccggtggtggaggtgccggccaaggccgaactggtcaccgaagtgaccctgtgcaccggcctgacctgcaacgacgcaaagatccagaccgtcgaacacctgatgtcggcgctggccggcctgggtgtggacaacatcatcgtcgaactgtcctcggccgagctgccgatcatggacggttcggccggcccgttcgtgttcctgctgcagtcggcgggcatcatcgaacaggatgcgcccaagcgcttcatccgcgtgctcaagaccgtggaggtgaccgagggcgacaaggtggcccgtttcaccccgtacgagggctacaagctgggcttcaccatccagttcgaccacccgatgatcccggccaagcagtcgcgccaggaaatcgagttctcgacgctggcctacaccaaggaaatctcccgcgcgcgcaccttcggtttcatgcgcgacctggaatacatgcgcgagcgcaacctgggcctgggcggttcgatggacaacgccatcgtgctggacgagttccgcgtgctcaacgaagacggcctgcgctacgccgacgagttcgtgcgccacaagatccttgacgccattggcgacctctacctggccggtggccaggtgctgggcgcatacgagggcttcaagtccggccacgcgctcaacaacaagctggtgcgtgccctgatggccgacgccagcgcctgggaatgggtcagcttcgactcgccgaccagcccggatccggtggaatatgccaccccggcctacgcctga

SEQ ID NO: 493626 - DNA, 1236 bp, Stenotrophomonas maltophilia
atggcgcattttgaactgatcgaaaagatggcacccaatgcggtgatcaaggtggttggcgtgggcggcggcggcggcaatgccgtggcgcacatggtcaactcggcggtggatggcgtggaattcatcactgccaacaccgactcgcaggccatcaagaattgtggtgccaagctgcagctgcagctgggtaccaacgtgaccaagggcctgggcgcaggcgcgaacccggaagtcggccgccaggccgcgctggaagaccgtgagcgcatcatggacgcgctgcagggcgccgacatggtgttcatcaccgccggcatgggcggcggcaccggtaccggcgctgcgccggtggtggcacagctggccaaggaaatgggcatcctgaccgtggccgtggtcaccaagccgttcccgttcgaaggccgtcgccgcatgcaggtggcgttgaagggcatcgaggaactgagccagcactgcgactcgctgatcaccatcccgaacgagaagctgatcaccgtgctgggtcgcaacgcgaccatgatccaggccttccgcgctgccaacgacgtgctgcagggcgccgtgcagggcatcgccgacctgatcgtgcgtccgggcctgatcaacgtcgacttcgccgacgtgcgcaccgtcatgtccgaaatgggcctggcgatgatgggtaccggcaccgcccgtggcgatgaccgcgcccaggccgctgccgaatcggcgatccagaacccgctgctggacgatgtgaacctggctggtgccaacggcatcttggtcaacatcaccgccggcgccgatttcaccatggccgagttcgacgagatcggccgcaccatcgatggcttcgcttccgaagatgccaccgtggtggtcggcaccgtgctcgatccggacatgcaggacgaagtgcgcgtgaccgtggtggccaccggcctgaaccgcgtctcggcgagcaagacccagcgtccgggcgagcgtgcgccgatcaagctggtccgcaacgccaccaccggccagccggagttcggcgagttcgacaacggcggcgatgccgtctccaaggcggtgggtggcatgggcctgggcctgcgtcgcgccagcagcgataccgcagcggcctccgccccttcggccccggccgcttcggccccggcggcggcggaactgccgaacgattacctggacatcccggcgttcctgcgccgccaggcggactaa

SEQ ID NO: 493627 - DNA, 1236 bp, Stenotrophomonas maltophilia
atgaatcgcaagggtgacaaatcgctgatcgttggcctggacatcggcacctccaaggtggtggcgctggtgggcgagtattcgccgggcaacccgatcgaagtgatcggcatcggctcgcacgaatcgcgcgggctgaagcgcggcgtggtggtggacatcgaatcgaccgtgcagtcgatccagcgcgcggtggaagaagccgagctgatggccggctgcgagatccgttcggtgtacgcctcgatctccggcaaccacgtgcagtgcaagaactcgccgggcatcgtgccgatccgcgacggtgaagtgacctggggcgacctggatcgcgtgctcgacgcggccaaggcggtggcgatcccggccgaccagaagatcctccacgcgatcccgcgcgagtacgtgctggacgattcgcaggaaggcatccgcaacccggtcggcatgaccggcgtgcgcctggaagtgcatgcgcacctggtggtgtgcgcgcagtcggcggcggccaacatcagcaagtgcgtgcagcgctgcggcctgcaggtggacgacctggtgctgtcctcgctggcctccagcgtggcagtgctgaccgccgacgagcgcgagctgggcgtggtgctggtcgacatgggcgccggcaccaccgacatcgcggtgttcgtgcagggcgcgatctgccacaccgcctcgctgccgatcgccggcgaccacgtgaccaacgacatcgcgcacatgctgcgcacgccgaccccggaagccgagcagatcaaggtgcgctatgcctgcgccctggcccagctggccacggccgaggagagcatccaggtgccgtcggtgggcgaccgcccgccgcgccgcatgccgcgccattcgctggcgcaggccgtgcagggccgctacgaggaaatcttcgagatggtgcaggccgaactgcgccgctccggcttcgaggagctggtgcgcgccggcatggtgctgaccggtggcgcgtcgaagatggaaggcgtggtcgaactggccgaggaaatgctgcagatgccggtgcgcgtgggcatcccgcagcacgtcaccggcctgggcgaagtggtcggcaacccggtgcacgccaccggcgtgggcctgctgctgatgggcagccagatcgagcacccgcggcggccgtcgctgcccaccgggcgcgccggaagcatgttcaagaaactcaagacctggttccgcggcgagttctga

SEQ ID NO: 493628 - DNA, 750 bp, Stenotrophomonas maltophilia
atgaacgcggtgctgcgcatcttcgtctggctgttggcgctgtcggtggttgcactgccggtggtggccgtggtcaatggctgggtcggcgccgagcgctggccactggcgaagctgcgcgtgcatggtgagttcaagcgggtgccggccgaacagctgcagcaggtgctgctgccgtatgcgcgcgccggtttcttcgcggtcaagctgcaggacgcgcaggacgccctggagaagctgccgtgggtggaaagcgcgcaggtccgcaagcagtggccggacgtgctggaagtgaccctggtcgagcacaagccgttcgcccgctggggtaccgaccgcctggtgtccgagcagggcaagctgttccccacgccgaagaagctgtccgacctggcgctgccggagctggatggcccggacagccagaccgcggaagtgatgaagctgtacagcgactcgcgtgcattgttcgcaccggccggcgtcgatgtgcgccgggtgacgatggacgcacgcggcagctggtcgctggtgctgagcaacggcaccgaagtggtggtcggccgcgacgacgcgcgctcgcgcatgcagcgcttcgtcaaggtactgccgcagctcaaccgtcaggacgcgccgatcgagcgcgccgacctccgttacaccaatggtttcacgctgagctggggtaccccggccacgccggcgaaaacgccggcgaccccggccagaagcacgcaggaaaggacatga

SEQ ID NO: 493629 - DNA, 963 bp, Stenotrophomonas maltophilia
gtgagcacgctgaccttcccgccgctgcgcgtgaccgacccggccgagttcggccgcgtcgccgtgctgctgggcggcagttccagcgaacgcgaggtgtcgctggattcgggccgcaacgtgctcgaagccctgcagtcgcgtggcgtcgatgcgttcgcggtggacggcattccggcgctcgccagcgcgctcgccgccggtggcatcgatcgcgtcttcaacatcctgcacggccacaacggtggcggtgaggacggcatcgtgcagggcctgatggacgccttcggcgtgccgtacaccggctcgaacgtcctgggttcggcgctgagcatggacaagatccgcaccaagcaggtgtggctgtcgctgggcctgccgaccccgcagtaccgcaaggtcactgccgaggacgtgcacgccaatgccgccgaactcggcctgccggtggtggtgaagccggccaacgaaggctccagcgtgggcatcagccgggtcaccgatgacgccgggctggatgaagcggtggccctggctgcgcgctacgacggccagctgctgatggagcagatggtggtcggcgacgaattgaccgtggccatccttggcgacgtcgcactgccgtcgatccgcatcgtgcccaagggccagtggtacgactacaacgccaagtacatcgccgaggacacccagtacctgtgcccgggcctggacggtggcgacgaagaggacatccggcgcatcgcgctggccgcgttccgtgccgccgggtgccgtggctggggccgcgtggacgtgatgcgcgatcgcgacagcggccgtttcttcctgctggaagtgaacaccgcgccgggcatgaccagccattcgctggtgcccaaggcggcccgccaggccggcatcggtttcgaggaactggtgtggcgcgtgctggaacagaccctggaggcctcgcacgcatga

SEQ ID NO: 493630 - DNA, 1437 bp, Stenotrophomonas maltophilia
atgatccgtcgcctgcacgacaccaacgacctggtgcgcgcgttcccgcgcgtgcatttcgtcggcatcggcggcaccggcatgagcggtatcgccgaagtgatgctgacgctgggctatgaagtgtccggctcggacaacgccgacaacgtggcgacccgccgcctggccagcctgggggcgcgcatcatgcgcggccactccgcggccaacgtgctgggcaccgactgcgtggtggtctccagtgccatccgcgaagacaacccggaactgatggaagcacgcagccagcgcattccgatcatgccgcgtgcggcgatgctggccgagctgatgcgtttccgccgcggcatcgccgtggccggtacccatggcaagaccaccaccaccagcctgaccgctgcggtgctgagcgaaggtggcctggacccgacgttcgtgatcggtggccagctgctggccgctggtgccaacgccaagctgggtggcgggcagtggctggtggccgaggccgatgaaagcgatggcagcttcctgcgcctgaacccgctgatgtcgatcatcacgaacatcgatgccgaccacctggaaaactacggcaacgatttcgcccgcgtgcaggcggcgtttgccgagttcctgcagcgcctgccgttctacggcctggcggtactgtgcatcgatgatccggaagtcgccgcgctggccgccaggaccccgcgccacgtgatgagctacggcatgagcccgcaggccgacgtgcgcgccgagaacgtggtgcaggaagggtcgcgcatgcgcttcaccctgcgcctgccgcagggcaccagccaggaagtggtgctggcgctgccgggcaggcacaacgtgctcaacgcgctggccgccgctgcggtgggctggcagctgggcgtggcaccggacgcgatcgcacgcgcgctggagggcttcgccggtgtcggccgtcgcttcaacgatctgggcgaggtgaccaccgccagtggcgccaaggtccgcatcatcgacgactatggccaccacccgagcgagctggaggcggtgttcgccgccgctcgtggtggctgggccgacaagcgcctggtggtggccttccagccgcaccgctacagccgtacccgcgaccagttcgacaagttcgccgccgtgctgtcgagcgttgacgcgctggtgctgagcgaggtctacccggccggtgaagaaccgattgccggcgccgactcgcacgcgctggcccgtgccatccgtgcgcgtggccgcagtgagccggtggtggtgggcaaggccgccgagctggccagcgtgctgccggacgtgctgcaggacggtgacctgctgctgatgatgggcgccggcgacatcggtgccgtggccacccatatcgcggtggaaggtttcaagggggagggccaggcgtga

SEQ ID NO: 493631 - DNA, 1089 bp, Stenotrophomonas maltophilia
atgagtgcagccaccgagagtgggcgcccggtgatgatcctggccggaggcaccggcggtcacatcttccccggcctggccgtggcccgcgtgctgcgcgagcgcggcgtgccggtgacctggatgggcgccgacggtgcgatggaaacccgcctggtgccgcagcgcgacatcgccatcgatacgctggccatcactggcctgcgcggcaagggcaagctggccctgctggcggcgccgtggcggctgatgcgcgcgctgcgcgcggccgggctcatcatccgccagcgccagccgcgcgcggtggtcgccttcggtggctttgcctccggccccggtggcatggccacgcgcctgcatggcctgccgctgatcgtgcatgagcagaaccgtgcgccgggcctgaccaaccgcatcctgtcgcgttatgcgcgtcgcctgctgaccggtttcccgggcaccttcgccaagggcgaggagttcgtcggtaacccggtgcgcgcggaaatcgctgccatcgcgccgccggaacagcgcttcgccgaccggcagggcccgctgcgggtgctggtggtgggcggcagccagggcgcgcgtgccctcaataccggcgtgccgcaggcgattgccgcgctgggcgccggcctgccggtgcaggtgcgccaccagagcggcgagaagatgcatgccgaagcggtggaggcttacgccaaggccggtgtgcaggcggaaatcacgccgttcatcgccgacatggccgaagcctttgcctgggctgacctggttgtctgccgcgccggcgcgtccacgctggccgagctgtgcgcggtcggtgtcggcagcgtgctggtgccattccccgctgccgtcgacgatcaccagacccgcaacgcggagtacctggtcgagcgcggcgcggcggtgttgctgaagcaggacggaacgctggccgacggcattgccgcaacgctgcgcgatctgtccgaaaatcccgcccgccgcatgcagatggcgcaagccgcgcgtgccctggccaaggtcgatgccgccgagcgcatcgccgatatcattctcgaggaagctgtatga

SEQ ID NO: 493632 - DNA, 1326 bp, Stenotrophomonas maltophilia
atgaacgacctgtcccgccaggcaacacgccttgaagccatcgaaggcagctacgacaagtggctgctgggcgcgatcatcgcgctcaccggtgtcggcgtggtgatggtggcctccagctcgatcgcgctgatgagcagcccgttctattacctcaaccgccacctgatattcctggcggtgggtatcgtgctggcggtcattgccgcccgcaccgagctgaagtcgatcgagcagtacaaccagatgctgctgctgggctgcttcgtactgctgctggcggtgttcgcaccgggactgggcagcacggtcaacggtgcgcgccgctggatcaacctgggcatttccaagttccagacggtcgaagcggtgaaagtgctctacatcgtctggctgtcgagctacctggtgcgtttccgcgacgaggtcaatgcgacctggccggcaatgctcaagccgctgggcgtggccggtgcgctggtggtgctgctgttgctgcagccggacttcggttcctcgaccctgctgctggcgatcaccgccggcatgctggtgctgggcggggtgaacatgccgcgcatgtcgatgccggtgatcatcggcctggtcggcatgagcgcgctggcgatcatcgagccgtaccgcatgcgccgcatcacctccttcctggacccgtgggccgaccagcagggcgacggctaccagctgtccaacgcgctgatggcggtgggccgtggtgaatggaccggcgtcggcctgggcaactccgtgcagaagctgtactacctgcccgaagcgcacaccgacttcatcttctcggtcaccgccgaggaattcggtttcctgggtacctgcgtgatcgtggcgctgtatgcgctgctggtcggccgcaccttctggctgggcatgcgctgcgtggaaatgaagcgccacttctccggctacatcgccttcggcatcggcctgtggatcagcatgcagaccttcgtctcgatcggcgtgaacctgggcatcctgccgaccaagggcctgaccctgccgctgatctcctccggcggttcgtcggtgctgatgacctgcgtggcgatgggcctgctgctgcgcgtgtcgtatgaactcaagcgcgccgagcgccgccaggccgtgcgcatcggtggcgccgaagacgccgcggccgaaccgatggacaagcccgccgcagcggtggacgccagcgtgccgatgcgtgccgagccggtcgcacccgcgtccgctgcagcgagcgccgcacgtggcaccagccgcctgcagtcgcgcatcgaaccgaccttcgggaggctgtcatga

SEQ ID NO: 493633 - DNA, 1086 bp, Stenotrophomonas maltophilia
atgttgtatgaactggctcgatggttgcagcagttggagagcctgttcgggctgttcaactaccagacgttccgcgccatccttgccgcgctgacggccctgttcctgtcgctgtggctgggcccggcgatgatccgcaagctcgcccagttcaagggcggccagccgatccgcaaggacggtccgcagacccatttctccaaggccggcacgccgaccatgggcggttcgctgatcctgctcaccatcaccctgtcggtgctgatgtgggccgacctgcgcaaccgctacgtgtggctggtgctggcggtgatgctgtgcttcggcgccatcggctggtatgacgactggatcaagatcgtccgccgtgacccgaacggcctgaagtcgcgctggaagtacctgctgcagtcgatcttcggcctggctgcgggcctgttcctgttctacacggccgacgtgccggcagcgctgaccttctacatcccgatgttcaagtcggtcgcgctgccgctggccggcatcggcttcgtggccatcgcctacttctggatcgtcggcttctccaacgcggtgaacctgaccgacggccttgacggcctggcgatcatgcccaccgtgctggtggcctgcgcgctgggcgtgttcgcctacgcctcgggcaacgtggtgttcgccaactacctgcagatcccgcagatcccgggcgccggcgagctggtcatcatctgtgcggccatcgccggcgcgggcctgggcttcctctggttcaacacctacccggccatggtcttcatgggcgacatcggcgcactggcactgggtgcggtgctgggcacgatcgcggtgatcacccgccaggagctggtgctggtgatcatgggcggcgtgttcgtcatcgaaacgctgtcggtgatgatccaggtcgcctcgttcaagctgaccggcaagcgcgtgttccgcatggcgccgatccaccaccatttcgaactgaagggctggccggagccgcgcgtgatcgtgcgtttctggatcatctccgtcgtgctcgtgctgatcggcctggccacgttgaaggtgcgctga

SEQ ID NO: 493634 - DNA, 1395 bp, Stenotrophomonas maltophilia
atgaagcgcaccctgctttcgctgatcgcacactgggccggcggcgagatccacggcgatgacgtggccatcgatgcggtcagcaatgacacccgcaatctcggtccgggcagtctgtatgtggcgctgcgcggcgagcgtttcgacggccatgacttcgcggccgacgcgcaggcgcgcggtgccagtgcgctgctggtcgagcgcctgctgccggtcgaactgccgcaggtgctggtggccgacagcgaactggcgctggcgaagatcgccaccggcatgcagcgtgaccgtggcaccgaggtgttcgcgatcaccggcagcaatggcaagaccagcgtgaagagcctgctgctgtcgatcctgcagcaggtggcccagcacgcgcacaaggtggtctacgccaacccgggcaaccgcaacaacgagatcggcctgccgctggcggtgatcgatgcgccggaagatgccgactacgccgtctacgagatgggcgccggcaagccgggcgacatcgcctacctgaccgacgtcgcccgcccgcgttatgcgctggtcaacaacatcgccccggcgcacctggaacgcatgggcagcctgctcggcgtggcggtgaccaagggcgcgatctacgccgcgctgccggccgatggcgtggcggtgatcaacgccgacgatgcctatgggcgctggttcgaacagcatttcatcagcaccccggcgcgttgccgcgtgctgcgctatggcctggaacactcggcggacgtgaccgcgcgcgatatccgcgccggtgcgcagggcagccagttcactctggtcgcaccggccggcgaagcgcgcgtggtgctgggcctgccgggtcgccacaacgtcagcaatgcgctggccgccgccagcctggcgctggccgccggtgtcgatctggcgctgattgccgccggcctggccgaagcgcagccggtgccgggtcgccagatcgcccatcagctgcgcaatggcgcggtgctggtggatgacagctacaacgccaaccccgggtcgctggccgcggccatcgatgccctggccgcggcgccggaagagggctggctggtgctgggcgacatgcgcgagctgggcccggacgcggaagcgctgcatgcgcaggccggcctccgcgcacgtgctgccggcctgaagcgcctgtatgcactgggcccgctcagcgccgctgccgcctccgccttcggcgaaggtggccgccatttcgccacccacgacgcgctgtcgcaggcgctgaaggacgagctgcacgccggcgtgcgctgcctggtcaagggttcccgtggcagcgccatggacacgattgtcaaagcgctgctggcgcaaggagaggaatccccgcatgttgtatga

SEQ ID NO: 493635 - DNA, 1509 bp, Stenotrophomonas maltophilia
atgagtccttcgatgttgctttcgcagttgcttccggacgtggccctggcgggtcatgatcccgttctgaccggcctggtgctggacagccgtgccgtgcgccccggtaacgccttcgtcgccatcgccggtttcggcgcgcatggcctgggctttgtcgagcaggcgcgcgctgccggtgccagtgccatcctgttcgaaccgccggcaccggccgatctgccggccccggccgatgcgatcgccgtgccgggcctgcgcgcgcgcatgggcgcgatggccgaccagttccatggcgcgccatcgcgggcgatggcgatggtcggcgtgaccggcaccaacggcaagacctccaccgtgcagctgctggcccaggcctggcatctgctcggaacgcccagtggcagtatcggcacgctgggtgccgggctttatggtgcggtcgagccgaccggcttcaccacgccgctggtgctgcagatgcatgcgcttctggcgcagctgcgcgacgccggtgcgcgcgcggtggcgatggaagtcagctcgcatgcgctggaccagggccgcgtggacgccgtgcactacgacgtggcggtgttcaccaacctcacccgcgaccatctggactaccacggcgacatggccagctacggcgcggccaaggcgcggctgttccatcgcccgggcctgaaggccgcggtgatcaatctggacgatgccttcggccggcagctgttcgcgggcctgccggccggcgtgcagccgatcggcctgagctcgcgcggtgccactgacgccagcgtgcgcgccgaggcgctgcagctggacggtcgtggcattgccttcgagttggtcatcgacggccagcgcgcggcggtgcagtcgccgctgctgggccgcttcaacgtggacaacctgctggccgtggccggtaccctgcatgcgcagggccagccgctgccgcgtattgccgaggtgctgtcggcgctgcagccgatccgtggccgcatgaaccgcctgggcggtgaagacggcctgccgacggtggtggtcgactacgcgcacaccccggatgcgctggaacaggcgctggacagcctccacgggcacctgcagggcacgctgttctgcgtgttcggctgcggcggcgagcgcgacaccggcaagcgcccgcagatggcggcgatcgccgagcgcctggccaaccaggtcatcgtcaccgacgacaacccgcgcggcgaagatggcgatgtgatcgtggctgacatcctggccggcttccagaacgccgatgccgtgaccgtgcagcgcagccgcgcgcgtgcgatcggcctggcggtgaagcgtgccggtgccggcgacatcatcctgatcgccggcaagggccacgagccgtaccaggaagtgaatggcgtgcgccatgacttcgacgacaccgaagtggccgccgccgcactggcggccaaggccggtgtgctcagcgcgcaggccggggagggcgccgcatga

SEQ ID NO: 493636 - DNA, 1845 bp, Stenotrophomonas maltophilia
atgagcaagaccggccgcaaccgcccgcgcaacgccttcaacctgcgccagcgcctgcgctgggtcgcgctggcgcttggcctgtgctcggtgtcgctggtgggtcgcgcggcctacgtgcagatcatcaacagcgatttctaccagcgccagggcgaggcccgctacctgcgcgagctgccgatcaagacctcgcgcggcatgatcaccgaccgcaacggcgagccgctggcggtgtccaccccggtcgcctcgatctgggtcaacccgcaggacctgctgcgttcgcccgagcgcatcccggagctggcccaggcggtcggcatgtcggtggatgagctgagcagccgcctgtcgcagaagtcggacaaggaattcatgtacctgcgccgccggatcaatccggacgaggcagagaaggtggtcgcgctgaagattccgggcgtggccgcgcagcgcgagttccgccgcttctacccgcagggcgaagcgatggcgcacgtgctgggcttcaccaacatcgacgaccgcggccaggaaggcctggaactggcgttcgacgaatggctgcgcggcaaggccggtgccaagcgggtgatccgcaaccgcaagggcgagaccgtcgaaagcgatctgctgcgcgccgccgagccgggcaaggacctgaccctcagcatcgaccgccgcatccagtacctggccttcaaggaactgcgcaacgcgctggtggccaacaaggcggccggtggttcgatggtgatcatggacgtgaccaccggcgagatcctggccatggtcaacctgccgacctacaacccgaactcgctgaccggcgcgatccccgatacgcgccgcaaccgcgcggtgaccgacctggtcgagccgggttcgacgatgaagccgctgaccatcgccaccgcgctgcaggccggtgcggtgaccaaggacaccatcatcgacaccaacccgggctacatgaccctgggccgcttcaccatccgcgacgtgccgcgcaacaacggtgtgctcaacgtgaccggcgtgatcacccgcagttcgaacgtgggtgcggccaaggttgcggcgaagatgccggaccagaccttctacgacggcgtgcgccgcttcggctatggctcggcgccgcacagcggtttcccgggcgaatcggccggcgtggtgatgcgtccggcacgctggtcgggtaccaccaagaccaccatgtcctatggctatggcctgtcggtcacgccgctgcagattgccaccgcgtactcggcgctggccaacggcgggcgcctgatcgcgccgaccttcgtcaagggccagcgcaatgaaggccagcagatcatcgacgagaacgtcgcccggcaggtggtggcgatgatggaaacggtagtcacccagggcggcgccaagcaggcggcggtgctgggttaccgcgtggccggcaagaccggcaccgcgcgcaaggccggcccgggcggttatgagcgcggccattacaacgcgctgttcgccggcgtggtgccggccaccaacccgcgtttcgccaccgtcatcgtcatcaacgacccgcaggccggcaagttctacggcggcctggtgtcggcgccggtctaccacaacgtgatggaaggcaccctgcgcctcatggacgtgccgctggacgacctgcagtcgtggctggccgcacagcagtcgggcaaggtcggccattcggcgtcgattctgcctgcgccgccggccgagaccgcgctgccggtcgatgccgccgctgaattcgacgctgcgctgccaagcgcgcaagcccagacgccgcccgctacgggaggcacgcaatga

SEQ ID NO: 493637 - DNA, 264 bp, Stenotrophomonas maltophilia
atgagccggctgctgctgatcatcctgctggcctgcaccgtcgcctcggcgatcggcgtggtgttcgtgcgccaccgccaccggcagaccttcatcgaactgtcgcgtgccgagcgcaagcgcgatgacatcaaccttgagttcggccgcctgcagctggaacaggccaccctggccgaagccaaccgcgtggaccgcattgcccgcgagaagctgggcatgaagttccccgaggccgctgacatcgtggtggtgcgcccatga

SEQ ID NO: 493638 - DNA, 969 bp, Stenotrophomonas maltophilia
atgcgcacagaagcgcaggccggtcaccttccggtgtcgcagtcgccggcggtgcacctgccggtcctgtacacccaggtccttgaaggcctgagggtgatcgaaaacggacgttatctggatggcacgttcggtcgtggcggtcatgcgcgtggcgtgctcacccagctcggtcccgaggggcgcctgctggtcatggacaaggatccggaagccatcgccgttgccgagcgcgatttcgcgccggacccgcgcgtgtccattttccggggcagcttcgcccagctgctgcagtggaacgcgacggccgaaggcctggacggcgtgctgttcgacctcggcgtgtcgtcgccgcagctggacgtggccgaacgtggcttcagcttcggcaaggacggcccgctggacatgcgcatggatccggacagcggtgaaagcgccgcgcagtggatcaaccgcgtcgaagagcgcgagatcgctgatgtgctgtggacctacggcgaagagcgccagagccggcgcatcgcccgcgccatcgtggcccgccgcgagaagcagccgttctcccgcaccgccgaactggccgagctgatcgcctcggtgatgccgcgtgggaaggacaagattcacccggccacgcgcagcttccaggccatccgcatccacatcaaccgcgagctggccgatctggaagccgggctcgatgcggcggtggaacggctcaagcccggtggccgcctggcggtgatcagcttccactcgctggaagaccgcatcgtcaagcagtacatgaaccgcctggccaaggcgccgccggccaaccgccggctgcccgaggcggttgcgttcgtgccgacgctggacctgatcggcggcgccatcaaggccaccgacgaagagctggccgccaacccgcgtgcccgcagcgccgtgctgcgcgtggcacagaagcggggggccgatgcatga

SEQ ID NO: 493639 - DNA, 447 bp, Stenotrophomonas maltophilia
gtgttccagggcgagacggccatcacagttgacgacaaagggcgcatggcggttcccaccgcttaccgcgacctcgtcgcgcgcgccagcaacaaccgtctcgtgctgacctacaacccgttcgaagccggctgcctgtggctgtatgcagagtcggaatgggagcgggtccgcgacgatgtgatgtccaagcccaacacccagcgcgtcgtgcgcctgttgcagcagaagctggtcggctcggccgcccatctggaactggacggcaacggtcgcatcagcatccccgccagccaccgcggtgcggtgggcattgagaagaaggcggtattgctcggtatgggcgacaagttcgaattgtggagcgagcaggcgcatcgggccctgatccagcagacgttgtctgacgaggatctgggtgatgggttgctcgacctgaagttgtga

SEQ ID NO: 493640 - DNA, 789 bp, Stenotrophomonas maltophilia
atgtgcctgctcgctcttggctggatgcaccacccgcgctggcggctggtgatgaccggcaaccgtgatgagttccacgcccgcccgacggcggcgctggccccctggcaggatgagacgtccgtcatcggcgggcgcgatctgcgctccggcggtggctgggccggggttggcgcctcgggccggatggcggtggtcaccaacgtccgcgacccgctggcggcccagaccggcccgtcgcggggcgcgctggtggccgacttcctgcgcggccgcgacccggccgctgtgcatatcgaccgattggcgaccgtggctggcgcctatgccccgttcaatctgttgctggccgatagcgacagcctggagtacctcggcaaccatcccgccgaacggcagaccctcggcccgggcgtgcacggcatgtccaacggcgcgctggacgcgccctggccgaagacccggcggctgatggcggcccttgaagcctggcttcagaatgacggggtcagatccctttcgcacagcgaaagggatctgaccccggacctgaccccactctggaatgctctggccgacgaacaccgccctgccgacagcgacctgcccgacaccggcatcggcctggaacgcgagcgctggctgagcccggccttcatccgtggcgatgactacggcacccgcgccagcaccgtgctgctgatcgacgccgacggccatggcgagatccacgaacgccgcttcggcccgcagggcactcccagcggacagagccacgtcattttctga

SEQ ID NO: 493641 - DNA, 480 bp, Stenotrophomonas maltophilia
atgcgtcgcattctcatcctgttcgccacccacctgcttgctctcggcctgggcttcggcctgggcatctatctgctgccgatcctgatcgcccccgatgacccgccggtcacgcaggtgcaggccgcgatgaacgacgccacctatcgcaccaccttccgtcgcgacctcaaaggcagcgacgcggtgcactgggccgaaggcaaggtcagcgtcagcgccacccaggttgccttcgacggcaagatgggaccgggcccggactacaaggtctacctggtccgcgacttcgtcgacaacaaggccgacttcctgaagatcaaggcgcaggcccagcgcatcggcgaggtgaagaccttcaaccgcttcctggtggatgtgcccgcgaacgtggacgtggacgactacaccacggtggtggtgtggtgcgagcgcttctcgcagttcatttccgccgggcagtaccgcacgccgggctga

SEQ ID NO: 493642 - DNA, 819 bp, Stenotrophomonas maltophilia
atgagtgtcccaaccctgtacgtcgtcgccaccccgatcggcaacctggccgatctgagcccgcgcgcgcaggaggtgctgcgttcggtggcggccatctgtgccgaggacacccgccgcagtggccagctgctgtcccatttcggcatccagcaaccactggtggccctgcacgaacacaatgaagaggccctggcgcagcgcctggtctcgcgcctgcaggccggcgagtcgctggcgctggtcagcgatgccggtaccccgctggtcagtgaccccgggttccgcctggtgcgtgccgcgcgcgcggcgggcatcaaggtcagcccggtacccggtgcctgtgccgccatcgccgcgctgagcgtggccggcctgcccagcgaccgtttcagtttcgagggcttcctgccggccaaggccagcggccgccgcgaccgcctgcaggcgctggccggcgaagtgcgcacgatggtgttctacgaatcgtcgcaccgcatcgccgaatcgctggccgacatggcggcgatcttcggtggcgaacgcccggcggtgctggcccgcgagctgaccaagctgttcgagaccgtgctcgatggtgacctggcgggcctgctggccaaggtcgaggccgacgacaaccagcgcaagggcgagttcgtggtgatggtgcagggagcgggtgatgacgaacaagcgcagctggcacatggccgccgcgtctacgcgaagctgagcgagcacctgccaccgtccaccgccgccaaactggccgcggaactgaccggcgcgccgcgcaaggcgttgtacggtagttga

SEQ ID NO: 493643 - DNA, 1722 bp, Stenotrophomonas maltophilia
atgaacaagcccgccgcacggttctccgccctgtcgttgtcgctgatgctgctggccggttgtgccaccaccagcctgaccagcacccccgattcgccggcccagggccaggcgctggcgctgatcgaacagggcaagccgcgcgacgccgcactgcagctggaaggcctagccgccacgctgcgtggcggcgcccgcagcaacgcactggccgacgcggcctgggcctggcacctggccggcgacagtgcccgcgcgcgcagcctgctgggccagctcaccgcccgccagctgtccggcgccagcctgcagcgctaccagctgaccggtgccgagctggcgctggccgacaagcagcctgcgcaggcgctggcgctgctgaaggatcatgccgacagtgttgcggtcggcctgcgcacccgctggctgctggcccgcgcccaggccctgcagggcaccggcgatgccttcggtgccgccaacgagcgcgcccgtgcccatgccggcctgaccggcagcgcgcgcagcgagaaccaggccgccatcgccggcctgctcggcaccctcgacgacgccaccctgcgcagccgtgccgccgcgctgccggccaacgacccgctgtacaacttcgccggccgtgcgctgatcgcgcgcggccttccgctgccgcgcccgttcgaccgcgatggcgcggcccagttcgacaccagcaagcgcccgccggcgatgagcgacggttaccgcccgccggccaagctggccgtgctgctgccgctcagcggccgcctggccaccgccgcgcagccggtgcgcgatggcctgttgagcgcctactacggtgaaagccgccgccgcccggacatcaacttcttcgacaccgccggcaccccggccggtgccctcgccgcctatgacaaggcggtcgcctccggtgccgacttcgtggtcggaccgctgggccgcgacgaagtggacgccgtgtacggccgccagcagctgcaggtgccggtgctggccctgaaccgtggcaaggacgcaccgccggccggcagcgccggtttctcgctggcaccagaagacgacggcatcgtcgccgccgaatacctgcgtggccgcgaacgcaaccgcgcactggtgatcagcagcaatgacgacaccggccgccgttccgccgccgccttcgcgcagcgcttcgcacagcgcggtgggcaggtggtggccaccttcaacgtcagcgatgccgttggcgatgtcggcgcgcaggtgcgcaatgccggccaggtcgatgcggtgttcctcgccgtgcgtgcaccgcaggcccgcctgctggcgccgcagctggcgctggccggtgccggtggcgccacccgcgtcggcacctcgcagctgaccgtcggcagcggcaaggtggaagaagacgtggccctggacggcatcgtctacccgaatgaagcctggaacgtgcgcagcgtgtccggcctgccctcggccagccaggtggccagcaccctgccgagcgcacgcggtgcggccggccgcctgttcgcgttcggcgccgacgcctggaagatcaccgcctatctggacaagctgtccaacgaaggcggcctggacggtgccaccggcaccctgttcctggacagcaacggcaacatcctgcgccagccggcatggtcgaccttcaatggcggccggccgatgccgatcgtcggtggtcgctga

SEQ ID NO: 493644 - DNA, 396 bp, Stenotrophomonas maltophilia
atggcggccggccgatgccgatcgtcggtggtcgctgagcgcagccaacgtggctcggcggtggaagccgccgccgagcagcatctgcaacaggccggactgcagccgcgtgcgcgcaacgtgcgttatcgcggcggtgaactggacctggtgatggacgatgccggcatcgtggtgttcgtggaggtgcgctatcgcgcgcgatcagagtacggtggcggtgccgcttcagtcgatgcgcgcaaatgccggcgcctggcgcatgccgcgcagctgtacctgcaggacaacccgacgctggccaatgcgccctgccgttttgatgtggtcgacgccaccggcgagccgccgcagctgcggtggctgcgtgatgcgttccggctggatgattgctga

SEQ ID NO: 493645 - DNA, 681 bp, Stenotrophomonas maltophilia
atgccttcgatcatcacccatgctgctgtgccgctggcgctgtggtgcgccgctgatcgcggccgcatcccgccgcgcctgctggttgcaggcgtgatcgccgcgatgctgcccgatgccgatgtactggcctttgcgctgcacattccctatgcggatgccttcggccatcgcggtgccagccattcgctgctgtttgccggagtgctggcggcattggcggcggcgttggcgttctttggtagtcgccgaccttggtcggcaccacacagccccggtagtcgccgaccttggtcggagcagcacagctccggtagtcgccgaccttggtcggcggtttcgtgccaactaaggttggcacctaccaaggcagggccaacggtgacatcgaccgtacaagccgctgtattcgtcttcgtctgcgccgccagccatccactgctggatgcgatgacctccggcggcctcggcgtcgcactggcctggccgtggagcgaacaccgcttcttcgcgccgtggcgaccgatccgcgtttcacccttcgccccacagttcttcagcgcacgcggcgtggctaccctgctctccgaactgcgctgggtgtggctgccactggccggcgccgttgtcgcctggaaactgatccaacccgctcctgctgcctctcgagatccgtcatga

SEQ ID NO: 493646 - DNA, 1386 bp, Stenotrophomonas maltophilia
atgagtcctgccctgcctgctgccctggtcgccgaactgtccaccctgctgggcgcggagggctggcgcatggatgacagcgcgctggaggccaacgcgcaggacaattcatggcgccgccagcgtccggcagccgtggcgctgcccgccgacgtcgaacaggttcaggcactggtgcgtgcctgtcgcgcgcatggcgtggcgctggtcgcgcgcggcgccggcaccggcacgaccggtgcagccgtcccgcggccgggcagcatcgtgctgtcgttcacccgcatggaccgcatcatcgagatccgcgccggtgatcgttgcgcggtcgtgcagccgggtgtgctcaatggaaccctgcagcaggccctggccccgcatggcctgttctgggcaccggatccttccagcgccgagatctgcagcatcggcggcaacctcgcctgcaatgccggtggcccgcgcgcggtgaagtacggcaccagccgcgacaatgtactgggcctggtggcggtgaccggcaccggcgaagtggtccgctgcggcggcgcctacaccaaggacgccaccggctacgacctcacccatctactggtgggcagcgaaggcacactggcactgatcgtggaagccacgttgaagctcaccccgttgccggtcagccaggccgggctgcgcgtgctgtaccgcgacgccgatgccgccgccgccgcggtttcccggttgatgtcacagccggtggtgccgacccggctggagttcatggatgcgcgcagcctggagctgctgcggctcaatggtgccgacgtgccagaggccggtgcgatgctgctggtcgaggccgatggtgaccacgacaccctgccctatctgctgcaggccctggccagcgccgccgaaggcgacggcatgatcgaactggacgtggcgatggaaggccgcgcacgcgaccagctgtgggcggcgcgcaaggcgctgtcgcctgcgctgcgcagtgtggcgccgggcaagatcaatgaagatgtagtggtcccggtgtcgcgcattccggagctggtggccggcgtgcaggcgctggcacgtgactacacgctgaccatcgtcaccttcggccatgccggcaacggcaacctgcacgtcaacatcctctaccacccggacgatgccgacgagaacgcacgcgcacatgccgcgctgccaaggatcttcgagctgacgctggcattgggcggcacgttgtcgggcgaacacggcatcggcctggccaagcgcgatttcatggcgcaggccttcaccccggaaacgctggcaacgatgcgcgcgatcaaggccgcgctggacccggacggcatcctcaaccccggtaaggtgctgccgccggcatag

SEQ ID NO: 493647 - DNA, 1968 bp, Stenotrophomonas maltophilia
atgtcccctcccgaacgttcccacaacgccgccatcgatggcctgcgcgcattggcggtgctggccgtcgtcgtcttccacaccaacgcgacgtggctgcccggcggcttcaccggtgtggacctgttcttcgtggtatccggcttcgtgatcagccagtcgctggcctcgcgcgcccaagcatcgctgggtgcgatgctgctcgatttctaccggcgtcgcgtgctgcgcctgttgccggcgctgctggtgatgctgatggccactttcgtactgtcggcactgttcattccccgcgcgtggcgcaatgagcagttcgaccagaccggctgggccgcgctggtcggtttcagcaacatcgtgctggccggccagcaggacgattacttctcgcccggcgctgaactcaatccgttcctgcatacctggacgctgggtgtggaagagcagttctacctggtcttcccgctgttgttcttcgtgtggctgcgcgggcgtgagcgctggccgggggcgcgttggctgttgccggcgctcaccatgctgtcgctggcgtgggcgggctggcaggcgcgatcggcgccggcgtcggcgttctatctgctgccggcgcggttctgggagctggccgcaggtgcgctgctctaccagtggatgcataaacgtacgccacgccagggcagcggcgcggctgccgcggcgggcctggcgctgctggccgcgggtgtgctgatcgccccgcagttggcgatgccggtgccgggcgtgctggcgaccgtggccggtaccctgctgctgttggcgggcgtgtcgacagcggggacatcgcgcatcgcccgtgcgctgggctgcgcaccgctggcctacctgggtcggctgtcctattcgctgtacctgtggcattggccgctgctggtactgctgcgctggacgtatggcctgcatggcgtcgcgctgtggctgtatccggtgctgctgctggcggtgtcggccgcgtcctaccacttcatcgagcgcccgctgcgcagtgcggcgccgctgctgcggctggcaccggccaaggtgctggcgatggcgtttccgctggtggcgctgtgcggtgccggcgcctgggccacggtcgagtaccacgagcaggtctcgctcagcgtcacccgcaacggctacgcatggcaggcgcgtcgctacccggcgtggcgcccgctggaaccggtgagtgcgccggcgcttgaagggcggcgcctgttcgtggccggcgactcgcatgcggcggcgtatcgcaccatgaccagcatggtcgcgcggcagaccggcatggaggtgcgccagcaggatcgcggcggctgcagcttcgtcaacctgctgcgggccagcccggccgactgccaggacttcattgaagacacgctgtcgaccatcgaacgcgaggcgcgcccgggtgacatcgtgctgctggcggccttgcgcatgccggaactgcgtgggttcgactggcagcggcaggatgcacagcagatctatcaacagctgctggccgaacgcacgccgaccaatgcgcaggccgcgcgtgatgaggctggtcgtgttcttgggcgtctgcagaagctgggcgtgcacgtggttgtggatgcaccgttgccgttgttcaaggccggtgcgtaccgctgttcggactggttcaaccgccgcaatccggcgtgtgccggcggtctgagcatgccgcgtgcggatctggaaatgctgcgcgtgccgcagatggcactgctggatgacctggcggcacgttacccgtcaatgaccgtgtgggatccgctgccactgctgtgcgggccgcaggcctgttcggcggtggaagacggcgaaccattgttcttcgacaatgatcacctgagcgggcatggcaaccgcgtgctgctgcccagtttccggcagaccctgatcgatatcgcagccgacaagacggtgtag

SEQ ID NO: 493648 - DNA, 411 bp, Stenotrophomonas maltophilia
atgaccgcttccccttacccgcacctgttcgccaccttgggcgaggccgccacgcgcctgcccgatgacctggcccgcacgctggaagacaccttcgttgcgctgcaaagcggcaacagcgctggcgccatcaccctgcaggcctgcctgcagtacatccgccagggcgatgccgccgatggccagccgtggcccggccacaaccgtacgcctggtcagcggctggcattggcgcgcatcgaccgcgccaatgcggggctgagtttcctgctggagctgctgcacgccaccgaacgcgtacgcgtggacggggatattgatcagcagataggcgatggcgcgcgcgagggcctgctgctggcctgccgtggactggccgagtatgtggatgtgcagttgcgggcagtgtaa

SEQ ID NO: 493649 - DNA, 372 bp, Stenotrophomonas maltophilia
atgcacaagatgatgattccgcttgtccgctacgcacagttcagcggacgcgccagtcgcagtgaattctggtggttccagttgttcgtcgtgatcgtgctgataccgtcgaatgtgctgggcttcattgctggctacaccggttcaagcacgctggcactgatatcgacgggcgtgggcgcattggtgtggctggcgatcatcgtgccgatgattgcagtgaccgtgcgccgcctgcatgacaccgaccgttccggctggtggtacctgctgatgctggtgccgattgtgggcctggtggtgctggtgttcctgctgctacccggcacgccgggcaacaaccgcttcgatgcagcggttccgcacgtgtaa

SEQ ID NO: 493650 - DNA, 963 bp, Stenotrophomonas maltophilia
atgtccctggccgaattcgccctcatcgaccgcatccgcgcccgcaccctcgagcgcgacgacatcctgctcggcatcggtgacgacgccgcgctgctgcagccgcgtgccaacgagcaactggtggtcaccgccgatacgctcaacagcggcgtgcacttcccggttgagacgcctgccttcgacatcggctggaagaccctggcggtcaacctgtcggacctggccgcgatgggcgcgcgcccggcatggtgcacgctggcactgtcactgccggaagcgtctgaagattggatcgaggcctttgccgatggcttcttcgccctggccgaccagcacgacatcgcgctgatcggtggcgacaccacgcgcggtccgctgtcgctgtcggtgaccgcgatgggccaggtcgggcgtggccaggccctgcgtcgcgaccgcgcacaggtgggtgatgacatctgggtcagtggcacgctcggcgatgccgccggtgcgctgcgcctgtggcaacaaggtgcgttgagcatcgccaccgccacgctgctggccgactacgaaagcctgcgcctgcgcctgctgcggccgacaccgcgcgtgaccctcggcctgcgcctgcgggccttcgcgcacgcggcggtggatgtgtccgacggcctgctggccgacctcggtcatatcgccacgcgtagcaacgtggccgcgcatgtggatgccgattcgctgccgatctcgcacgcgctgcgtgagctgctcggccgcgacactgcgcgcgactgcgcactgcgcgggggcgacgactacgaactgtgcttcaccgccgccgccgaccagcgcgaggcactgcactacctcgccgaatcgctggacgtgccgctcacccgcatcggtcggattgccgaagggcagggcgtgcatgtggatggcgaagccgccgacggcggttaccagcacttcgcgtag

SEQ ID NO: 493651 - DNA, 480 bp, Stenotrophomonas maltophilia
atgaacaagaacacccagggcaagccctccggtaaacccgtccgccgcgatggcgtcgatccggtgctgcgctcgcgcgcccgccgtcgtgccgtgcaggccatctacgcctggcagatctccggcggcaacgcacagtcgctgatcgcccagttcgcccacgagcaggcccgtgaaatcgctgacctggcgtacttcgaggcgctgctgcacggcgtgctcgacaaccgtcgtgacatcgatgaagcgctcggcccgtacctggaccgtgacatcgaggaagtggacgcgatcgaacgcgcggtgctgcgcctggccgcctacgagctgcgctaccgcctggacgtgccataccgcgtggtgatcaacgaagcgatcgaatcggccaagcgcttcggttccgaacacggccacacctacgtcaacggcgtgctggatcgtgccgccgtggaatggcgcaaggtcgaatcgggtcactga

SEQ ID NO: 493652 - DNA, 468 bp, Stenotrophomonas maltophilia
atgagccactacgaaggcgatcttcgcactcccgagtcggcgcgcttcgccatcctggccagccgctggaacgcccgcatcaccgacgcgctggtcgcaggcgcgcgcctgagcctggccggcaacggcatcaccgaagccaacatcgacgtgatccgcgtgccgggtgcctgggaactgccgctggtggccgcgcgcctggccgccgcccatgaacacgccgccatcctcaccctgggctgcgtgatccgtggcgacacccgccactacgaacacgtggccgaccgctgcgccgaaggcctgatgcgcgtgcagctggatttcggcgtgccggtgctgaacggcgtgctggcggtggaacgcgttgaagacgccgaggcccgcgcaggcggcagccacggcaacaagggcgaggaagtcgcactcgccgcactggaaatggtcaatctgctggagcaactgccatga

SEQ ID NO: 493653 - DNA, 1101 bp, Stenotrophomonas maltophilia
atgaacttcgccccgattccggaaatcctggaagacatccgcctgggccgcatggtggtcatcgtcgatgacgaagaccgcgagaacgaaggcgacctgatcatggccgccgagctggtcaagccgtcggacatcaacttcatggtcacccacggccgcggcctggtgtgcctgccgctgacccgcagccgcgccgccgacctcggcctggcgccgatggtgcaggccaataccgcccagttccagaccaacttcacggtcagcatcgaggccgccgagggcgtcaccaccggcatttcggcgcatgaccgcgcgcataccatccgcaccgcggtaaagcccaatgccaagccgtcggacctgcaccagccgggccacatcttcccgctgatcgcccagccgggcggcgtgctgacccgcgccggccacaccgaagccggcgtcgacctggccatgctcgccgggctggaaccggccggcgtgctggtggaaatcctgaacccggatggcagcatggcgcgccgcccggagctggaagtgttcgcccgcgagcacggcctgaagatgggctccatcgccgatctgatcgcctaccgcctggccaccgaaaagaccgtcgagcgcgtggacgagcgcgagatcgacaccgaattcggtccgttcaagctggtgacctaccgcgaccgcatcgcccacgacctgcacttcgcgctggttcgtggcacgccggatgcggacaccccgaccctggtacgcgtacaggtggaaaacccgctggccgacctgctgcactggcgccgcgacgacttcggcgtggcggccaccgatgccctgcgcgcgatcaatgccgagggcgccggcgtgatggtggtgctgtcggccccgcgcgacggtgaagccctgctggcccgcctgcgccagcagccggcgccggtggtgccgggcaaggacaaggatgtgggccagtggcgccgcaacggtgccggcgcacagatcctgtccgacctgggcctgggcaagctgcgggtgctgggcaccccgcgccgccaggttggcctggccggttacggcctggaagtggtggagacggtcaccctgtaa

SEQ ID NO: 493654 - DNA, 627 bp, Stenotrophomonas maltophilia
ttgtttactggaatcatcgaaggcgtcggccgtctggctgcacgcgaatccatcggcggcgatgtccgcttcaccttccacgtcgggaatctgccgttcgaccacgtgcagatgggcgagagcatcgccatcaacggcgtctgcctcaccgtcatcgcgttcgacgccagcagcttccaggccgatgcctccaccgagaccctgggcctgaccacgctgggccagttgggcgaaggggcggtcatcaatctggagcgcgccatgcgcccgaccgaccgcctgggcggccatctggtcagcggccacgtcgacggcctcggccaggtgctgtccatccatgacgacgcgcgggcccagcgctggcgtttcgccgcgccggcctcgctgcgccgctatatcgccaagaagggctcgatctgcgttgacggcgtcagcctcaccgtcaacgaagtggacgacgacggttttgaagtcgccctgatcccgcacaccgtggccaacaccgccttctccgccaccggcgtgggcagcgcggtcaatctggaaatcgatctggtggcccgttacgtcgagcgattgatgggtgtgccgagcaacggtcagcacccacagggagacgcagcatga

SEQ ID NO: 493655 - DNA, 621 bp, Stenotrophomonas maltophilia
atgcgcaagatcctgatcgtggccgccctgctggccgctgctccgttctcggcttcggccgacgccctgagctacacctacgtggaaggcggctggacccaggtccaggttgacgacaacgtgctggacgacccgaaggtcgacggtggctacctgcgcggctcggtcgcgctggccgagcaggtctacgtgttcggtggctggtcgcgcaccagcaagacccgccactacggcgaagactcgctgaagctggaactgaaccagccggagctgggtatcggctaccacatgccgtggaccgaccgcctggacttcaccgccgatgccgcctgggtgcgccagaacgctgaatcgaccctgcgctacgacggcgtgcgttaccacggcaaggaccacaccaacctgggccgcgtcaccatgggtatccgcggcaagccgtcgcgcatgaccgaagcctgggccaaggccggttacatggatggcggcaacaactacaagggcacctgggtcggtaccgtcggcggccaggtcaacttcaccaagacctggggtgtagtgggcgagatcgccggctaccgcgacgtcacccagtactcggtcggcgtccgcgccagcttctga

SEQ ID NO: 493656 - DNA, 885 bp, Stenotrophomonas maltophilia
atgaagactcccttgcgtgccctgctggccagcgccctgctggcggccccgctgctggccggcgcagcccccgccacgctgacgcccgaacaggctttcgacctgtacgcacgcgtgctgctggaagatgacgccgcggcgacccgcgcgctcaacgatgcgctgaagccggcgttcgaaggccaggacgcggtgaccccgaacccgggtgcgctggccaaggcgctggccgaaccgtggcaggtcgtactagccagcaccggcgcaaaggccgacgcggccgccaccgaagcgctgtatgccaaggccctgcgtgattcgaagtgccgcgccagcaagagcgtgattgaagacaacgagtacgtggaagaccagaagctggcgcgcatcactttcagctgccaggtgcccgacctcggcaaggtgcgcccgctgttcgccgccagccttgcagccgacgccagcccggccgcgcgcaagcagttcaccgacgcctacacccaggcgctgcagagcggtgcgcgcgtgccggtcagcggcaccttcaccctgtacccggccaaggacaacggctactggtacagcggcaacttcgacgatctggtgggtaccgtgaccggcgcgctggcaccgttcgaggactgggtgcaggacgcgcaggcggccagcgcaccgaaggtgaccggcgtacccggctgtgacctgctgctgcagcagcaccgcgcctgcgtggcgaagatcgcgccggaccagatcagtggcgtggatgccatgaccgaggaactgaaggccaaggcgaaggtgaagtcagccgaagacatgacgcaggaatgcaaggcactgcgcccgatcgccgagatgatgtggaccgacgaatgcgcgtaa

SEQ ID NO: 493657 - DNA, 390 bp, Stenotrophomonas maltophilia
atgaaacactgtatgacgtcgaccgcgctcatgttgctggcgctgatggtgtgctggcaggccgaagcgtccaggttcaaagccacgaagatcatcgtcgtccaaccctcggtcgccttcgagtcaacgcagctgagcgataggcacctggatgcgtggatgagcaatgacgaccactgccgcgatttcctgatgtatcacgatcagtgtgccgtgctggtactgccggatgagtacgacgacggttttacgcgtcgccagttgcggttcaaggcgaggcaactgccgggcgaggcgctcggcgcgtactgccgcgacctgcatgtgctgtggaagcagcagtggaaaggccaatgccccgttggcgaagaagacgacgaagcggcctga

SEQ ID NO: 493658 - DNA, 1086 bp, Stenotrophomonas maltophilia
atgaccacttcgttctccgtcctcgaccacctgcacatggccaacgcgctgcgcctggccgagcgcgctgcctataccacccgccccaacccgatggtcggctgcgtgatcgcccatggcgaacgcgtggtcgggcagggctggcaccagcgcgccggtggcccgcatgcggaagtgttcgccctgcgcgaggccggcagcgaagcacgcggtgccaccgcctacgtcaccctggaaccctgcgcccactacgggcgcacgccaccgtgtgcgctggccttgatcgaagccggcgtgtcgcgcgtggtcgcggcgatgcgtgatccgttcccgaaggtcgatggcggtgggttcgatctgctgcgcaatgccggcatcgacgtcgccgaagggctgatggcggtgcaggcgcgcgagctcaacaagggcttcctgtcgcgcgtggagcgcaatcggccgtggttgcgggtgaagctggccgccagcctggatggccgtaccgcgatggccgatggcagttccaagtggatcaccgggccggccgcgcgcgaggacgtgcagcactggcgcgcgcgcgccggtgcgatcctgaccggcgccgacacggtgctggccgacgacccgatgctgaccgtgcgcctggccgataccgaagtgatggcgccactgcgtgtggtgctggattcgcgcctgcgctcgctcgaatgcagccgcgtgcgcgagggcggggcaccgacgctgtacctgcacgctgcggcggtgagcgcgccggatgcggccgatgccgaattcgccagcgtgcatggcgttgatgggcggttggacctgggcgcggtgctggcgctgctggccgagcgcggtatcaacgaggtgcataccgaagccggcgcgacgctgtccggtgcgctgctgcgcggcggctgggtcgatgagcttctgctctatcaggcgcccacgctgctgggcgacaacggccgcccgctgctggctggcctcggcatcgatgccatggaccagcagcgtcgcctgcgcgtggtcgaccagcggcaggtgggcgaggacatccggctgctgctgcgcccatga

SEQ ID NO: 493659 - DNA, 522 bp, Stenotrophomonas maltophilia
atgcactgccccttctgccaacatgccgatacccgggtcatcgactcgcgcgtctctgaagacggcgcgacgatccgtcgtcggcgtgaatgtgaagcctgcggcgagcgcttcagcaccctggaaacggtcgaactgaagctgccggccatcgtcaagagcgatggcacccgcgaggcgttcgaccagcgcaaggtccgcgctggcttcgaccgcgcgctgcagaagcgtgcggtggccgaagacaagatcgaagcagcggtgcgtgcggtggttcaccagctgcgcatcagcggcgagcgcgaagtgccctcgatcaaggtcggcgagttcgtgatgaacgaactgcgcaagctcgatcatgtcggctacgtgcgcttcgcttcggtctaccgcagcttcgaggacgtggccgatttccgcgaggagatcgagaagctcgagcgcgacctgccgtccagtaccgaacaactgcagctgctgggcgatgtgatcgccctgaccaagaagaagaagggctga

SEQ ID NO: 493660 - DNA, 450 bp, Stenotrophomonas maltophilia
atggatgagcgtctgcacaaacgctggatggcgatcgccggcctgctggtgggcctgcccaccgtggcggcaggcggcacgggtgccgtgctggggctgatggtcgtatgggacggcaagtacctgacgggcgacgagcacacgtggttgctgctgtggtcgtcggctggaatcatcggcctgctgtcgtggttgtggctgagcggcctgttcctgtggcgcggtgttgccggcctgcgccaatcaccggttgtcgcctgggtcggccttgcgctgggggtgctggccgcgttggccgtggtcgccgccgcgttgtacttcaccttcaagcatggggaaatctcgaccctggccttccttgggttcggcccgccgctgctggtgatggccgggcacctggcgtggctgcgctgggcacgcgcggccccggtgccgtcggcacctggttga

SEQ ID NO: 493661 - DNA, 420 bp, Stenotrophomonas maltophilia
atggatgagcgccacctcaagtacctgtacaccgcgctggcggtgctgtttggcctgcccagcctggtgatgggcggcgcggcggcgacgatgctgctgctgatggggctgggccagttcggtcatggcacgctggcctcggtgacggtgatgccgctgtggggcctggccggcattgccggctgcctggcctggttgtggctcagcgcgggttttctgctgcaggggcgtgccgggctgcacgtgcaccgcctctggtggtggatgctgctggcgggcggtctcgccgccttgctcccgctggggctggcgctgtggtggggcatcgccgtgcatgccgaaggcatcggcttgttgctgctgggcccgtcgatgctggtgccggctgcgatgctggtgtggatcaaacgccgcgcatga

SEQ ID NO: 493662 - DNA, 1254 bp, Stenotrophomonas maltophilia
atgttcccgcgtgacgtccgcatcgaatcctacgatcccgaactggccaaggccatcgccgctgagacccagcgccaggaagaccacgtcgagctgatcgccagcgagaactacaccagcccggcggtgatggaagcccagggcagccagctgaccaacaagtacgccgaaggctacccgggcaagcgctactacggtggctgcgaatacgtggacatcgccgagcagctggcgatcgaccgcctgaagcagctgttcgatgcggactatgccaacgtgcagccgcacagcggttcgcaggccaaccaggccgtgtacttcgccctgctgcagccgggtgacaccatcctcggcatgagcctggcccacggtggccacctcacccacggcgccaaggtcaatgcctcgggcaagctgttcaacgccgtgcagtacggcgtcaacgaccagggcctgatcgattacgacgaagtcgagcgcctggccctggagcacaagccgaagatggtcgtggccggcttctcggcctactcgcaggtgatcgactgggcgcgcttccgcgccatcgccgacaaggtcggcgcctacctgttcgtcgacatggcccacgtcgccggcctggtcgccgcaggcgtctacccgagcccgctggaacacgcccacgtggtcacctccaccacccacaagaccctgcgcggcccgcgcggcggcatcatcatcgccaagggcgccgacgaagacctggtcaagaagctgcagtcgatcgtgttcccgggcatccagggcggtccgctgatgcacgtcatcgccggcaaggccgtggccttcaaggaagcgctggagccgggcttcaaggcctaccagcagcaggtggtgaagaacgcccaggcgatggccaacacgctgatcgcgcgtggctacaagatcgtctccggcggcacccagaaccacctgatgctggtggacatgatcggcaaggacgtgtccggcaaggacgcggaagccgcgctgggcaaggcccacatcaccgtcaacaagaactcggtgccgaacgacccgcgttcgccgttcgtgacctcgggcctgcgcctgggtaccccggcggtgaccacccgtggctacgtcgaacaggactgcgtggatctggccaactggatcgccgacgtgctcgacgcaccgaacgatgacgcggtcatcgcccgcgtgcgcgacgccgtcagcgcgcagtgccgcaagtacccggtctacggctga

SEQ ID NO: 493663 - DNA, 414 bp, Stenotrophomonas maltophilia
gtgaccccggccttcgccgacaacgaccatcgccgcgaccacgaccgccgcgaatggcgcgaggatcgccgtgagtggcgccaggaccgccgcgactgggagcgcgaccgccgcgaggcccggcgcgactgggaacgcgaccgccgcgactggcaccgtgaccatgatcgctactaccgcccggcaccgccgcgcgtggtctatcgcccggcctatggcccgggctatggctggaaggtcggccaccgctaccgcgactactaccgcggcccggtctacgtggtgaacgactacccgcgctacaacctgcgccgcccgccgtacggccatcagtggatccgggatgatcgcggcaacatgctgctggtggccatcgccaccggtgtgatcgcccagtacgtgctcagtcgctga

SEQ ID NO: 493664 - DNA, 1665 bp, Stenotrophomonas maltophilia
atgtcctcgcaatacatctacaccatgaaccgcgtgtccaaggtggtcccgcccaagcggcagatcatcaaggacatttccctgtccttcttcccgggcgcgaagatcggcctgctgggcctgaacggcgccggcaagtccaccgtgctgaagatcatggccggcgtggacaccgatttcgagggtgaagcccgcccgcagcccggcatcaaggtcggttacctggcgcaggaaccggaactggacccgaacaagaccgtgcgcgagtcggtcgaggaaggcgtgggcgaagtgctgcaggcccaggccgcgctggaggcggtgtacgccgcctacgccgaggaaggcgccgacttcgacgcgctggccaaggaacaggagcgcctcgaggcgatcctggccgccggcgacgcgcacaccctggaaaaccagctggacgtggctgccgatgcgctgcgcctgccgccgtgggatgccaagatcgccaacctgtccggcggtgaaaagcgccgcgtcgcactgtgccgcctgctgctgcagaagccggacatgctgctgctcgacgaaccgaccaaccacctcgacgccgagtcggtggaatggctggaacagttcctggcgcgctataccggcaccgtggtggcggtcacccacgatcgctacttcctggacaacgccgccgagtggatcctggaactggaccgcggccgcggcattccgtggaagggcaactacaccgaatggctggtgcagaaggatgagcgcctgaagcaggaagagaaccaggaaaaggcccgccagaaggcgatccagaaggaactggagtggtcgcgccagaacgccaagggcggccgctccaagggcaaggcccgtctggcccgcctggaagagctgcagtcgcaggattaccagaagcgcaacgagaccaacgaaatcttcatcccgccgggcgagcgcctgggcaacatggtgatggagttcaagaacgtctccaagaagttcggcgaccgcctgctgatcgacaacctgtcgatgctgattccgccgggcgcgatcgtcggcatcatcggcccgaacggcgccggcaagtcgacgctgttcaagatgatcaccggccaggagaagccggattcgggcgagatcgtgatcggcccgaccgtgcagctgtcctacgtggaccagagccgcgacaagctggaaggcaaccacaacgtcttccaggaaatcgccggtggcctggacatcctcaacatcaacggcatcgagatccagtcgcgcgcctacatcggccgcttcaacttcaagggccaggaccagcagaagatggtcggctcgctgtccggtggtgagcgtggccgcctgcacatggccaagaccctgctgcagggcggcaacgtgctgctgctcgacgaaccgtccaacgacctggacatcgaaacgctgcgtgcgctggaagacgcgctgctggagttcccgggcaacaccttcgtgatctcgcacgaccgctggttcctggaccgcatcgccacgcacatcatcgctttcgaaggcgactcgcacgtggagttcttccagggcaactaccgcgagtacgaggaagacaagaagcgtcgcatgggcgacgatgccgcgccgaagcgcctgcgcttcaaggcgctgaagtaa

SEQ ID NO: 493665 - DNA, 1317 bp, Stenotrophomonas maltophilia
atgtccctgttcgaacgcctgttccagctgcagcagcacggcaccaccgtgcgcaccgagctgctggccggtgtcaccaccttcctgacgatgtcctacatcgtcttcgtcaacccggaaatcctcggcaccaccggcatggatgcgggtgcggtgttcgtggccacctgcctggccgctgcgctgggttcggcggtgatggcgctggcggccaacttcccggtcggcatggcaccgggcatgggcctgaacgcgttcttcgccttcaccgtggtcggtgccgccggcctgccgtggcagcaggcactgggcgcggtattcatctccggcctggtgttcctggtgctgtcgctgaccggtgtgcgggcgtggctggtgtcgggcattccttcgtcgctgcgctcggcgatcgtggccggcatcggcctgttcctggcgatcatcgcgctgcagaagtccggcgtgatcgtcggcaatgaagacacgctggtggcgctgggcccgttgaatacggcgccgccgctgctggcactggccggcttcctgctgatcgcggtgctggaagcgcgccgtatccgtggcgcgatcctgatcgggatcctggcggtgaccggcgcgggctgggcattgggcgacgtgcagtaccagggcctggtctcgctgccgccgagcctggcgccgaccttcctgcagctggacctgccgggcctgctgcaccacaacggtggcgcgccgatcgccgtgttgctgcaggtggtgctggtgttcgtgctggtggaagtgttcgatgccaccggcaccctgtatggcgtggtcggtcgcgccggactgctgaaactgccgggcgcgcagaagcgtttcggccgcgcgctgctggccgacagcacggcgatcgtggccggttcgctgctgggcaccagcagcactaccgcgttcgctgaaagcgcctcgggcgtgcaggtgggcggccgcaccggcctgactgcactggtggtgtcggcactgttcctggccgcactgctgttctcgccgctggcggcgatggtgcccggctatgccaccgcaccggcgctgctgttcgtggccggcctgatgctgcgcgaactggtggacgtggactggagcgacctgaccgaatcggtgccggccgcactgtgtgccctggcgatgccgttcacctactccatcgctaatggcctggcgtttggcttcatcgcgtatgcggcgctgaaggccggcaccggccgctggcgcgaagtgcatccggcggtgtggctggtggcggtgctgttcgcgctgcgctacgcgttggaataa

SEQ ID NO: 493666 - DNA, 1005 bp, Stenotrophomonas maltophilia
atggttcggcccgaccttcccacggatccgtcttcgccgttgcgccgccggttgctgcgcgcggcagtgctggcgccgttggccgctacgctcgccaccctgcccggctgttcgctgccggtgcaggtggatggcaccttcctgcagccctggcgcagccatctgcagtggggcccggccgactggcaacgttcgttgaagcttgcccacgcgctgggctgccggcagctggtgctgcagtggaccggcatcgtcggtggcagcgatggcgactggtcgctgccggacagcaacctgcagcagctgttcaccgccgccagcgagaacgacatccgcatccgcgttggcctgcccttccagcaacgctggtggcaggccatcggcgccgacgacgccacgctgcaggcgttcctggccgacagcctggcgcacgcgcgcagctggttggcacaggcgccgtgggcgcagcagcccgccttcggcggctggtacctgccctacgaactggagcagttccactgggccgatccggcccgccagcaatggctggcgcagtggctgcacgggctggcgcaggccgccagcgcgcgcggcggtgactgtgcgatctcctgctacttcagccgcctgcagaccgacggcgacctggtcgcgctgtggcaggcggtgctggcacgggccgcgctgcggccgatggtgcaggacggcgtgggggtggccggcgccggcaacgtgcagcagctgcaaccgctgctcggccatttccgggcacagggcatcgggttcgatgcgatcgtcgaactgttccgcgaactgcccggcagccccgccgacggcagcgcgttcaagggcgaaaccgcagatgccgcgcgcatccagcggcagctggcgtgggcgcacgacagcggtgcgcagcacgtgctggtctatgcactggagccgtggctgacccaggacacgccgcaggccgcggcgctgcgacgacgttggggcctgcctcagtag

SEQ ID NO: 493667 - DNA, 2835 bp, Stenotrophomonas maltophilia
atgaagaccacgctgctgtcctccgtcattgccgtggcactggccacggcggccgcgccggtgctggcccaggccgatgcagcactgccgttgtccggtgcggcctaccgcgtcgccgagcaggcgtttgccgcctatgagcgcggtgactacccggcggcttaccggcagtccaccgaagcgatccggctgcgcccggacgtggtgcggctgcgcctgttgcagatctacgcgctgcagaaactgggccggccggcggaggcccagcagcaggcacgtcgtgcactggatgcggggttgaaggatccggcgttgccggcgctggccgctgccaccgctgcgcgcagcacgcctccggatgccaagagcgggcgcgcaccctccccaccgcgcgtggctggcagcggcgcagaccgcgccaggcagcaggcctacgcgctggccaccgaggcctacgccgcttatgacgccgggcggatgggagaggcagccagcaaggccgagcaggccttccggcagcagccaacgcagggcgcctgggcgatgctgtgggtggccgcgctggaggcacagcagcagcccgaacaggccgacgccgccattgccaccgcgctgcagctgggcgcgccgaatgtcgaggcattgcgcgcacagcgcgtggcgctggatcgacagcgcgcgctgctgcaggcccagcaggcgtaccggtcgctgtccacgcaggatgatgcggcggccgttgcgcaggcacgtgccgctgtcgagctggcaccggaggtggcgacgtaccggttgctgctgattaccgcgcagctgcagcaggggcagctggccgacgccgagcgcagtgccgaccaggcgttgcaggccgacggccaggatctcaatgcgcgggtgatgcgcggctacctgcgccagcgccagggcaacagcctgctcgccaacgaggacttcgacgccgcgctcgccatgccgggctcaacgacgcagcagcgcaacgtgcgcctgctggcggtggatgcggccctggccgctggggatcgcgcacgtgcggctgcactgctggcgccgctgcgcgcggcattgccagcagatgccagcgatgcacgcgcgcagcagctgctgcagcagggcatcgagcagcgcgccaaggcggtccgttccagtcgcgagcgtccgcgcatgagcgcgcagacctatccggcgccgttccagcactgccagtctggcgacagcggcaaccgttgcgagttgatgccggccgacctgcagggcgacggtggcgccgcgcagcgtgcctacgcggcctacgcgcggcaggactacgccgaggccatcggcgaggcgcggcaggccgtgcagctcgcaccggaggacgcgagcctgcaggggctgctgaccaccacgctggcggcaggcaaccgcagccagcaggacgaagcacggcagcgtctggatgcggcgctggcacagcgccctgacgatgcggaggcgctgatgcagcgcggctacctcaaccagaaggcgcacgagccggcgcgcgcactggccgacttccgtgccgccgaggcgaccggcagggcaccaaagggcgtggtgcttgaccaggcctacgccagcgcggccaacggcgatcacccgcaggcggtgaccctgctgcggacggccattgatcgtgccgatgccggcgagctgccactggatgcgcaccagcgctacaacgtgcgcaatgccatcgccaactattcgcgcgagtggggcgtgatcgcctcggccggcttccgtggcgcgcgccaggcggcgaccaatgtcggcggcgcggcgatcagtacgccgggtgattcggtgttcagcacgcttgaagcgttctggcgcccgccggctttcaatgaccagcacggcgcgctggagctttacgcgcggctgctcaacaccctgtacgaccagggtggcacctacgagtcgctccgcgccgtggacccgtgcaccggcgaatcgacgcccgatgcacgcgcacgcgccgaacggctcagccgctcgcgttccaccaccggctggccgtccaccatcgcctcgttcggcctgcgctacgccttcggccagaccggcctgagcgccggcatcgagcgtcgccagttcctcggcagcgccacccgcacgggcgatgtctaccccgcttcggcggccgtgcaatgcagcctgcagctggcccgcaacccgccactggaagccagcacactggcccgctaccgcctggccagcggttccggtggctggatgtcctacctgacctacggctattaccacggcaccgacctgcgcaccgacgtgaatcagtggtggatggtcagtggctacgcgcagggcggttacacgtgggatgacaacagcgcgcatttcaccctcgacgcactcgatgccaatggcacgccggtgcgccgggtgggcgatgccaacgggcgcctgcatcgcgaacagtggttcgctgccggtgaactgcgtgccggccgcagcttccgctttggtgccgggcagacccactgggtggtcacgccgtatgtggtggtgggggcggactggctggaccagcgctcgcgcgtgcgcgacatccgctacccgctgttcccggcgcagtcgttcgcactcaacgatacgcagcgcagctggtcactcggcgcagggccgggcgtgggcgtgcgctactggttccgcgaagaccactacaacacgccgcgttcctacctggacctgaccgtgcagtaccgcttcgcgatcggcggcggtgatacgcagcgcgccaagggcctgttcgccaccgccatcctctcctactga

SEQ ID NO: 493668 - DNA, 2148 bp, Stenotrophomonas maltophilia
gtggacggtctgttctggaacatccagctggccaactactacgccgccctggaaaccacggcggcggcggtggccgtgctgatcctgatctccagcctcgatgacctgttcatcgatgtctggtactgggtacgcgagagctggcgcgcgctcacgatcaagcgccgcgatgcctaccggccgctgacccaggacgacctgctgcagcgcccgcagcagccgctggcgatcatggtgccggcgtggatggagtacgacgtcatcgcgcagatggtggagaacatgatcaacgtgctcgattaccgcgagtacgtcgtgttcgtcggcacctatcccaacgaccagcagaccatcgatgaggtcgagcgcatgcgtcgccgctacaagcgcctgcgccgcgtggaagtgccgcacgacgggccgaccagcaaggccgactgcctgaactggctgatcctggcgatcttcgactacgagaagcgccacgacatcgagttcgccggggtgatcctgcacgatagcgaggacgtgctgcatccgatggaactgcgcttctacaactacctgctgccgcgcaaggacatgatccagctgccggtcacctcgctggaccgcgagtggtatgagctggttgccggtgtctacatggacgaattcgccgaatggcacgccaaggatctggtcgtgcgtgaaagtgtttccggcatggtgccatcggcgggcgtcggtacctgcttctcgcggcgcgcgctgctggcgctgagcgcgcagaccgacaaccagcccttcaacaccgacagcctcaccgaggactatgacgtcggtgcgcggctggcggcgatgggcatgcagtcgatcttcgcccgcttcccggtgcagttccgcgtgcgtcgcccgtcctggttcggctgggggccggtgcgcgagcgcacccagcagatggcgctgtgcgtgcgcgagtacttccccgacaacttccgtgcctcgtaccggcagaaggcgcgctgggtgctgggcatcggcctgcagagctgggagtcgctgggctggcgcggctcgctggccaccaagtacctgctggcgcgcgaccgcaagggcatcatcacctcgttcgtcagcatcattgcctacctcatcttcctgcagctgctgctgttctggctgctgaagatgtccggggtgtggacgatgcagttccccagcgtgttccaggccggtacctggcagatgaacgtcgcgctgctgaccaccgccgcgctggccacccgcgtcgtgcagcgcttctacttcgtcaaccggctgtacggctgggagcatgccttgatgtcgatcccgcggatggtggtcggcaacatgatcaatttcatggccaccgcgcgtgcgtggaaggtgttcctggcttacctgctgttcggcaagcgcatggtctgggacaagaccatgcacgacttcccggatgcggcgcagctggtgcagacgcgcaagcagctcggcgagctgttgaccacctggcaggcggtggagccggagcgcctgcagcaggcgctggaccagcagcatgccggccggcagcagccactgggccgcatcctgctcacccaggggtggctggatgatgaaacgctggccgaggcgatcgccttccagggcgacctgcctcgtgcggtgattgacgtggactacctgcgcgcctgccacttcccggtcagtgccgatgcctgcgtgcaatggcgcatgttgccgctgccaccgcgccagcagggcaccctgcggctggccgtggccagcccattgcccgaagaagcgttggcactgctgaagcaggaaacccgcagcgagcacatcgaacagagcattgcccgcgaaagcgaaatcaacgcaggcctgcgcctgatcggcggcgaccggcactggcagctggacaacgtgcccctgctgggcgacctgctggtggagatgcgcctgatcgaccacgcgcgcttcgagatcgcattggacgcgtacaagccgcagcgcgacggccgcatcggcgattacctggtcaagcagggcatcaccaccgaagacgccgtggcccaggccatgcaggaacagcgccggcgtgcggccgcgctgcagtcgccgcctcccggagccttgccggcatga

SEQ ID NO: 493669 - DNA, 2202 bp, Stenotrophomonas maltophilia
atgacccagaccggccgctcttccctgtttgcatccgccgctgcgttcgtcctgtcgggcgtggttggcagtgcccatgccgccgacagcgtcgccggccagttcaccgaatggagcagcgacagcacggtgcaccggcagatgaccctgcgcgaactcggtttccgccagccactggtgctgagcgggcaggagagccagcgcgaggtctacctgccggtgccggccggtgtggccacccgcgacgcgcagctgcagctggatgggcgctatgtgcgcggccacgccgggcgcacctcgggcctgtggtcggtcgatggcgacccgatcgcggcgcgttcgatcaccgatgcccagggcgatgccagccagctgctggccatcgatggcgaaccccgccagagcggcttcgtacgggtcggcgtcggctggtggtcgatcgtgtccgattaccagtgcgccgaccagagcgcgccggccaatgtgctgcggctgtcgccggactcgcgtttcagctaccgcttcgacggccgcgccgtggataccgttgccaaggcgtggggggcgctgccaccgcgggtgcgcctgctggtggatggcaaggcgctgcaggcaccggcctacgatgcggcctggcgcatcggtaccgcgttgcaggccgggggcaaagaggtgcaggtggtggccctgcccaaggtcggtgacagcgttgacctggccggtatcagcatcccggccagcctgcagggcgtgccggcctacgccgcgctggccacgggtgagcgcgcgcatgcgatcagggatctggccgaagtcggcgcgctgctgtcattgcgcgacagcgggccgttggccgccgatgtgatgatcggcagcgatgcactgcgcgccggcgtgcgtgcggcgctggatgcgctggccgtacaggtcggcgcggcgggggccgatgcgggcaccgcgttcgccgcgtggcgcggtaccggcatgggcggcctggaaaagcccgccgccaacgcgtcggtcagcgtggtggccgtggccgggcgtccgacgctggtggtcgacccggcggcggcgggcaaggtcgccgggctgctcgccgagcagtggcgcagctatgcactgggccgcagcctgcaggtcagcgcagcgggcacgcccagactggatggtgaccaggtactgctgagccggctcggcaacatcgtcggcaccatggatgtggtgacccgcgccgaccgcagcgccagcttcgacctcggcgcactgtcggccgatggccgcctgcccgagcaggtggtgatcgatgtctcggcggcccccaacgcggccgggcagggcgcggtcgccacgatctacctcaacgattacctgctgggtggcaaggtgctgtcggccaacggccagccgcagcggctggtggccagggtgccggcctacgcgctgtcggcacgcaacgagatccgcgtcagcttcctgcgccagccggcacgcccctattgccacgatccggccaccgcgtatccggtctcgatcctgcccagcagccacctgaccctggccaaacgttcgctgggcagtgacttcgtcggtgccagcagccagctgtcacgcggcaaccagatgttcgtgcccgctacgtggctgcaggacgcgccggcatcgctgcgcaaggtgatcgcggtggccagtgcagtgggggcctcgccagaggcatcggaactgaaggtggtcgaagccggtgccgtggtcagcccgggcgcgccgtggctggcgttcggcgtggcgccatccggtgtcgatgtggccggcctgaaggatggccacctgctgatcggcggcaagccgcaaccgctgttggatgtgagcgggctggatcgtgccgcggtggtgcaggtggggtcgtccggtggccagctgggcgttgtttacagcgacctcggtgcgcagtcaccgccgttcggcgccccattccgtttgctgcggggcgatctcgccgtgctcgacggcagtgatgccgtgcgcgaattcgaccgccaggatccctacggcacgcgtatcgcgcaggacggcaacccgcaatcgaagtgggaacggcacatggtctggctgctgctgctggtcggcgtgatcgtgttcgcgctgctggccgcccgcgtcacccaggtgcgtcgccgcaagtccgccaacacagggcactga

SEQ ID NO: 493670 - DNA, 1176 bp, Stenotrophomonas maltophilia
gtgaaggtcctgtcggtgttcggcacgcgaccggaagccatcaagatggggccgctggtgcgcgccctggcacacgctgcggatatcgaatcggtggtctgcatcaccgggcagcaccgggcgatgctcgaccaggtgatggcgctgttcgagatcaccgccgaccatgacctcgatgtcatggtgcccaaccagaccctcaatggcctgtgttccaggctgttcgaacggcttgacgcgctctacacgcaggtccgccccgactacgtgctggtgcatggcgataccaccacggcgatgaccgcggccctggccgcgttccatcaccgcatcccgatcggccatgtcgaggccggcctgcgcaccggcgacatccaccggccgtggccggaggagatgaaccggcgggtgatcgatgtggtcggccatcagttgtatgcacccactcccggctcgcgcgccaacctggcccgtgagcacctgggcgggcagatcctggtcaccggcaacaccgtcatcgatgccctgcagcagaccgtgcagcggctggatgccgatccggcactgcgtgcgcaggccgacgaacccttccatatgctcgaccccggccgccggctgctgctggtcaccggccatcgccgcgagagtttcggccagggcttcgaggacatctgccgtgcgctggccgagctggcacggcggccggacctgcaggtgctgtacccggtgcacctcaacccgaacgtgcagggcccggtcaatgcccacctcggcaacctcgacaacgtgcacctggtgccaccgcaggattacctccgcttcgtgcgcctgatgcagcgcgccgacgtcatcctcaccgactccggtggcgtgcaggaagaagccccggcgctggccaaaccggtgctggtgatgcgcgatgtcaccgaacggccggaggcggtcgaagccggtgtggtcacgctggtcggcaccacgccctcgcgcatcgtcgatgcggtcaacgcggtgttggcacgccccccgcagccggcccgcttcgaccccgatgccagcccgtacggggatggccgcgccagcgcccgcatcgtcgccgccctgcgcggtgcgccccttcccgaattctcgcccggcgtccgcagcagcggcgccgtccaccccatccacgcgaagtga

SEQ ID NO: 493671 - DNA, 1038 bp, Stenotrophomonas maltophilia
atgccgatgatttcttcccgtggccgccaggcgctggccgcgctggccgtactgggcggcgtgctgctggcgcagcaggccagcgccgcctgccgcatccagaacagctggttcatcgcccaggacgtgaccatggacatgggccagatcgtgatcctgcccagcaccccggtcggcggtgtgatcaaggaaatcagtgaaccgatcacccagcagaacagcgttgcccgctgcgattcctggaccggcggtcgttcgatcggtgagtacgtcaacgcagcgcagaagcgccccgtggccggcttctcgaacgtctatgaaaccgatgtggcaggcgtcggcatccgcctgtaccgcgattcgggtgcgatccagacctactacccgcactcgatcaacttcggtggcggttccgtggtcagcctcatcggtggccagttccgcatccagctgatcaagaccgctgcgcagaccggttcgggcgtgatcgcgccgaacggccgcttcaccaactactacttcgacggcgatggccccgggcgcccggtactgacctcgacgttcaagggctcgggcaccaccgtggtcagcccgacctgtgaagtgcaggccggcagccgcaacattgccgtcgatttcggcagcgtgcccaacaccaccttcactggtgtcggctccaaggccgttgatcgcgacttcgaaatccgcctgaactgccagggcagcaacgttgccgcctaccagagcaagatcggcatccgcctcgatgccgaccaggacagctcgaacatgccgggcgtgctgaagctgagcgcggccagcaacagtgccacccgcatcggcatccagatggtccagcgcgatggcagcaccgagcgtgaagtgcgcttcggccagaccatcagcgttggcaccaccgcgccgggtaccagcgtcatggcgctgccgctgcgcgcgcgctacgtgcagacccaggccggtacggtgggcgcgggtgtcgcaaacggccaggccacgttcaccatccagtacgagtaa

SEQ ID NO: 493672 - DNA, 2586 bp, Stenotrophomonas maltophilia
gtgatcggaaacagattgacattgtcgatccaccaggcgatctgcctgctggttgctggcgtggcctgcccaggatgggcgctggctgcgccggccaatctcggcgaacaggcgctgatggcgcagagcggtgcggccaatgcgcgtgcacccgagtcggcccagttcaactccagcttcctctccggccaggccaagcaggtcgacctggcctccttcaccaatggcaacccgatggtggctggcacctaccgtgtcgacgtctacgtcaacggtggctggcagggccgtcgcgatctgcagttcaaggccgatgagcagggccgcgtcgacgcctgcctgccgctgccgatgctggaagaaatgggtgtggacagcgaggccgtgctgctgcagcaggacccgacgctgccgaccgacacgaacagctgcgtgccggtacagcggcgcatggccaatgcctatggcatctatgacagcggcaacctgcgctacgatctcagcatcccgcaggtgttcctgcgccgcgaggcgcgcggctacgtcaatccgtcgctgtgggaccgcggcatcaacgctggcttcgtcggctacagcttcaacgccatcgacagcgacagccgtgttgaaggggggcagcgcaatcgcagcgcctacctcggcctcaacgccggcctgaacctgggaggctggcagttccgccacgattccaacctgacctggtccgaaggcaacggccgccactggcagagcattgccacctatgcgcagcgcggcatcccgcaggtgcgcggcatgctcaccattggtgaggcctacaccacgggcgagctgttcgattcgatcggctaccggggtgccagcctggccagcgacgaccgcatgctgcccgattcgctgcgcggttacgcgccggtcgtgcgcggtattgccgaaaccaacgcgcgcatcgaagtgcgccagaaccagcagctgatctactcctccaccgtatcgccgggcagcttcgtcatcgacgacctgtacccgaccggctacggcggcgacctggaagtgagcgtgatcgaggccgacggccgccgccgcgaattcaaggtgccgttcggttctgtgccgcagatgctgcgcgaaggcgtgtcgcgctactcgctgaccgccggccaggtgcgcaacaagctgctggccgatgagccgtggctggtgcagggtacctaccagcgtggcatcggcaaccagttgaccctgtacggcggcagcgcgctgagcgaaggctacctgtcgctgctgtacggtgtcggcctgtccacgcgcgtcggtgccttcgctgccgacgtcacccatgcacggacctcgttcgaccactacggcagccataccggcgccagtgtgcggctgagctacagcaacatgatcggcgagaccgggaccaacctgaccctggccgcctaccgctactccactgaaggcttctacagcctgcaggacgcgctgtatggccgtgattcggacaagcgcggcatcgatccgaccacccgtggccgtcagcgcagccagttccaggtaacgctgaaccagccgctgggccgacgtggcggtgcgctgtacgtgaccggctcggtgcgtgacttctacgaccgttccggcacctccaagcagtaccaggtgggctacaacaacgcctggcgctcggtgaactacggcttctcggcgctgcgcaccgaagaaggcgtgctcggccgttccgatacccagtacctgctgtcgatgagcgtgccgctgggccggggcacccacccggtgtcgttcagcgccgaccttggcgcgcgcgaccgcggtggctacgacaacagccgcgtcggcatcaccggttcggccggcgtcgacaacaacttcagctacggcgtggccctgtccgattcccgcgagggtggcaccactgcggtcggcaatgccgagtaccgcagccgctactcggcgttgaacgccacctacagccactcgcgtgatttccgccaggcgtcggtcggtgccaacggcagcgtggtcgtgcatccgggcggcttcacattcaccccgcagcgcggcgacaccatggtgctggtcgaagcgccgggcgcgcgcgatgcgatcgtcagcaacgcgccgggcctgcgcgtcgatggccgcggctacgccgtggtgccgtacgtgtcgccgtaccgcctcaacaccgtcaccctcgatccgcagggcatggcccacgacgtcgaactggaaagcaccagccagtccatcgcgccgttcgccggtgccatcagctacctgcgcttcgacacccgcaagggcaacgcgctgctgatccaggtgcgcaacgccgatggccgcagcatgccgttcggtgcgcaggtcaaggacgaacagggccagccggtcggcatggtcagccagggcggccgcctgtacgtgcgcagcgagaagaaccagggccagttgcaggtcgagtggggcgccggtgccgaccagcgctgcaccattgattaccaggtaccggcgggcgccgatgcgtccaagaccggcttcatcccgctggaggcagcatgccgatga

SEQ ID NO: 493673 - DNA, 729 bp, Stenotrophomonas maltophilia
atgaaagcaatctttccccgggcgctgctgctggcagcgttcacgctgcccttctgccagaacgctctggccggcgtggtggtcaacggcacgcgagtgatctatccggcgcaggcgcgcgaagtgaccgtgcaggtcgacaacgtgggcgattcgccggcgctggtccaggcctggatcgacagcggcgacgccaaccagaccgccgacaacagcgacgccccgtttgtactgacgccgccgatcgcgcgtgtcgagccgggccgcagccaggcgctgcgcgtgatcttctccggtgcgcagctgccgaccgaccgtgagtcggtgttctggctcaacgtgctggatgtgccgccgtcgcccgacaacgccgacagcggcgaccagaattacctgcaggtcgcgttccgttcgcgcctgaaactgttctaccggccgcagggcctgaagggcgtcgccaacgacgcgccggcagcgttgcgctggacccgcacgggcgatcgcctgcgggtggaaaaccccagccccttccacgtcacgctggccgaagtgcatgccgtgaccggcagcagcgagaagaccgtcgaggacaagggcgccatggtcgcgccgaagcagagcctggagttcaccgcaccggcgggctccgaccaggtgcgcttcatcaccatcaacgattacggcggtcgggtggagcacacggtccgcctcggcagtaccgggggctga

SEQ ID NO: 493674 - DNA, 540 bp, Stenotrophomonas maltophilia
atgcacaagatgaacctcattgccgctctgatgctggccgccgctccgctggccgccaacgccgccgacggcaccatcaccttcaatggcaaggtgaccgacaagacctgcaccatctcgaccccgggcggcaaggacttcgccgtgaccctgccgaccgtgtccaagaacaccctggccaccgccggtgccgttgcgggccgtaccccgttcgccatcaacctgaccaagtgcagcgccggcaacgtcgccacctacttcgagccgggttcgaccgtcgacttcaacagcggccgcctggtcaaccaggcctcggccaacgctgccaccaacgtgcagctgcagctgctgggctcgaacaaccagttcctgccgatcaaggctgctggcgctggcctggcgcagaccaactcgcagtgggtcaccgtcggcaccgacggctcggccgatctgaactactacgctgagtactacgccactgccgccgccaccccgggcgacgtcaccagcagcgtcaagtacacgatcatctacaactga

SEQ ID NO: 493675 - DNA, 366 bp, Stenotrophomonas maltophilia
atgaggaactccattctgctgtgcgtggccctgatgtccgtcagtgcgctggcccaggccagcagcggcagcatccgtttcagcggccgtatcgccgagccgggctgcacgacgaacctgtcccagggtgagctgagcctggcggcctgcccgccgtcggccaagggctcgacggtggccgtgacggcactggccgatggccaggcggcgacgctgcgtgacggcaagcgccagggccagaagctgtcggtgtcggccagcgcgatgcgcgccggcgatatcgccttctccgagcgctacagcgtgcaggcttcgaggcagcagccgctgcagggcgcctacctggtggtcgtcgactacctgtaa

SEQ ID NO: 493676 - DNA, 1182 bp, Stenotrophomonas maltophilia
atgcctatcatccagtccctgctcgacaccgacctgtacaagttcaccatgatgcaggcggtgctccaccagcaccccggcgcccaggtgcagtaccggttcaagtgccgcacccccggcatcgacctggcaagctacatcgcccagatcgatgaggaaatcgaccacctgtgcagcctgcgtttcagcgacgcggaactggactacatgcgtggcctgcgcttcgtgaagccggacttcgccgatttcctcggcctgttccatctggaccgcaagtacatccagctgcgtgcgtcgacggccgtgcccggcgagatcgagctggacatcaccggcccgtggctgcacacgatcctgttcgaagtgccgctgctggcgatcatcaacgaagtctggttccgcaacaccaccacggccgacttcgccgaaggcgagcgccgcctgcaggccaaggccgcgctgctgcgcgatacccccggtttcgagcactgccgcatcgccgactacggcagccgccgccgctactcgcgtgactggcatgcccgcctgctgccgctgctgcgcgacgcgctcggcccgcagctggtcggtaccagcaacgtccacttcgcgcgcctgtatggcatgaccccgcacggcaccatggcccacgagtacctgcaggcgttccaggcgctcggcccgcgcctgcgtgattcgcaggtggcagcactggaatcgtgggcgcgcgagtaccgcggcgatcttggcatcgcgctgtccgacgtggtcggcctggacgcgttcctgcgcgacttcgacatgtatttctgcaagctgttcgacggtgtgcgccatgactccggcgatccgttcgactggggcgaccgcatgctggcgcatttccagcagcgccgggtcgatccgcgcagcaaggtgctggtgttcagcgatgggctcgacatcgccaaggtgatgcggctgtacgactacttccgcggtcgctgccaggtcgcgttcggcgttggcacccacctgaccaatgacctcggcccgacgccgctcaacatcgtcatcaagatggtccgctgcaacggccagccggtggccaagctcagcgattcgccgggcaagagcatgtgcgacgacccgggttacctggcctacctgcgccaggtgttcgaattgccgcagccggagtaa

SEQ ID NO: 493677 - DNA, 840 bp, Stenotrophomonas maltophilia
ttgaatgttgccatcgccgccatcgtcgtcacttaccagagtggcagcaccatcgatgcctgcctctcgcgcctgcgccaggcgcaggatgtggccgagatccgggtgatcgacaatggttcgctggatggcaccctggacatcgtgcagcggcatgccagccacgatccacgcgtgcgcttcgtcggcaacccggacaatcccggcttcgccgccgccaacaaccagggcgtggccgactcgcacagcccgtggctggccttcatcaacccggacctgatggtcgagccggacacgctggccgaactgcgctcccgcgccgaagcgctgggcgactgcctgctgggcgttgaacaggtggacgagcatggccatgccgacgaggcggtgcgccgccgcgacccggatttcctgaggatgctgcgttcgcccggcaagggctcgaagctggcggttccgcgtgagccgcaccaggcactgcagcgggtgccggcactgtccggcgcactgctgatgatgccgcgcgcgctgttcgaccgtatcggtggctgggacgcgggctatcgcctgcacgccgaggacctggacctgtgccggcgcgcgcgcgaagccggcgcggtggtagcgatcgccaacgacctgcaggttacccatgtgcgcggtgtctccagccgctcgcggccgttcttcgtggaatggcacaagcacagggggctgtggcgctacttccagaagttcgaggccaggcagcgttcgctgccggtgcgcgcggcggtatgggctgcgatctgggtgcatgcgctgatgctggtgccgcgcctgctgcgcaggtcgttgtag

SEQ ID NO: 493678 - DNA, 852 bp, Stenotrophomonas maltophilia
atgggggcgatcgtgttgttgccgctgtgcgtggacgatgccgcgctcgaccgctgcctggccgcactggatgccggcaccgcgccgggaaccgcggtctggctggccgacgacgcgcagaccgggccgcgcgcgcaggcggtggtggaccactggttggcgcatacgccactgcaggccgagtacacccgccgtgcgcggccgctgggcgaggtggcgcacctggacgagatgctgcgcgcctgcgatggcatggacgtggcggtgctggcaccggacagcgtgcccgcgccgggctggctgcagcagctgcaggacaccttcgcccgcgatgccgccatcgcgaccgcaaccccgtggtgcaatgccggcgaaaccgccgcgtggccacggctgggcgagatcaatcccgagccgcaggacccggtcctgctggcgcacacctgcgcgacgctgccgacgcttcacccggagctgccatcggcggtcacccacgcggtgctggtgcgcggcaacgcgcgccgtcgcgccggcggcctggacgtggacagctacgctggctggaacgcggcactggtcgacctcagcctgcgcatggcaggccttggctggcgcaacgtgctgtgcgagaccgccttcgtcagccgggcaggggaggcggtcagccgcgatggcgatctggaggccctggccgcgcgctggccggcctgggtaccgcggctggccgatttcctgatgcacgacccgctgcacgggctgcgcgccgacctgcagcagcgcatgcggcaggcgataatgccgaaggaacagggcgacctgttcgtcccgtcagtgccggagccacccgtttga

SEQ ID NO: 493679 - DNA, 2220 bp, Stenotrophomonas maltophilia
atgaacctgcgttttcttccctggtcctttgccctcgcgctgctggtcggctgcagtacggtgtccgcgccgcacgtgcagcgcaacggcaatctgtcgccaagcgccgacgccggccaggcggccgatgtcgctgccgatgccgcccgtgaaagccagggggcaccgcaggcggtgatccgccgcggcaccggcaccatgatcaaccgcgaggccgcgcgtgcgccggcaccggcgctgcacggtgccagtaccggcgaggcgaccttcaacttcgaaggcgaatcgctgcatgcggtggtcaaggccatccttggtgacatgcttggccagaactacgtgatcgcaccaggcgtgcagggcacggtcaccctggccacgcccaagccggtatcgccggcgcaggcactgaacctgctggagatggtgctgggctggaacaacgcgcggatggtctacagcggtgggcgctacaacatcgtcgccgccgaccaggcgctggccggcacggtcgcgccaagcacggcacccgcggccagcgcgcgcggcttcgaagtccgcgtggtcccgctgcagttcatctccgccaccgaaatgaagaaggtgctggagccgtacgcgcgccccaacgccatcgtcaacgtggacagtggccgcaacgtgatcaccctggggggtacccgcgcggaactggaaaactacctgcgcaccgtcgagatcttcgacgtcgactggttgtcgggcatgtcggtgggcgtgttcccgatccagtcgggcaaggccgagcaggtcgcggccgacctggaaaaggtgttcggcgaagagagcaagacgcccagcgccggcatgttccgtttcctgccgctggagaatgccaacgccgtgttggtgatcacgccgcaggtgcgctacctggaccagatccagcagtggctggatcgtatcgacaccgctggtggcagcgcccgcctgttctcctacgagctgcgctacatcaaggcgcgcgacctggccgagcgcctcagcgaggccttcgccagcagtggcaaccgcggcggctccagcccggcctcgctggcaccgggcgccattccgtcgcagctaggcggcgacggcgaccgtggcatggacaacagcagcagcaacctgggttcgacgctgggcggaaccagtggtagtggcagtggcagcagtaatggcagcagcaatggcagcctgaacctgccgcagcgccagcccggcaacgtcagtgtcagcctggaagtggagggcgaccgcgtcggcgtgtcggcggtggaggaaaccaacaccctgctggtgcgctcgacgccgcaggcgtggcgctcgatccgcgaggtgatcgagaagctggacgtgatgccgctgcaggtacacatcgaggcacaggtggccgaagtcgcgctgaccggtgacctgaagtacggtgtgaactggttcttcgacaatgccgtggccggtcgcgcgctcaccggagccctggcgggcctgaccctgccgccggctgcaggtggctcgtggaacaccttcgccggcggcgtcaccggcaatgacggtgtgggctgggccttcaccggccacaacgcggccgcggtggtcagtgcactggacaaggtgaccgacctgcgcctgctgcagacgccgtcggtgttcgtccgcaacaacgccgaggccacgctcaacgtcggcgacaaggtgccgatcaacaccaccacggtgaacactggcgtgggcaccagcacctacagctcggtgcagtacatcgacaccggcgtgatcctcaaggtgcgcccgcgcgtgacccgcgacggcaccgtgttcctggacatcgtgcaggaagtcagcagcgcctcggacgtgccggaggactgcaacccgaccgagcgcaactgcaacccgcgcatctcgaccaagaagctgtccaccgaagcggcggtgcagagtggcgacaccatcatgctggccggcctgatcaccgattcggccaccgacggcagcagcggcatcccggggttgagcaggattccggtggtcggtgcgttgttcgggcagaagacccgcaccagccgtcgttcggaagtgatcgtgctgctgaccccgaccatcgtccgcaacagccaggaatcgcgcaacctgaccgacgagtacagcaagcgcttccgcgcaatggagccgctgaaccagccgcgcgcgaagaagtaa

SEQ ID NO: 493680 - DNA, 789 bp, Stenotrophomonas maltophilia
atgaaacttgagcagatcagcctgcgtaccggcttcctgctggcgctggccggttgggcggccgccgtctggctggcgaccggcttcgggctgggcagccagctgccgggtgccggcggtgatgccgacgccgcgccatcgctgccatcgctgccgccgctggcggccgagcgcatggccagcgccgacagctacagcgcgatcggtgagcgcccgttgttcgccgaagaccgcaggccgcggccttatctgctgggtggcagcgaaccggcggccagcgccgcgttgcgcctcaccggtgtgctgctgaccggcgatttcggcatggccacgttcaccaccgaacagaaccgctcgctgcgcctgcgcctcaacggcgaagccgtggatggctggcagctggtggcgctgcagccgcgccaggcgacggtgatcggccccggtggcaaccaggtcctggaactggcggtgttcaacggccagggcggtgagccgccgacggtgctgcgcggtgccaacggcgcaccgcctgcaggtgcgatcgtggtgccgccctcggcgggcgctccgccggcgccgccaccgcccgcggcaatcccatcgccgtcgcccgctggcaatgcaccagcgcctgcggcggccgctgcaacaaccccaccggccaacaacaacggtcccagtgaagcgcagatgcaggccatccgcgagcgcatccaggcccgccgccgccagctgcagcaacagcagcaacaaccgtcgccgcccccgggcgatggcaccaaccgatag

SEQ ID NO: 493681 - DNA, 714 bp, Stenotrophomonas maltophilia
atgccgatgccaagcgcacgccgtgaccgctggctggcgctggcactgctgctggcagtgctgggcctggcctatctgctgctggtgcacccctggttcacccagccgctgcgtgcgatcgatgccgatgtcgccgccctgcgcgaacgcgagtcgcgcgtgcaggcgcagctgcagcagcagccgcagatcgaacagcgccttcgcgctacccgcgaggcactgcagcagcggccaggcttcctgcgcgaagccactgccgaagctgccgccgctgcattgggcgcccggctgcaggatgcggtggcgatggccagcccgggcaaccgcagctgcaccatcagcaaccgcacgccgctgaccgacaaccggcgcgacgccgagttcgtgcgcgtcgccatgcaggtgcgcctgcgctgcggggtggccgaactggccaccgtgctgcacagcctggaaaccggcagcccacgcctgttcgtcgacaacctcaacctgatcgcgcagcgcttccagcaatcaccgaacgaatcggggctgggcctggacgtgtccttcgagctggccggctatctgctgccgggcgctgccgccgatggcacggttccggcgcctgctgcgacaccggcaccgtccgcgtcgccggccgaggccgcacctgcgccgcagccggcgcccccgtccgaagggcaggaggtggccgatgaaacttga

SEQ ID NO: 493682 - DNA, 1146 bp, Stenotrophomonas maltophilia
atgacggcgtggcaggacagtctgcggcaggtgcagggccggatcggcccgggcgccggccgtttcctgcgctggtggcggcagtcgctgctggcctgggtgccggtgcgctggcaatgggcattgggctggggccaggcacgcctgctgctgcagcacgagggcgaccagctgcaggtctggcgtgaagccggcgaacgccgcgaagcggtggcgcgcctgccgtggccgctgtcgccggtggagctggaccgcgtgctggagcctcgcctgcgtactctgccgcgggtgtggctgctgccggcgacggacgtcctgcggcgtagcctgcgcctgcccgctgcagcggccgaccgcctgcgcgccgtggtcggtttcgagatcgaccggcagaccccgttcgaatcatcccaggtcagttatgacgtgcgtgagctcggcgcgggcggcgagggccagctgcaggtcgaactggtggcgtggccattgcggcagctggacgcatggcgcaccagtgtgggcccatgggccgatgcgctggcgggcgtcgatgccatcgatgcgcagggcaacgtgctgcaggtgaacctgctgccgcccgcacagcgccaactgcggccagacccgatgcgacgctggaacctgcttctggcagtggctgccgtcgtgatgctggtactggccgcggtgcagctgctcgacaaccgccaggccgccgccgatgagctgcgtgcacaggtcgagcgcagcgcgcgcagtgcgcgaggtgtggccagcgaacgcgcgcagctgcaggcgctgatcgatggcgccgcattcctggagaagcagcgcagccagcgcgccggcaccgttgaaatctggaacgaactgacccggcgcctgccggaaggtacctacctggagaagctggcgatcgagaacaacaacctgcagctgatcggcctgagccgcgaggcgtcgcagctggtgcagctgctgcaggacgcaccgcagtggcgcaaggtcaacctgaccggggtgctgcaggccgatggcgcggccagtggccgcgaccgcttcaccatgaccgccgaactgcagccgttgccggccgccgcaccaaccccggaggcggccgatgccgatgccaagcgcacgccgtga

SEQ ID NO: 493683 - DNA, 864 bp, Stenotrophomonas maltophilia
atgagccgtcagcgcggggcggcattggtgctggtgctgtggctgatcgcattgatgacggcgctggtcggtgcgttcgcgctgagcgcacgggtcgagcacctgcagcagcgcgtgctggatgacgatgcacgcgggcaggaacgtgcgcgcgccggcctcgaatatgccctcctgcgcctgtcagccgatccgcaacgggcgccctggcgtgccgatggccgtacctaccgctggcagttcgacgacgccagcatcgagatcaaggtgctggacgagaacggcaagatcaacctgaacctggccgacgccgcactgctgaccgccttcctcaaggcgctgggcgaagacgatgcacaggcccggcagttggccggcgccatcatcgactggcgcgacgaggacagcctgctgcaaccgggcggtggcgccgaagcgccggactacgccgcagccggattgccctacggcccacgcaacaagcgcttcgagaccctgggcgagctgcagcgggtcctgggcatgcgcggacccctgtaccgggcgatgctgccgcacctgaccctctacagccgccaggcacggccggatccgcggttcgccagcgcgccggtgctgaccgcgctgggcctggatgcggacagcgtgatggcgcagcgcgcacagcaggagcgtgatgcagattccgctggcggcacgacaacgcttgccagcagcagcggcacctatagtatcgagtccggtgccatcgacggcagtggacgcaggtcggtgttgcaggcagtggtacgcagtggctcgggcggggttcccgggcggacttacacagtgcttcgctgggagcagggaatgacagcaagatga

SEQ ID NO: 493684 - DNA, 633 bp, Stenotrophomonas maltophilia
atgaagcggcgcgccgcgggcttcaccctggtcgaagtgatgctggccaccgtgctgctggccggcggcctggcactggcctttgccagcgtgcgctcggcgatggcggtcagccagcgcggcgagcagatcgccgctgaaagcgaacgcatgcgcgcggtcgagtcgttgctgcgcaggcagctggcgggtgcactgcgcaccccgctggaggccccggaccccacccgcgaacccatcttcttccagggcgaggagcaacgcatgctgttcgccgccgacctgcccggttacctcggccgtggcggcccctacctgcacgcgctgcaggtggacggacgcggtggccaacagcgcctgctactggacctcgtgctgctgcaggaaggcgagcgcatcgccgagaatccgccgcgcccgccggaggtgctggtggacaacctgaagtcggtgcagctgcgctatcgcggcatcgatgccggcaccgggcaggtgaccgactggctgccgcgctgggatgacacccgccgcctgccgatgctggtggaaatccagatcgtgccatcccggggcgcgccgtggccgccactggtggtggcgctgcgtgccggtggcagtggaggcacgcgatga

SEQ ID NO: 493685 - DNA, 420 bp, Stenotrophomonas maltophilia
atgaagcggcgcgcgcgtggcttcaccctgctggaagtgatcatcgctttcgccctgctgggcctggcgttgaccctgctgctgggcagcctgtccggtggcgcgaagcaggtacgtgacgccgagctgcgcacgcgtgcggtgctgcatgcacagtcgttgctggcccaggccggtgtcgacgcgccgctgcaggtgggcagccagcagggtgactgggaacaggggcgctatcactgggagctgcaggtccagccgtgggtcgagccacgcgccggcaacgtcgtgcaggccacgtcagcgggcaccccatggctggccgagctgcagctgcgggtgcgctggggcgacagcgagcgcgaacaactgcactggcgcagcctgcgcctgttgccgcccgacctggagaacgcgcgatga

SEQ ID NO: 493686 - DNA, 495 bp, Stenotrophomonas maltophilia
atgacgcacttcctgccgcgccggttgccacgcccgcgcctgcacggcaggcgcgcggctggactgtcgttgctggaaatgctgctggtgatcgcattgatcgcggcgatcggcctgatcaccgccgccggcctgtcgcgcgggttcgccggcatgcagctgcgcagcgccggcaaggacatcgccagccagctgcgcatggtgcgcgcgcaggcgatcgcccgcggcgaaccgcagcgcttcgtgatcgaaccggcacggcgccgctgggagggggccaaccagcgccacggtgaggtgccggcacagctgcaggtgcagttcgaaggtgccgcacagctggccaccgcggcggggcagggcgtgatcgagttccatcccgatggtggctccagcggcggccgtatccggttgcagcgcgacggtgccgaatggcgcgtcgacgtcggctggctgaccggcgaggtccgctccggcccctggcgggcgcaatga

SEQ ID NO: 493687 - DNA, 444 bp, Stenotrophomonas maltophilia
atgattgcccgtcgccgaccgatccgcctttccttcaccgccgcgcgcaaccagtcgggcatgagcctgctggaaatcatcatcgtcatcgtgctgatcggcgcggtgctgaccctggtcgccagccgcgtgctgggcggcgccgaccgtggcaaggccaacatcgccaaggcgcaggtgcagaccgtcgcctccaagatcgacaactaccagatcgacaccggcaagctgccggccacgctcaacgacctggtgacggcgccggccggtgtcggcggctggctcggcccgtacgccaagcccgccgacctgaatgacccgtggggccacgcactggagtaccgggcgccgggcgaaggccagccgtatgagctggtcagcctgggcaaggatggcaaggctggcggcagcagcgtcgacgctgacatccgctaccagccgtaa

SEQ ID NO: 493688 - DNA, 1242 bp, Stenotrophomonas maltophilia
gtgcaggacgccggggctgacatgccgaactatcgctacaaggcgctcaatccgcatggcgaggtcttcgatgggcagatggaagcggccagcgaggccgagctgatcgcgcgcctgcaggaccagggccacctgccgatggagacgcagctggccgacgccggcgcgatcggcggcagcagctggcgcaacctgctgcagcagcgcccgctgcagggggccgcgctgctgcagttcacccagcagttggcgactctgctcggtgctggccagccgctggaccgcgcgctgtcgatcctgctggggttgcccgaggacgaacgatcgcgccgcgcgatcaccgacatccgcgacgtggtgcgcggtggcgcaccgctgtccaccgcgctggagcgccagcatgggctgttctcgcgcctgtacgtgaacatggtgcgcgccggcgaagccggtggcagcctgcatgaaaccctgcaacgcctggccgactacctcgagcgcagccgcgcgctgcagggcaaggtcatcaacgcgctggtctacccggcgatactgctggtggtggtcggtggcgcgctgttgttcctgctcggctacgtggtgccgcagttcgcgcagatgtacgaaagcctggacgtggcgctgccgtggttcaccaacgcggtactgcagctgggcctgttcgtgcgtgactggtgggtgctgctgctggtggtgcccggcgtgctggtgctgttcttcgagcgcaaggcgcggcaaccggcgttccggttggcgctggatggctggctgctgcagcggcgtggcatcggtcgcctcatcggcgagctggaaaccgcccggctggcgcgcacgctgggcacactgctgcgcaacggcgtccccttgctgggggcactgggcatcgcgcgcaacgtgctgggcaaccgcgccctggccgctgacgtcgaaacggccgccgatgaagtgaagaacggcgccggcctgtcgctggccctgtcgcgcggcaagcggttcccgcgcctggcgctgcagatgatccaggtcggcgaggaatccggcgcactcgataccatgctgctcaaggccgccgacaccttcgaacaggacagcgcccggcgcatcgaccgcatgctggcggcgatggtgccggcgatcaccctggtgctggcctcggtggtcggcgcggtgatcgtggccgtgctggtgccgctgtatgacctgaccaatgccatcggttga

SEQ ID NO: 493689 - DNA, 1722 bp, Stenotrophomonas maltophilia
gtgaacgcgctcgctgcaaccgttaccgacgacgccgaaggccgcatcctggatgcgttgctggcgcgcggccggctcaaggaaggagacctggcacgcgcgcggccgttgcatgccgaggccggcggcagtctgctgggcctgctggtgcgcctgggcctggtgtctgaacgcgaccaggcacaggccagcgctgaggtgctgggcctgccgctgctggagggcaagcaggtgccggaggccccgccgcaggcgctggccgagggacttccgctgtcgctgcgcttcctgaagcagttccatgtgtgcccgctggagttggatgaacacggggtgcggctgtggctggccgatgcccacgacgcctatccacagcaggccgtgcagttggcccttggggtcccggtgacaccggtgctgggcatgcgcgcggagatcgatgacctggtcgagcgctggttcggccagggccgcagcgcgatgggcgcgatcgtggaaaccgcggatggcgagggcggtgcggtcgacgacatcgagcacctgcgcgaccttgcgtcggaagcaccggtgatccgcctggtcaacctggtgatccagcgtgcggtggagctgcgcgcttcggatatccatgtcgaaccgttcgagagccggttgaaggtccgctaccgcgtcgatggcgtgctggtggagggcgaaagcccgccggccaacctcaccgctgcggtgatcagccgcatcaagatcatggcccggctcaacatcgccgagcgccgcctgccgcaggacggccgcatcatgctgcgcgtgcagggcaaggagctggacctgcgcgtgagcacggtaccgaccgcgcatggcgaaagcgtggtgatgcgcctgctggaccgcgaaacggtggtgttcgatttccaccggctcggcttcaccgatgccttcctgccgcagttccgcaaggtgctggaacagccgcatggcatcctgctggtcaccggcccgaccggctcgggcaagaccaccacgctgtacaccgcgctgagccagctcaacaccgccgacgtcaagatcatcacggtcgaagacccggtggaataccagatagaaggcatcaaccagatccaggccaagccgcagatcggcctcgacttcgccaatgccctgcgcagcatcgtgcgccaggatccggacatcatcatgatcggtgaaatgcgcgacctggaaaccgcgcgcatcgccatccagtcggcgctgaccggccacctggtgctgtccaccctgcataccaacaacgcagccggtggcatcacccgcctgctcgacatgggcgtggaggactacctgctcacgtccaccatcaacggcatcctggcccagcgcctggtacgccggctggagccgacccacgccgagcgctacgaagcctcgccggaagagatcgagcggttcgaactgcgccgcctgcagccggaagggccgatccacctgtaccgcccgaagccgtctgcgctggcgccgaccggctacctggggcgtaccaccatcatggaattcctggtgatgaacgatgcgctgcgccgtgcggtgatgcgccgcgatggcatgggtgagatcgagcgcatcgcccgcgaggccggcatgcgcaccatgtacgaggatggcctgtccaaggcgttgagcgggcagaccaccatcgaggaagtgctgcgcgtgaccgaggaaagctga

SEQ ID NO: 493690 - DNA, 1854 bp, Stenotrophomonas maltophilia
gtgatcaagaagcagaaccttcgcatcaatgtgcttgccgccgccgtgctgtcgatgacggcggtcggtgccgtccacgccgccgggttgccgacccgtgaaccggtgcgccaggccagcaccgcccagccgggtaccgagcgcatcatcgtcaagtaccgggccggcgctgctgccgccaccgaccgctcggcgaagctgtccaccgtgcagtccgcactgacccgtgccagtctctccggcggcacgtcacgcgccaacacgctcggcccgcaggtggtccgcaagctgtctaccggtgcggacctgatccgtgtgcagggccgcctggcaccggccgaactgcagcgcgtgctgaaggaactgaaggccgatccgtcggtgcagtacgccgaagccgacgtgaagctgcgccgcagcgaactgcgtgccggcaacgtgcagccggcgctggtgccgaacgatcccttctaccagcagaaccagtggcatctgcacaatgcggtcggcggcatcaacgcaccggcggcgtgggatgtctcgcagggcgagggcatcgtggtggcagtgatcgataccggcgtcctgccgcagcatccggacctggtcggaaacctgctggaaggctacgacttcatcagcgatgcggagacctcgcggcgcccgaccaacgatcgcgtgccgggtgcgcaggactacggtgattgggtcgagaacgacaacgagtgctatgacggctcgctggccgacgacagttcctggcacggcacccacgtcgccggcaccgtggccgagcagaccaacaacggcgtcggcatggccggtgtcgcctacaaggccaaggtgctgccggtccgcgtgctgggcaagtgcggcggctacctgtccgacatcgctgatgcggtgacctgggcttccggcggtaccgtgaccggcatcccggccaacaccaatccggccgagatcatcaacatgagcctggggggcggtggttcctgcgccagcacctaccaggacgcgatcaacggcgcgatctcgcgcggtaccacggtggtggtggctgccggcaatgaagccgacaacgcgtccaagtaccagccggccagctgcgaaggcgtggtgaccgtgggtgccacccgcatcaccggtggcatcacctactactccaactatggagcccgcgtggacctgtccggtccgggcggtggcggcagtgtcgacggcaacccgggcggctacatctggcagaccggctccaatgcggccaccacgccggaatcgggcacgccgggctacatgggcatgggcggtacctcgatggcctcgccgcatgtggccgccgttgcggcactggtgcagagcgcactgatcgccaagggcaaggatccgttgaccccggccgcgatgcgtaccctgctgaaggaaacggcgcgtccgttcccggtcgccatcccggcggcgaccccgatcggtaccggcatcctcgatgccaaggccgcgctggccaaggcactggaagaaccgtgcaccgagaactgcgggccggtggccacgccgctgaccaacaaggccgcagtcggcggcctgaacggtgctgccggcagcagcaagctgtacagcttcgaagccgtcgccggaaagcagctcagcgtgatcacctacggtggcaccggcaacgtctcggtctacattgcccaggggcgtgagccgagcgccagcgacaacgacggcaagtcgacccgtcccggcacgtccgaaacggtgcgggtgaacaagccggtggcgggcacctattacatcaaggtggtgggcgaagcggcatacaacggcgtgagcattctcgccacgcagtaa

SEQ ID NO: 493691 - DNA, 7182 bp, Stenotrophomonas maltophilia
atgaatcggatttatcgcaaggtctggaacaaagcactgggtcaattggtggtggcctcggaactggcctcctccgacagcagcagtggcggggtcgtcgaccagcgccgcgatgcgacacaggccacgcccgcactgctggcggtggcactgggcctggtattggggttgggcatgagcggcagcgcgacggcacagtcggtgcagatcggcggcagcgccacctgcgttgcattcagcggcaagctgctggaaaagtgcctgatcgaaggctcggccacggccaagggcagcaacgcggtggcgatcggcagcaacagcaatgccagcgccgccaacagcgtggcgctgggcgctggctccaaggccacgcgggccaataccgtgtccatcggcgatgctggcaaggagcgccagctcaccaacgtggctgctggtacgcagggcaccgatgcggtgaacaaggcgcagctggacgcgcaggcgcgcgccacgcaggccgcgctggctgatgtcgccgccgatggaaaccgctatttcaaggccgacggcgcaggcgatgacagcgacgcggcgaagatcgaggggcagggcgcagtcgcggccggcgccggtgcacaggcgctggccaacgccaccaccgccatcgggacccaggccattgccgccggtctcggcgccagtgccttcggccagggcgccctggccatcggcgatgccagcgtggtggtcgggcagagcgcggccgcgttcgggcttggcgatacggccgtcggcgccagcgcgtacgcagccagcgagaacggcgcggccaccgcactcggtgcgttgtccgaagccactgccgatggcgcgacggccgtcggcggtggtgccgtggcgatgggcccgggcagcaccgcactgggccgcggcgccactgccgccaatgaagcatcgatcgcggtgggggcgttcagcactgccgtgggtgagtacagcaccgcgctggggtccaactcggcggcggtcgccaccggcagcgtggcgctgggcgccggctcgctggccgaccgtgtcgacaccgtgtcggtcggcgccgccgactacggcctgacccggcagatcaccagcgtcgctgcgggtactgaagataccgacgcggtcaacgtcggccagttgaagggcgtcgccgccgtggccgatgccaccgccaagcgtttccaggccaccggcagcagcaacagtgatgcgggtgcattggccgagggcgacgaggcgctggcggctggcgaggccgccaatgcgatcggcaagggtgcgacggccgtgggcgccggtgcgaccgccgtcgcgcagaacgccaccgccgttggcaacaacgcgctggcctcgggccagaacagtgccgcgttcggcaacaacgcgcaggccaacggcccaggcagtgtcgccgtcggtggtgctgcggtggatgccgatggcaatccgctgatcaccagtggcggcgtgccggtggaaaccggcgccaccagtgccggtgtcgggggtactgcggtgggtgcgagtgccgaggccggtggtttcgccgcgtcgtcctatggcgttggcgcatatgccgccggcgcgcagtcgtccgcgttcggtgcggttgccaatgccatcggtgattactccaccgcgctgggtacgcagagcaacgccaccggcaccagtagcgtggccatcggcggcccggccgatctgattccaggcctgggcttcttcgtgcagacccaggccagcggcgaagcgtcgaccgccgtcggcgccggcgccatcgccagcggtgatcgcgcggtggccaacggcagcctgaccgaagcgtccggcgccgaagcgactgcggtcggctacttcgcctacgctccgggcgagaacgccagcgcgctcggcgcgcagacctgggccagcggcgcgcagagcaccgccgtgggctactacgccaccgcacgcggtgccaacagcgttgcgctcggcgccaactccgaagcggtgcgtgccaacagcgtggccgtgggcagtgccggcaacgaacggcagatcaccagcgtcgccgcgggcagtgaagccaccgatgcagtgaacaaggcgcagctcgacgcggtggccagcaccgccgacagcaccgcgcgcttcttccaggcccagccggaagcaggcagcgatgccggtgcattggccgagggcgaaggtgcggttgcggcgggttcgtcgagcaatgcgatcggcgctggcgcgattgcacagggcgcagcggcctcggccatcggtgacgacgccgtggcggtggggcgcaacagcaacgccaccggcaatggcggtgttgccatcggtggcctcggccaggcctacgacgagtacaaccagccgatcatcggtgccgacggtacagcacagcaggtcggcaccactgccgttgccgacgccacggcggtcggcagtggtgcgcaggcgaccggcgctgccagcagtgcgttcggcaacgccgccagggccagcggagacaacagcttcgcggccggcggcaagtcgcgtgcgaccggcagctacgcggttgcggttggcgacagcgccttcgccagcagtgacgacagcaccgccgtcggtggctacagctgggctaccgcaagcggggcgagtgcgttcggttccggcgcctgggcaacggccaccaatgcctcggcattcggcaacgcggcctgggccagtggcagtggtgcgacctccatcggttacaacagctgggccaacggcaccagctccaccgccgtcggtcgcggcgcattcggttatggcgacaacagcgtggcgctgggcttccaggcgctgggcaacagcctcaacagcatcgccatcggcaccaacacggtggccggtggtgaaagcgcgatcgcgctcggtgccggcagcaacgccagcgccagcaacgccgtcgcactgggcgccggctcggtcgccaaccgcgcccgcagcgtttcggtcggcagcaccggcaacgaacgccaggtgaccaacgtcgccgccggtacccaggccaccgacgcggtgaacaaggcgcagctggatgccgtggcgggcgcggcagccaccaccagccgcttcttccaggccagcggcaacggcggtgatgtggccggtgcactggtggacggtgacaacgcgctggccgccggtgatgcggccaacgccatcggcaacggggccaccgcactcggcagtggcgccaacgcgctggccagcaatgcgcaggcactgggcgtcaacgccctggccagcgccgccaacgccagcgcggtcggtgcaaatgcacaggcgaccgctgaatacgcaaccgcgcagggtgcggaaagcgaggccagtggcgagcagagtgcggcgttcggtgcggccagcatcgccagcggtgctggcagcaccgcgaccggcgtgctgtccgaagcctccggcgaggaggcagtggcagtggggtacttcagcaatgccagtggcagcggcgccaccgcggtcggcagcgagagtgtcgccagtggcaccgcgtcggcagcgttcggcatcggtgccgaggcgaccggcggctacagcaccgccatcggtggctatgcacaggcctcggccttcaatgccacggccttcggcaacttcgccaatgcctccggctccaacagcgtggcgctgggcggtgattcggaagcctccggtgcctacagcaccgcgactggccagggcagcctggccaccggcaccaacagcgtcgccgtcggcggatcgctgttcggcgtgctggccaccgaagcatcgggcaactactccaccgccgtcggtggcggcgcctggtccggtggcatcaacagcaccgcgctgggcaacgccgccgaatcgcgcgctgccaacagcgtggcgctgggtgccgattcgatcgccgaccgcgacaacaccgtgtcggtcggcggcggtggcaacacccgccagatcaccaacgtggctgatggcacgcagggcaatgatgcggtcaacaagaaccagctcgacgccgtagccgccgcagcggaaaagaccagcaggcagttccaggccagcggcaacgccgatggcgaaacaggggcactggtcgagggcgacaacgcgctggcggccggcgatgcggccaacgccatcggcaacggtgccaccgcgctgggcagcggtgccaacgcgctggcggccaacgccacggccgtgggcatggatgcattggccaccggcaacaacgcggcggcgctgggcagcacagcgcaggccagcggtgaagacagccttgcgctcggcaccggtgccagtgccagcgagctcggcgccagcgcggtcggtgcgcgtgcacaggccagtggtgcgtacagcacggcaaccggcaccgaatccaacgccagcggcacacaggcactggccagcggcttccgtagtgccgcctctgccgatggcaccactgccgtcggtggctatgccgaggccagtggacgcctcggcaccgcattgggctacggctcggcggccagtggggccaacacgaccgccgtcggcttcggtgctgctgcagccggtaccggtgccgtggcggtgggtcagtccagcgaggccagcggcgaggagagcgtggccatcggtggcagcaccttcttcggcctgatcccgtcgcgtgccagtggcaccggtgcggcggcgttcggcgccggcgcatgggcgaccgaagactacgccacggcaatcggctggaactcgtgggccgccggcagcaatgccacggccctgggcgccaacgccaccgccaacggcagcaacagtgtcgccctcggtgccggctccaaggccgaccgtgacaataccgtggccgtcggcaaggccggtggcgaacgccaggtgacccatgtggcagccggtaccgaagccaccgacgcggtgaacaagggccagctggatgccgttgccagcgtcgccgacaagaccagccgccagttccaggccagcggcaacgccgatggcgaggccggtgccctggtggacggtgacaacgccttggccgccggcaacgcgtccaacgccatcggcaacggtgccaccgcgctgggcagtggcgccaacgcgatggccgccaacgccacggcggtaggcgccgatgccctggcgaccggcagcaacgcggcggcactgggtaccaacgcacaggccagtggtgtcgacagcgtggccgtgggcagcgctgccagcgccagtgaactcggtgcaagcgctaccggcgccggcgcgcaggccaagggcgcctacagcaccgccagcggcgcgcaggccacggccagcggcacgcagtcgcaggccagcggtttccgcgccactgcctcggccgatggtgcctcggcgctgggcagctacgccgaagccagtggtcgactgggtactgcggtgggctacggcagcaaggccaccggtgcgaacgctaccgcggtgggtgtcagtgccaacgcttcggcggccggcagcatcgcactgggcgcaggctcggtggctgatcgtgccaacaccgtgtcggtcggcagtgccagcagtgatcgtcagatcacccgtgtcgccgccggtaccgagcgcaccgatgcagtcaatcgtggccagctcgatgcggtcgcggcgaccgccgatggcaccgcacgctacgtcaaggccagcggcgcgggtaccgccagtgccagcggcagcgatgccgcagcgatcggttcggccgccagtgccagcggcgcacgcagcaatgcgctgggtgccaatgcgatggccatcggcaacggtgcgcttgcactgggcaacagtgccggcgcgtccggtgcgaactcggtggcactgggtgcgggctcgcgtgcgctcgatgccaacgtggtgtcggtcggtggtggcaacggcaccgatggcccggccgcgcgccgcatcgtcaatgtggccgacggccgcatcgccgccggcagcagcgacgcggtcaccggctcgcagctcaacgtcaccaaccagcgcgtgggcgccgtggaaacccgtgtcggtgattttgactcgcgcatcgccacggtcgagaccacggcggccagcgccgtcggctatgacgacgccagccgtgaccgcctgaccctgtccggcttccagggcaccaccatcgacaacgtcggcgcgggcaacatcgccgccggcagccgccaggcgatcaatggcgggcagctgttccagtcgctcagtgatgccgccagcttcctcggcggtggtgccagcgtcggcatgcagggtgtgttcgtggcgccgaactacgtgatccagggcgccacctacagcaatgtcggcgatgcgctgggcgcgctggaccgcaaggtcagtgagattgaccgtcgtactgccggtggcacgcgtgcaggcgcgtccagcctgcgcgcaatgagtgcttcgctggatgaaagcccgcaggccagcgtggccgacgcaccggcaacggccgatgccgcaccggccagtaccgcacgcgtgcagggcacgccgacggtggccgcggcgggggcgggcattccggtcggcaccccggccaccggcttcaacgccgtggccatgggcgatggcgcggtagccagcggcgcttcgtccacggccatcggccagggcgccagtgccacggcggcaaatgccgtggcgctgggccagggctcggttgccgatcgtgccaacacggtctcggtgggcagcgaaggcaacgaacgccaggtcaccaacgtcgccgcgggcaccaccgccaccgacgccgtcaacaagggccagctggatcgtggcatggcgacggcgaacagctacaccgacagtcgcgtccaggccgttgccgacagcttcgatgtgttcaagggcgagatcgacggacgcctgcgccacatggaccgccgcatcgatcgccagggcgcgatgagcgcagcgatgctcaacatggctaccagtgccgccggtatccgcacccagaaccgtgtcggcgtcggcatcggtttccagggtggcgagtcggcgttgtcgctgggttaccagcgtgcgatcagcgatcgcgccacggtcaccttcggcggcgccttcagcagtgacgacagttcggtcggcgtcggtgccggcttcggctggtaa

SEQ ID NO: 493692 - DNA, 4110 bp, Stenotrophomonas maltophilia
atggatggcgccatcgagcccccatggacgggtttacggcgtgtcctgctggcccccaccaccccgccgtcccacgggaacccagcttttgcttgggccattgccgttgccattgccgttgccgttgccctggcctcggcgggtgccgggcgccgcccggccaaagcccatccccccgcttccggtacaatgtcgggcccgtttcccaactacggttccccggacatgatggtcctcgagggcgcgcccgccctgtcgccgttccgccgcgaacgtcttgaatcccgcctgcagtccatcgctccctccctgcgcatcagcggtgcctggcacgtctacttcgtgcagcccgaaggcagcgccgcccccgacctgaccaccctgtgccgcatcctcgaagcggcgccgcaggccgaagccgtggccgacggcgcggtcagccgcatcgtggtgccgcgcctgggcacgctgtcgccgtggtcgagcaaggccaccgaactggtccgcggtgccggccagtcggtcagccgggtcgagcgtggcctgcgcatcgacgtgcagggctggccggccgatgccgccgcccagcaggcgctggtcaaggcgctgcacgacccgatgacgcagtcggtgctggagaccgtggaacagggccaggcgctgttctcggcaccggcccggggtgaactggagcgcgtgccggtagaccagctggaggccgccaaccagcgcctcggcctggccatggcccaggacgagatcgactacctgcgcgagcgtttcactgcgctgggccggtcgccgtcggacgtggaactgatgatgttcgcgcaggccaattccgagcactgccgccacaagatcttcaacgccagctggaccatcgacggccaggagcaggaccgctcgctgttccggatgatcaagaacacccaccagcagactccgcagcacacgctcagcgcgtacagcgacaatgccgcggtgatcgaaggccatccggcctcgcgctatcgccccgatccggccagtggcgaataccgccgcgagccgcaggtgcccagcgcgttccagatcaaggtggaaacgcacaaccatccgaccgcgatcgcgccgttcccgggtgcctcgaccggtgccggtggcgagatccgcgatgagggcgcgaccggccgtggcggcaagccgaaggcgggcctgaccggcttctcggtctcgcacctgcgcatccccgagctgccgcagccgtgggaagcgccgcgcgcgctgaacccgcgcatggcgccggcgctggaaatcatgaccgacggcccgctcggcggcgccgcgttcaacaacgaattcggccgcccgaacctgctcggctacttccgcagcttcgagctgcccgaaggcgccgatctggtgcgtgcatacgacaagccgatcatgctggccggcggcctcggcgcgatcgatcgcgtgcaggtcgacaagatcccgctgcaggccggtgatgcggtcatcgtgctcggcgggccggcgatgctgatcggcctgggcggcggcgcagccagttcggtggcctccggcgagagcgccgaggacctggactttgccagcgtgcagcgcgacaacccggaaatggagcgccgctgccaggaggtcatcgaccgctgcgtggcgatgggcgccaacaacccgatcaagttcttccacgacgtcggtgccggtggcctgtccaatgccatccccgaactgctgcacgactccaaggtcggcggtgtcatcgacctgggcaaggtgcccaccgatgatccgtcgctgtcgccgatgcagctgtggtgcaacgagtcgcaggagcgctacgtgctgggcgtggcccaggagcgcctggccgagttcgccgcgctgtgcgcccgcgagcgctgcccgttcgctgccgttggcgtggccaccgccgaggagcacctggtggtggcctacggtgccgtgccgggccacaccccggccgatgcgccgatcgacctgccgatggacgtgctgttcggcaagccgccgaagatgcaccgcgacaccgcgcacccgccggcaccgcgctggccggcgctgaagaccggcggcctggacctgcaggaagccggcctgcgcgtactcgcgcacccgaccgtcgcctcgaagaacttcctggtcaccatcggtgaccgcagcgtcggtggcctgaccgcgcgtgagcagatggtcggcccgtggcagctgccggtggctgacgtggcgatcaccctggccgacttcgatggcgtggccggcgaagcgatgtcgatcggcgagcgcaccccgctggccctgctcgacgccgctgcgtcggcacgcatggcggtgggcgaagcgctgaccaacctgtgtgcggccccggtcgatgcgctggatgaaatcaagctgtcggcgaactggatggccgcggccggccatccgggcgaagacgcactgctgtacgacgcggtgaaggcggtgggcatggaactgtgcccgcagctggacatcagcatcccggtgggcaaggactcgctgtcgatgcaggcgcagtggcacgaccagggcgaagcgcacaagagcgtgtcgccggtgtcgctggtgatctcggcgttcgcgccggtcgccgacgtgcgccagcagctgaccccgctgctcgaccgcgacgtggacagcgagctgtggctgatcggcctgggtgccggcaagcagcgcctgggcggttcgatcctggcccaggtgcacgccgaccatggcgatctgccggccttcgccggtgccgctccggacctggacgatccgcagcgcctgcgtggcttcttcgagctgatccgcgatgcgcgccagtctggcctgctgctggcctaccacgaccgcagcgacggtggtgccttcgccgcgctgtgcgaaatggcctttacttcgcgccttggcctggacatcaccctcgatgcctggggcgatgatccgttccgcagcctgttcaatgaagaactgggtgcggtggtgcagatcgcgcgcgaagaccgcgctgcgttcgccgacctggtcgaacgccacgcactgaccgaatgcgcacagcgcatcgccaagccgaccaccgcgccggtggtgcgcgtgtcgctgggtggcgagaacctggccgaatggcgttgggacgcactgttcgacgcctggtggtcggtcacccacgcgatgcagaagcgccgcgacaacccggccaacgccgatgccgagcgcgaggtcgcccgtgccttcaacgcaccgggcctgaagcccaagctcagcttcgacctgaacgaggatgtggcggcaccgttcatcagcaccggtgcgcgtccgcgcgtggcggtgctgcgcgagcagggcgtcaacggccagatcgaaatggccaacgccttcgaacgtgccggcttccgcgccttcgacgtgcacatgagcgacctgatcgaaggccgcgtggcgctgcaggatttcaccggcctggtcgcctgcggcggcttcagctacggcgatgtgctcggtgccggccgtggctgggccacctcgatcctggagcgcagtgcgctgcgtgatgccttcgccgcgttcttcgcgcgcgaagacagcttcgcgctgggcgtgtgcaacggctgccagatgatgagccagctgaagaacatcatcccgggtgccgggcactggccgcagttccgccgcaatgccagcgagcagttcgaagcccgcaccgcgctgctggaagtggtggaatcgccgtcgatcctgctgcgtggcatggccggctcgcgcctgccggtagcggtggcgcacggcgaaggccaggccgtgttcgacaacgccgtcgaccaggctgccgcccgcgtctcgctgcgctacatcgatggccatggcaacgtcgccagccagtacccgctgaacccgaacggttcgccggacggcatcaccggcctgaccagcaccgacggccgcgtcaccatcatgatgccgcacccggagcgcaccccgcgcgcgctcaacctgagctgggcaccggctgaatggcagggtgattcgccgtggatgcgcatgttccgcaacgcgcgggtgtggtgcggctga

SEQ ID NO: 493693 - DNA, 1458 bp, Stenotrophomonas maltophilia
atggcaccatcgcaggacacggacgaagatgtcggcttgctgcggatcggcctgttcttcgatggcacccgcaacaacgcgcacaacctcgcgcgtggtcgaccacagcagccgcgaccgcgcccggcgcagctgcgtgcggatgatgattcgacctaccagagccggctgaccagcagctacgacaacggcctgaccaacatcgcacgcctgcagcagctgtacccggacagccgccgcgatgcgatggccacgccttcgctgtcgatctacgtggaaggtgttggtacccgcgatgacgccgacgacgacctgatcggactggcgttcggtatcggcgccagcggcgtccgcgcaaaggtgcagcgcgcgctgcaggtggtgctgccggctgcgcttgcagaactgtccacgcgttggcggcaaccgctgcgtcgcgtgcagctggatctgttcgggttctctcgaggcgctgccgccgcacgtgatatcgccaaccagctgcagggctgggataccacgcgctggcggcaactgctgcagtcgtccggcctggtctgtacgccggacttcgcccctgcccttccggtgctgcgattcatgggcctgttcgataccgtggctgcggtcagtggtggccgcgccgacgaacaaccgcagcttgccctgtccagtggcatcgctgcacgcgtggtgcagttgaccgcgcgcgacgagcatcgccagcactatccgctgaccacggtggcaccgccgttcaccgagatcgctttgcccggcgtgcacgccaacatcggcggaggctacaaccagctggaggaaggccccaagctgctcagccgcccacgtcgccagcagctgcgccgccccgccgttgccgactaccagattcccccgctggcgatgctgcaggccaccacggcttacgctgaaacgcaggccgatgccgaacgctggcggcagcagctgggcgtggacgaaaaggaagtgtgggtggatgtctggcaccagtggcagcagcagcgccgcgccggcagccgcagcgtgctgttgtccccggtgctgtacgtgactgccgccgtggtactgcggcggcgcatcgactggcgctaccagttgatcgcgctgcaggtgatgcagcagcatgccatcgatgccggcgtgacctggcgcgccagcgctgccgagattcccggctgggaactgccgtcggccctgcaaccgatcgcacggcggctggtggcagggcaggcgttgacccagacccaggaggcgctgctgcgccgacgctacctgatgcagtcggcgcactggaatttcgacgcgctgggcgacaccgccctgacctatgccgccgatgccggcgtcagcgaactgccctaccggcccggtcccggcctgttctacatcaaccggcccaccgtggatggcaagcgcgtggtgctgcccaacgcatga

SEQ ID NO: 493694 - DNA, 747 bp, Stenotrophomonas maltophilia
atgaccacgctgttcatttccgacctgcacctggaccccagccgtccggagatcaccgacctgttcctgcgcttcctgcgcgagcaggcgcccggcgccgatgcgctgtacatcctcggcgacctgttcgaggcctggatcggcgacgacacgccctcgcccgccgccgacacggtggccgatgcgttgaaggtgctgtccgacagcggcgtgccggtgtacttcatccgcggcaaccgcgacttcctgctcggtgaggactacgcgcgccgtgccggcctgcgcatcctgcccgacccgtgcatgatcgaactgtacggccgcgcggtgctgctgcagcacggtgacctgctgtgcaccgatgacattccctaccagcagttccgtgcacagacgcgcgacccggtattccaggcgcagttcctgtcgcagccgctggccgcacgcatcgcgttcgcgcagaaggcgcgcgaagccagccaggcgcgccagtccgagatgaagcaggacgatcgtgcgcagttcgagtcggtgaccgacgtggcccctgccgaagtcgatgccaccttcgtgcgccatggcgtggacaccatgatccatggccatacccatcggccggcgatccacacgctgcaggccggtggtcgcgagcgcacccgcatcgtgctgggtgactggtacgaacagggttcggtgctgcgcgtggatgccagcggctggacgctggatacgctggcgcgcgaataa

SEQ ID NO: 493695 - DNA, 540 bp, Stenotrophomonas maltophilia
atgcgcactacgccgcttgagctgctggccgggcgcgaagcacgctggtgccggcgcgcaaaccactactgccggcggcgccgcgtgcgtcgcctgttcgcggtcatcagccggctcggcgatggcgtgttctggtacgtgctgatggccgcgctggtggtgctggacggcttcgacggcctgcgcgcctcggtgcacatggccgccacgggcctggccgcgctgctgctgtacaaggtcctcaagcgctggacccggcgcccgcggccctacgcggccgacctgcgcatccgcgcctgggtggcgccgctggacgagttcagtttcccctccggacacaccctgcatgcggtgtcgttcaccatcgtggcactggcctactacccgtggctggcgccgctgctggtgccgttcaccctcggcgtcgcactgtcacgggtggtgctcggcctgcactacccctccgacgtgcttgccgccacgggcatcgccgtcctgctggcttcggccagcctgacctggctgccgctgccggtatag

SEQ ID NO: 493696 - DNA, 1146 bp, Stenotrophomonas maltophilia
atgcgctatgccatcgtcaccgagacctatccaccggaagtgaacggcgtcgccctcaccgtgcaggggctggaacaaggtctgcgcgcagccgggcacgagatcgacctggtccgcccccgccagtccagcgaagcgctggattcggcacccggcaccttgctggttcccggcgccgccctgccccgctaccccggcctgcgtttcggactgccggcgccgatccggctgggccgccattggcagaaacaacgcccggatgcggtctacatcgccaccgaaggtccgctcggctggtcggcactgcgcactgcgcgccgcctcggcattccggtcgccagcggcttccacacccgcttcgacgagtacctgcccgactacggcgtggcgtggctgcaggccgcagccatgcgctggatgcgccgtttccacaaccaggccgatgccaccctggtgccgacccgcgagctgcagcagttcctcggcgaacagggcttcgagcgcgtgcgcctgctggcccgcgcggtggacagccagcagttcgatccgggacggcgcgatcccgcgctgcgcgaggaatggggcgtggatggcaacggcctggtggcgatctatgtcggccgcattgctgctgaaaagaacctcggcctggcagtgaaggcattccgccggctgcagcagatccggcccaaggcacgcttcgtgtgggtcggagatggcccggcccgcgagaagctggcacatgaaaaccccgacttcatcttctgtggcatccagcgcggcgatgcgctggcccggcacttcgccagcggcgatctgttcctgttccccagccgcagcgaaacgttcggcaacgtgaccctggaaagcatggccagcggtgtggccaccgtggccttcgactacggcgccgcgcgcgagtacctgcgcaatggcgagaacggcgcagccgtggacagcgacgatcagttcatcgaggccgccgtgcgactggccgccgatgacgcgcagcgccgcgaactgggcggcaatgccgcacgcgcgatgaagcgcctgcatccacaacaggtggtggccgagttcgatgcactgctggccgaactggcacagtcgcggaggaacggccatgcgcactacgccgcttga

SEQ ID NO: 493697 - DNA, 2925 bp, Stenotrophomonas maltophilia
atgacttcacgcaccaccgcactggggcaggccatccgctacgccctggctaccaccgcagcgctggccgccgtgcctgcgtttgcccaggacggcagcagcgccactcccaccaacctcgaccgcatcgagatcaccggctcgcgcatccgccaggtggacgtggaaaccgcccagccggtgttcgcgatcagccgcaacgacatcgaaaagcagggcttcagctcggttgccgacatcctgcagaacgtcaccgcgatgggcagcccgaccatcagccgcgccaatgcgctgaccgcgggtgaaaacgcgggtggcacctacatcgacatgcgcaacctgggcacccagcgcacgctggtgctggtcaacggcaagcgcatgggcatcagcacctccggctaccaggacatctccacgctgccggtgtccgccgtggagcgcatcgaggtgctgaaggacggcgcctctgcgatctatggctccgacgccatggccggcgtggtgaacatcatcacccgctccaatgtcaccggtgtgaccgccaacgtctatcacggccagtacagccagggcgacggcgcacgtgaccgcttcgacgtggtcgccggctggagcaacgatcgcgtgtcgttgaccttgtccgccgagcatgccgaagagaagggcgtgtgggcgcgcgatcgcggcttcagcaagtacggcatgaccgatcgccatccgtacgacagcagcaactggaccacgatcagccagtacggccagttcaccggtctgcgcggcccgggctgtaccgccactgcgggctgcggctattccctcaaccgcggcgcggatcccaccaacccggccaattaccacctcaccgatagcacgccgttcaccggtgacgtgagcaacgccaacgaccagatgcacgtgatgtatccggtcaagcgcgactcggtctatttcgacggccggttcaagatcaccgacaacgtcaacttccgcaccgagctgggctacaaccagcgtgagtccacccgccagatcgcgggctatccgctgcagtcgagcaccgccggtgtcggctcgatgtcgatcaacagctacttcaatccgttcggccgccagcacgggtatgccaccccgaccgccgtggcctggaaccgccgcacctgggaagtgccgcgcgtgaccaccagcgagctgaagacctaccgcgcggtggcgtcgttcgacggttcgttcgagatcggcagccgctacttcgactgggaagtgggttaccagtacaaccgcaatgaactggaatcggtggcgaccggcaacctgcacaagggtcgcgtcgccggcggcgtcggcccgtcgttctacaacgccgccaccggcaaggtgcagtgcggcaccgccgctgcaccgatctcctatgacgtgtgcaagccgtggaacccgctggtgccgtacggcacgacggctgccgatggcctgtacggcaacgaagaactgcaggcgtggctgttcccggaagagatcaccaagggccgtaccacctccaagaacttctttgccaacatcgctggcagcatcgtgaccctgccggctggcgacctgggcttcgcgttcggcgtggaaagccgcaaggaagaaggcaagtacaccccggatgccctggcccagaccggcgcgaccaccaacctggccgcgggcccgaccggcggtgactacaccgtcaacgaggcctacctggaagtgaacgttccggtgctggccgacctgccgggcgcgaaggaactgacctttaatggcgcaacccgcttctcggactacaacaccttcggcaacacgctcaacagcaagttcggcttcaagtggaagccgatcgactcgctgatggtgcgtggcacctgggccgagggcttccgtgcaccgaccatcagcgacctgttcggtggtggttcggagaccttcgcgcagttcagcgatccgtgcgacacccgcttcggttcctcggcctccagcgcggaagtccgtgcacgttgcgcacgcgacatcgccaatgcgaataccttccgccagctgcgccagggtggcaccccggtgaacacgtcgacggacgcgaccccggtgccgttcacctccgggtcgaacccgctgctgacgccggaaacctcgaccagcaagacgctgggcctggtctggagcccgagcttcatccagggcttcaacgcctcgctggactggtggaagatccgcatcgacaacacgatcatcgccgacacgccgacccagatcctgcaggactgctacgaatcgggtatcgacgcgcgctgctcgcgcttccagcgtgacccggtgaccggcatcgtgaccaacctgaagttcggcaaccgcaacgcgggcttcatggaaaccgaaggctacgatctggacgtgagctaccgtctggacacccggttcggcaagttcaacgtgaactcggccaccacctacgtgtccagtgcgacctaccgcacctccaacgacagctcgatcgtcccgatcgtcaccaacggcatcggcagcgctttccgcgtccgttccaacctggtgctgggctacgagcggggcaacttcggcgcgagctggaccgcgcgttactattcgggcgtgaaggaaacctgctcgaacatcgcgctgtacccggacgagtgctcggatccgggtgtgtacgcaccgtggtacaagggcgcacgcaactacaacgagcgcggcgcggtcaccttccacgacgtgcaggtgcgttactcgctgccgtgggacgccaccgtgtcggtcggtgccaacaacgtgttcgagaagaccggcccggtcatgtacagcaagccgaactcggccttctcgtactacggtggctacgatatcggccgcttcgtctacatgaagtaccagcagcgcttctga

SEQ ID NO: 493698 - DNA, 1527 bp, Stenotrophomonas maltophilia
atgccgcatacctccacgactccgcccgcattgcaggatggcgacctgctggccgccatcgaccttggctccaacagtttccacatggtcatcgcgcgctacacgctcggccagctgcgggtgatcgaccgcctgcgcgagacggtgcgcatggccgacgggctggatggcaaaggcggactgtcttccgccgcacggcagcgcgcgctggaatgcctggcccgtttcggccagcgcatccgcaatgtgccgccgcatcgggtgcgcgcgctggccaccaacacggtgcgccagctgcgttctccccagtcgttcctggtcccggccgaaactgcactgggacacgccatcgaagtggtcagcggccgcgaagaagcccgcctgatctacctgggcgtggcccacgcgcaaccccccaagcccggccagcgccggctggtgatcgacatcggtggcggctccactgaattcatcatcggcatgggcatgcagaccctggagcgcgaaagcctgcaggccggttgcatcgccagcacccggcgcttcttccccggcggcaagctcagcaagaagcgctggaaggacgcgctggccgagatcggccgcgagttccagcccttcgccagcaagtaccgcgcgctgggctggcaggaggcgctgggttcttcgggcacgcacaaggcgatcagcgagatctgcgcgacgatgaagctgagcaagggcgcgatcaccgccgaggccctgccgcaattgcgcgatgagctgctgaaggccaagaagatcgacgacatccagttgccgggcctgtccagcgaccgccgcccgatcatcgccggcggcatcctggtgctggaagcggcgttccaggcacttggcctgcagaagctgctggtcagcaaggccgcgatgcgcgagggcatcctctacgacatcgtcggccgtgccggcgagaacgacctgcgcgatgaatcggtggccgcgctcagccagcgctacggtatcgatacggtacaggccgaccgcgtgcaggacactgctctgtcactgctggagcaggtgcaggaacgctggaagctcgatgccgatgatgcgcgcatgctcggctgggccgcacgcctgcacgaactgggcctgatgattgcccacagcggctaccacgtgcatggcagctacgtgctggagcactcggacatcgccggcttctcccgccaggaacagcagatgctggccgcgctggtgcgcagccatcgccgcagcgtgaccaagaccgccttcgacgccctgcccgagcgactgctgctgaccgcgcgccggttggcggccctgctgcggctggcggtgctgctcaaccgcgcgcatgaggacgacccgctgccggcgctggaactgaccgccgacgacaaccggctgtcgctgatcgtgccgcaggcattcatcgatgcccgtccgctgctgcgcgccgacctgatcggcgagaccgacgggatcgccgggctgggcatccagttccgtccgttcgtagcctga

SEQ ID NO: 493699 - DNA, 2088 bp, Stenotrophomonas maltophilia
atgagcagcctcggatccctccccctccccgtgagcccggacaacgatccgttgcgcgacccgtcgctgtacatcaaccgcgagctgtcgcagctggatttcaacttccgcgtgctggcgcaggccatggacccgcaggtgccgctgctggagcgcctgcgcttcatgtgcatctcctgcaccaacctcgacgagttcttcgagatccgtgccgccgccgtgcgccacgcgcaggaattcggcctgccgccggcgccggacggcatgagcccgcaggccatcctcaacgccatccatgaccgcgctgcggagctggtggaccagcagtaccgctgctggaacgagacgctgcgcccggcgctgatggaggccggcatcggcgtgctcggtcgccattcctggaccgaccgccagaggcgctggctgcgcgcctacttccgcaacgagatcatgccggtgctgtcgccgctgggcctggacccggtgcacccgttcccgaagatcctcaacaagtcgctgaacatcgtggtggtgctgaagggcaccgatgcgttcggccgcgccggccacctggcgatcgtgcgtgcgccgcgctcgctgccgcgcatcatccagctgccggagaagctcggcggatcgcagaacttcgtgttcctgtcctcggtgctgtcgaccttcgtcgatgagctgttcccgggcatggaagtccagggtgcctaccagttccgtgtcacccgcaactccgagctggtggtggacgaggaggaagtggagaacctggcgctggcgctgcgcgacgaactggtcgaccgcggctaccggccggcggtgcgcctggagatcgcccacgacatgccgcgcgagatcgtgcgcacgctgctgcagaatttcggcctgaccgagaacgcggtgtaccgcatcgacggcccggtcaacctcaaccgcatcatccagctgtacgacctgatcgcgcagccggacctgaaatacccgccgatgaccccgcgcacactgcgcgacagcgacggcatcttcgagaccacggcgcgccaggacctgctcctgcaccacccgttcgatgccttcaccgcggtgctggacctgatccggcaggcggcgatcgatcccaacgtgctggcgatcaagcagacgctgtaccgcaccggcaaggattcgctgatcgtcgacgcactgatccaggccgcgcgcaacggcaaggacgtgactgtagtggtcgaactgcgtgcgcgcttcgacgaagaggccaacctgggcctggccgatcgcctgcaggaggccggggtgcaggtggtgtacggcgtggtcggctacaagacccacgccaagatgctgctgatcgtgcgccgcgaaggccgcaagctgcgccgctacgtgcacctgggcaccggcaactaccacagcggcactgcccgcgcgtacaccgacatcagcctgatcaccgccgatccggacatcggcaatgacgtgcacctgttgttccagcagctgtccgggctggcctcgaagatgaagctcaagcgcctgctgcagtcgcccttcaccctgcacaccggcatcctcggccgtatcgagcgcgagacgcgcatcgccgccgccggccgcccagcgcggatcatcgccaagatgaacgcgttgaacgaaccgcaggtggtgcgcgcgctgtacgccgcgtcgcaggccggcgtgcagatcgacctgatcatccgtggcgcctgcaccctgcgtccgggcgttccgggtgtctcggacaacatccgcgtgcgctcgatcgtcggccgctttctggagcacagccgcgtctactggttcggcaacgacggcgcgccggagatgtactgcgccagcgccgactggctggaacgcaacctgctgcgccgggtcgagacctgcttcccgatcctcgatccggaactggccaagcgggtgtaccgcgaggtcctgcagaactacctggacgacaacctcaacgcctgggaactggacgccgacggcgtctaccacaagcgtgcgccggcgcacgacgaagccccgcattctgcgcagatggcattgatgcaggggctgtaa

SEQ ID NO: 493700 - DNA, 1332 bp, Stenotrophomonas maltophilia
atgccccgccacatccgctctgcctggttgaagaccctggccaccgttgccgcggtactgctgttcgccggactggtggggtggttcacgggccatctgtggttgtgcatcgcgctgggcgcgctggccaccctggcctggcattactggcgcctgcgcagcgtgctgcgccgcctgaccgcacgccagcgctgggacaccgccgaagaaggcaccggcgtctggaacgaactggaccgcctgctgtatcgcaaccaggtggaaatgcgcgtgcgcaagcgccgcctgctggacatgctgcgcagctaccgcgccgccgccgccgcattgcccgacgcggtggtggtgctggaccgcaacagccagcgcgtgcagtggttcaacgaagcggccaccgccctgctcggcctgcaccatcccggcgaccttggcgaggccctggtcgaacgcctgcagccgatgccgctggcccactggctggccggtggccgcaatgccgaaccgatcctggacgtgccctcgccggtcgatccggcgatccgcctgaacctgcgcctgattccctattcgtcggattactggctgctgatcgcccgcgacgtcagcaagctgctgcgcctggaacaggtgcgccgcgacttcgtggccaatgtttcacacgagctgcgcacgccgctcaccgtggtccacggctacctggacatgatggatccggaggacttccccggcaccggcccgatgctggaagaaatgcgcaagcagagccagcgcatggcccagctggtggaagacctgctgaccctgtcgcggctggaatcgcaggagcacagcgaggaagagaccgtggccatgcagccgatgctggcgaccctgcgccgcgaggccgaggcgcacagccagggccgccaccagatcagcatcgatgatctggccggtgtcgacctgcagggttcgaccaaggaactgcacagcgccttctccaacctggtcaccaacgcggtgcgctataccccggccgggggccgcattgcggtggagttccgccgcgaaggcgacggcgccgtgctggcggtgcgcgattccggctacggcattcccgccacccacctgccgcgcctgaccgaacgtttctaccgtgtgtccagcagccgctcgcgcgagagcggcggcaccgggctgggcctgtccatcgtcaagcacatcctcggcctgcaccacgcacggctggagattgaaagcgaagtcggcaagggctcggtgttctcctgccatttcgatgccgaccacgtgcgcccgcgcgagtccgcccccctgacctccatcgaagaatga

SEQ ID NO: 493701 - DNA, 690 bp, Stenotrophomonas maltophilia
gtgcagaaacgcatcctgatcgtcgatgacgagcccgcgatccgtgaaatggtcgccttcgcccttcgcaagggcgattacgaaccggtccacgccggcgatgcccgggaggcccagaccgcgatcgccgaccgcgttccggacctgatcctgctggactggatgctgcccggcaccagcggcctggacctggcccgtcgctggcgcaaggaaacgctgacccgcgaagtgccgatcatcatgctgaccgcccgcggcgaagagaacgaccgcgtcggtggcctggaagccggcgtcgacgactacgtggtcaagccgttctcggcgcgcgaactgctggcgcgcatccgtgcggtcatgcgccgtgcccgcgaggacgacgaggacggcagcgtggcagtcggcccgatccgcatcgacggcgccgcccatcgcgtgttcgccaacgaccagccggtgccgatcggcccgaccgaataccgcctgctgcacttcttcatgacccatccggagcgcgtctacacccgcgcgcagctgctggaccatgtatggggtggcagcgtgtacgtggaggagcgcaccatcgacgtgcatatccgccgcctgcgcaagacgctggaaccgttcaacgccgagaacatggtgcagaccgtgcgcggcgccggctaccggttctccactgccacctga

SEQ ID NO: 493702 - DNA, 1647 bp, Stenotrophomonas maltophilia
ttgcgagccctgctgctgactaccgccgtcaccctggccctggccatgccgctggcccaggcccaggagaagctgcccgacatcggctcctcggccggcgagctgctgaccccggcccgccaggccgagtacggcgcgatgatgctgcgcgagctgcgcaactacggctacctgctggaagatccgctggtcaacgactggctgcagaccatgggcacccgtctcggctccaacagtgaccagccacggcagccgtacaccttcttcgtgatgaacgaccgccagatcaacgcgttcgccacgctgggcggctacatcggggtcaatgccggcctggtgctgaccgccgagcgcgaggacgaggtcgctgcggtgctgtcccacgaaatcgcccacgtcacccagcagcatgtgctgcgcggcgtcgagcgcgcccagcgtgaccagatcccgatcctgctgggcatgctggcagcggtggtggccgcccaggccagcaacagcacgtcgtccggcaacgcgacgatggccgcgatcagctcgggcatgggcctgatgcagcaacggcagatcaactacacccgctccaacgagtccgaggccgaccgcctgggcatccgcaccctgtcgcgcagcggctacgacgtggatgccatggccggcttcttcgaacggatgtcggcggccatgcgtggcaacgaagggggctacagcgtgcccgagttcctgcgcacccacccggtcaacatcacccgcatcagcgaagccaaggcccgcgccgagcagatgaagaaggatacagtgctgctgaccaccagcacccccaccggcgagcgcaaggagcgggtggacccggccgatcccagcctgggcgagccgctgctgcgcggcaacaacccgctgctgcccagcagtgtgctgcgcctcccgatcggccagctcaaccgtggcgccagcggcgacttcgactgggcacgtgagcgcctgcgcgtgctcagcgcggattccacccccgagctggaacgcgagtatgccgacctggccaagcggcagaaggacggtctcaacgatgcgcagcgctatggccaggcgctggcggtcatgcgcggtggccgtgccggcgccggccaggcccggcagaccctggccggcctgctccagacccatcccggcaacctgtggctggcgctgggcctgggcgaagcggaatcgcgggcaggccaggcggcccaggccaacagccgcttcgagcagctgctgcgcgaacaccccaacagccgcccggtagcactgacctatgccgagatcctgaacgaacagggcaaccgcgaggccggccagcgcgcgcaggcgatgctgcgccccctgttgtcgcaaagcggtaacgatccggtcttccagcagcgctttgcccgcgccagcgagctggccggcgacagcgtgcgtgccagcgaggcctatgccgaggccgccttcctcagcggtcggccggaacaggcgctgctgcagctgcaggcgctcaagcgcaacccggcgctggattacattggccgcgcgcgggtcgatgcccgcatcgaagcgatcaccccgaccgtgctggagctgcgccgccagggcgtgcaggacccggacctggaccggcgctga

SEQ ID NO: 493703 - DNA, 291 bp, Stenotrophomonas maltophilia
gtgacagcccagaccgccggcggtgcccccgccatcaccatctattccaccgccgtctgcccgtactgcgtggccgccaagaacttcctgaagagcaagggccagcagtggaccgaggtccgcatcgacctggacccggccgagcgcgagaagatgatggcgctgacccgccgcaccagcgtgccgcagatcttcgtcggcgacgtccatgtcggcggctacgacgacatgatggccctgcaccgtgaaggcaagctcgagccgctgctggccgggcagggccaggcatga

SEQ ID NO: 493704 - DNA, 393 bp, Stenotrophomonas maltophilia
atgagcgcggccgacgacggcagcaaggaccgcatcgccgagttcaccgagttccgcaagcgcatgaacgagcggatcctgggtgagccgaaccaggtggtgcgccgcttcttcgcgctggacacgcagacctaccaggccggcgcgctggacgtgaagaccaaggagctgctgggcctggtggcgtcgatggtgctgcgctgcgacgactgcatcagctatcacgtggcccagtgcaaggacgccggcgtgacccgcgaggagttcttcgagaccttctcggtcggcctggtggtgggcggatcgatcgtgatcccgcacctgcgccgcgcggttgacttcctcgaccagcttgaaggtggcgccgccgccccggcagcgcacgagcactga

SEQ ID NO: 493705 - DNA, 1005 bp, Stenotrophomonas maltophilia
atgacgcagaaaattacggtcatccgcggcgacggcattggcccggaaatcatggacgccaccctgttcgtgctcgaccagctcaagactggcctggagtacgaagacgccgacgccggcctggtggccctggaaaagcacggcgacctgatgccggcagtgaccctggaatcgatcgcgcgcaacaaggtcgcgctgaagagcccgctgaccaccccggtcggtggtggcttcacctcgatcaacgtcagcctgcgccgccacttcgacctgtacgccaacgtgcgtccggcccacaccttcccgaacaccaagtcgcgtttcgacaacgtcgacctgatcaccgtccgtgagaacaccgaaggtgcctacctggccgaaggccaggaagtgtcggccgacggcgaaaccgccttctccggcacccgcatcacccgcaagggctccgagcgcatcgtgcgctacgccttcgagctggccaagagcactggccgcaagaaggtcactgccgtgcacaaggccaacatcatcaagtcgacctcgggcctgttcctgaacgtcgcccgtgaagtcgccgcacagtacccggagatcgagttccaggaaatgatcgtcgacaactgctgcatgcagctggtgatgcgtccggaacagttcgatgtgatcgtcaccaccaacctgttcggcgacatcatctccgacctgtgcgccggtctcgtcggcggcctgggcctggccccgggtgccaacatcggcaaggacgcggcgatcttcgaagccgtgcacggcaccgcgccggacatcgccggccagggcaaggccaatccgtgcgcgctgctgctggcagccgcgcagatgctggaccatgtcggccagccggaaaacgccgagcgcctgcgcaaggccatcgtggcgaccatggaagccaaggattcgctgaccggcgacctgggcggcaccggcaccaccatgagctttgcccaggccatcgccagccgcctgtaa

SEQ ID NO: 493706 - DNA, 744 bp, Stenotrophomonas maltophilia
atgaacctcaccgccttcggcctggccagcctgatcggcatggccaccaccgccccggtcgccgccgccgagccggcccatcccaccatccgccacatggctggcgcgccggtcgcgacctcgctggatgcggcaaagaccgccgtgctggtcatcgacttccagaatgagtacttcgatgccacggccgcaccgggctttgccggtggccgcatggtcattcccgatggcgtggccgcgctgcggcaggcgaagcgggtggtcgaattcgccgatgcccatggcatccgcgtgatccatgtgcagcacgtgctgccggcgggtgcgccgctgttcgcacagggcagcgtcaatgctgccttccatcgcgacctgcagccgcgccagggcgagaccgtggtgcagaaggacaatgtcagcgtgttcgccggcgcgtcctccaccgtgctcgacccgctgctgaagaacgccggcatcgacaccctgatcgtcaccggcctgcagacccatgcctgcgtggctggtgccgcgcgcgacgcggcggccgcgccccgtggttaccgggtgatcgtctcgtccgatgccagcgccagccgtgacctggacctggctggcggccggcgcatcggccatcgcacgctgcatgaagccgctctggcccagatcgaggacgccttcggcgatgtcatgacgactgacgcgatcctggcactgccggtgcgcaaggccggcgacggcgcttga

SEQ ID NO: 493707 - DNA, 909 bp, Stenotrophomonas maltophilia
atggatcacttcgctgccctgcgtgcactgcgcgccatcgtcgatgcgggcagcttcaccgcggcagccgagcgcctcggtaccacccactcggcgatgtcgcggcaactgcggcagctggaagaacacctgcaggtgcgcctgctcgatcgcaacagccgccggctgtcgttgaccgaggccgggcgcgactactaccgtgaggcggcaacgctgctggaccgcctgcaggaagccgacgaccgtgcccgtgccgggcaggcgcagcccagtggaagcgtgcggatcagcgtgccgcaggtggtggccagccaggagctgccgcactggctgccgtcattcctgcagcgttacccccaggtcacgctggacctgtcggccgatgaccagctggtcgatgtggtcggtggtggtttcgacctggccctgcgcatcgcggcttctctgccggacagccagctggtcgcgcgcgagctggccagctgcccgcgcatcctggtcgccgcaccggcctacctggcacaccacggactgccgcggcaggcagcggacctggctcatcacacgctgctgggtttcagtcccacgccagcaatgccgccctggcagttgcaggggccgcgcggcgcaaccgcgagcatcgaagccgggcagcgcctgcgcgtggatgccacgcccgcactgtacgccgccgcgctggccggcatgggcatcagcctgttcaccgccttcaccgtgcaggaggatctgcgcgccggtcgtttgatccgcgtgctgccggcctggcatgcgggccagcgacgctacttcgcgctgtacccgcatgcacgtgcactggcgcccaaggtgcgtgcgctggtcgagcatctcgcggcgcactacgctgcacaggtgagcgcggcagggtag

SEQ ID NO: 493708 - DNA, 756 bp, Stenotrophomonas maltophilia
atgatggagtcggtgtatctgctggtcgcgcttggcgcgatcgtcgccggattcgtacagggcctgtccggtttcgccttcgggatggtagcgatgtcgttctgggcatgggggctggagccgcgactggccgctgcgctgtcggtgttcggcgcgctggtcggtcagctggtggccgtgttcaccgtgcggcgtggcttcaacctgcgcctgctgctgccgttcgtgctgggcggcctggcgggcattccgctcggcgtgatggtactgccacacctggacatggactggttcaaggcgctgctgggcggcttcctggcgctgtggtgcccggtgatgctgatggcgcgatcattgccgccgatccgcgtgggtggtcgcatcggtgacgcgatcgccggcatggcaggtggggtgctcagcggcatcggcggtttcgccggaccggtgccgacgctgtggagcacgctgcgtggcttcggcaaggacgagcagcgcgcggtcatccagaacttcaacctggcgatgctggcagtgaccatggccacctatgtcggcagcggcctggtgagccggcagatgctgccgtacttcgccatcgtggcgccggcgatgctggtgccgaccctgctgggtgcgcgcgtctacatcggcatcagcgaggcgcgcttccggcagatcgtactgagcctgttgaccgcgtcgggcatcgcattgctggcgtcgtcgatgccggcgctgctggcgcggtcgtaa

SEQ ID NO: 493709 - DNA, 621 bp, Stenotrophomonas maltophilia
atgcccgacaccttccacagctaccgcccggcagagggccaccgtctgccgcatgacccgttcaacgccatcatcggcccgcgcccgatcggctggatttccagccgcgacgcacagggcacgttgaacctggcgccctacagcttcttcaacgccttcaactacaccccgccgatcatcggcttctccagccagggccgcaaagactcgctgcgcaacatcgaagccaccggtgaattcgtctggaacctggccaccttcgacctggccgaggcgatgaacgaaagctgccgtgcggtcgcgccggatgtcgacgagttcgtccttgccggcctgacgccactggcctcaacgcaggtcacaccgccccgcgtggcacagagcccggtaagcatggaatgccgctgcacgcagatcgtccgcctgcgcgatgccgccggccaggacaccaacggctggctggtgctgggcgaagtggtgacggtgcatatcgatgaacggctgctggtcgatggcatctacgacaccgctgcggcggccccgatcctgcgcggcggcgggcctgccgactacttccgcatcggcgccggacagcgcttccgcatgttccgcccgacctga

SEQ ID NO: 493710 - DNA, 759 bp, Stenotrophomonas maltophilia
atgcgcagcggcaacccggctctttccgagtcgaccttcctcgaccttgccagcggttcggtggtgaccagccccgaccaggcaatgaccctcaacggcaccgtcaacaagaccggtttcctgctgctgttgaccgtgctgacggccgctttcgcctggaaccagaccatcgacgactacggccaggtcatggacgcggccaagctgtacgccttgggcggcggcatcggcggcctggtgctggcgctgatcaccatcttcaagaaggaatggtcgccggtcaccgcgccgatgtacgcgctggtggaaggcgtgttcctcggcgccatctcggccgtgttcaacgccaagttcccgggcatcgtgttccaggccgtgctgctgaccttcggcaccctgtttgcgctgctgttcgcgtaccgcagcggcgtgatcaaggccaccgagaacttcaagatgggcgtggtcgccgccaccggcggcatcgccctgctctacctggcctcgttcgtgctgggcttcttcaacatcaacgtgccggtgatccacgactccagctggctgggcatcgccttcagcctgttcgtggtggtcgtggcggcgctgaacctggtgctggacttcgacttcatcgaaaccggcgtggcccagcgcgcgccgaagtacatggagtggtatggcgcattcggcctgatggtgaccctggtctggctgtatgtggagttcctgcgcctgctgtcgaagatccagcagcgctga

SEQ ID NO: 493711 - DNA, 369 bp, Stenotrophomonas maltophilia
atggctgagatcactcgattgcacggcacggtgtggattcccttcgcgttgatggcactggcggcctgcacgccgggcaatgatcccgcgcaggccgtcgagcgtgatgcgggcgcagagcgcattccggcgcgccagatcgacgacgccatgcagttgcggccggcccggcccgcggagggggaggtcctgcccggcgcggtggacgtacagcgcaatgcggacggttcggtggatgtgcgcagggctgcgccggcgtcggtggccctgcgtcgcaccgacgatgggggcgtggaggtccggaaggtggacgcggccgtcgacccgggctcaggcgcggcgccggcccgcacggtaccgcagcagtag

SEQ ID NO: 493712 - DNA, 1296 bp, Stenotrophomonas maltophilia
atgcaagcttcgatcgaatccaccggcaacctggaacgccgcctgagcttctcgctgccggaagagcgtctgcagagccacatcgccggccgcctgggcgaaatcgcccgtaccacccgcatcaaggggttccgtccgggcaaggtgccggccaaggtgatcgagcagcgcttcggcgcgcaggtccgtggcgaggcgctggacggcctgctgcgcgagaccttcgacgcggccgtgcgcgagcacgacctgcgcgtcgtcggcagcccgcgcatcgacaagggcgacgagggtgagttctccttcgtggccaccgtggaagtggtgccggacttcggcgacatcgacgtcagcaagctgaccgtcgtgcgccacaccgccgagatcaccgacgccgacatcgaccagatgatcgagaacctgcagaaccagcgtcgcacctgggccccggtcagccgtggcgcgcaggacggcgacctggtcgcggtggaaacctggtcgcaggccggcgaagagcgcctgccggccgagggcaccgagaagggttcgatcgtgctcggccagggcatgatgttcgacaccatcgaaaagggcctggtcggcctggccaagggcgaagagaagaccctggacgtcgagttcccggctgactggcgcgtgccggtgctggccggcaagaccgtgcaggtcaccgtcaaggttgccgaagtgtccgagccggtcgtgccggcggtcgacgaagccttcatcaagagcttcggcgtgaagggtggcgacgtcgagcagttccgcagcgacatccgcgccaacctggagcgtgagctgaagggcgcgctgatgaaccgcctgcgccgcgaagtgggcgagcagctgatcgcggcctactcgtcggtggaaatgccgccgcgcctggtcgagaacgaagcccgcgccatgctggcccagcaggtcgagcagctgcgccgcaacggccagaacgtcggcgagatcccggccgatgcccacgaaggcttcaaggacgccgccgccaagcgcgtgctggtcggcctgctggtcggtgaagtggcccgcatcaacgacctgcgcctggaagccaagcgcctgaacgaaacgatgcgtctgatcgcctcgacctacgaagagccggagcaggtcattgagatgtaccgcaacgacccccagctgatgtctggcctgcagaaccgtgtgatggaagagcaggtgatcgactggatcgccgagcgtgcccagcacaccgaagagaagctgtcgttccaggacgcgatccgccagtaa

SEQ ID NO: 493713 - DNA, 627 bp, Stenotrophomonas maltophilia
atggacaaccgaaccaaagccctgaacctggttccgatggtggtcgagcagaccagccgcggcgagcgtgcctacgacatctattcgcgcctgttgaaggagcgcctgatcttcctcgtgggcccgatcgacgatcacatggccaacgtggtggtggcgcagttgctgttcctggaatcggagaacccggaaaaggacatcaacatctacatcaactcgccgggtggcgtggtcaccgccggcatggcgatctacgacaccatgcagtacatcaagccgaatgtgagcaccacctgcatcggccaggccgcctcgatgggcgccctgctgctggccgcgggcgaagccggcaagcgctatgcgctgccgaactcgcgcgtgatgatccaccagccgctgggcggctaccagggccaggccaccgacatcgacatccacgcgcgtgagatcctgaccctgcgttcgcgcctgaacgagatcctggccaagcacaccggccagtcgctggagacgatcgcccgcgacaccgagcgcgacaacttcaagagcgccttcgaggcgcaggcctacggtctggtcgaccaggtcctggagcgtcgtccggatgagtcgatccaggccggttga

SEQ ID NO: 493714 - DNA, 1290 bp, Stenotrophomonas maltophilia
atgagcgaagaccgccaaggtcgttccacggacaccggcaagatcctctactgctctttctgcggcaagagccagcatgaagtgcgcaagctgattgcgggtccgagcgtattcatctgcgatgagtgcgtggagctgtgcaacgacatcatccgtgaggaacttgaggaaaaggcgcagtcggcgcgcagttcgctgcccaagccgcgcgagatcctcgaggtcctggaccagtacgtgatcggccagaaccgcgccaagcgcaccctggccgtggccgtgtacaaccactacaagcgcatcgagagccggcagaagaacgacgacgtcgaactggcgaagtcgaacatcctgctggtcggcccgaccggttcgggcaagacgctgctggccgaaaccctggcccgcctgctcaacgtgccgttcaccatggccgacgccaccacgctgaccgaagccggttacgtgggcgaggacgtggagaacatcatccagaagctgctgcagaagtgcgactacgacgtcgagaaggcacagcagggcatcgtctacatcgatgaaatcgacaagatctcgcgcaagagcgagaacccgtcgatcacccgcgatgtgtccggcgaaggcgtgcagcaggccctgctgaagctgatcgaaggtaccgtggccagcgttccgccgcagggcgggcgcaagcatccgcagcaggaattcctgcaggtggacaccaagaacatcctgttcatctgcggcggcgcgttcgccgggctggacaaggtgatccaggcccgttccaccgacgtcggcagcatcggcttcggcgccaaggtgaagagcagcgagcgcaagcaggaagtgggcaaggtgctggccgaagtcgagccggaagacctgatcaagttcggcctgattccggagttcgtcggccgcctgccggtggtggcgaccctggaggagctggacgagccggccctgatcaagatcctgaccgagccgaagaacgccatcaccaagcagttcaagaagctgttcgagatggagaacgtcgagctggagttccgtccggacgcgttgtcggccatcgccaggaaggcgctcaagcgcaagaccggtgcccgtggcctgcgcaccatcgtcgaatcggtcctgctggacaccatgtacgacctgccgtcgcaggaaaacgtcagcaaggtggtggtggacgaatcggtgatcgagcacaagtccgagccgtacctgatctaccagaccccggcggtccctgaacagaaggccgcaggcgccgagtga

SEQ ID NO: 493715 - DNA, 2448 bp, Stenotrophomonas maltophilia
atggcccgttccccaagtgaaaccctcgacctgccggtcctgccgctgcgcgacgtagtggtgttcccgcacatggtcattccgctgttcgtcggccgtgacaagtccatgcacgcgctcgaacaggcaatggaggcggacaagcgcatcctgctgctggcgcagaagtcggccgaaaccgacgacccgcatgcggccgacctctaccaggtcggtacgctggcgcaggtgctgcagctgctgaagctgcccgacggcaccatcaaggtgctggtcgaaggcctgtcgcgcgtgcaggtcacccacgttgacgagcgcaacggctcgctgcacggccaggccgtggagatcgacgccagcgacgagcgcgaagcgcgcgaggtcgaggcgatcgcccgctcgctgatgtcgctgttcgagcagtacgtgaagaccaaccgcaagctgccgccggaactgctgcagacgctgtcgggcatcgatgagccggcgcgcctggccgacaccatcgccgcgcacatcagcgtgcgcctggccgacaagcagcgcctgctggaaacgctggccgtcggtgaccgcctggagatgctggtcggcctggtcgacggcgagatcgacgtgcagcagatggagaagcgcatccgcggccgcgtgaagtcgcagatggagaagagccagcgcgagtactacctcaacgaacagatgaaggccatccagaaggaactgggtgacctggacgatgcgcctggcgagctggaagagctggcgcgcaagatcgccgaggccggcatgccgaaggccgttgaggccaaggcgcgcaacgagctgaacaagctcaagcagatgtcgccgatgtcggccgaagcggcggtcgtgcgcaactacctggagtggttgctgggcgtgccgtggaagaagcgaagcaaggttcgcaaggacctgaaggtggcgcaggacaccctcgatgccgatcactacgggctggagaaggtcaaggaacgcatccttgaatacctggcggtgcagtcgcgcgtgaagcagatgaagggcccgatcctgtgcctggtcgggccgccgggcgtgggcaagacctcgctgggacagtccatcgccaaggccaccaaccgcaagttcgtgcgcatgtcgctgggcggcgtgcgtgacgaggccgagatccgtggccaccgtcgcacctacgtcggttcgatgccgggccgcatcgtgcagaacctcaacaaggtcggcagcaagaacccgctgttcgtgctcgacgagatcgacaagatgtcgatggacttccgcggcgatccgtcctcggcgttgctggaagtgctcgaccctgagcagaacaacgcgttcaacgaccactacctggaagtggacctggacctgtctgaagtgatgttcgtggccacctcgaactcgctcaacattcccggcccgctgctggaccgcatggaagtgatccgcatccccggctacaccgaggatgagaagctcaacatcgccacccgttacctggtgcccaagcaggtcaaggccaacggcctgcagcccgaagagctggagatcggcagtgacgccatccaggacatcgtgcgctactacacgcgcgagtcgggcgtgcgcaacctggaacgcgagatcgccaagatctgccgcaaggtggtgaaggagatcgcgctggccggcccgcagccggtgaaggcgaagaagggcgcgaagaagaaggcgctggtgagcgtgtccagcaagaacctggacaagtacctgggcgtgcgtcgcttcgacttcggccgtgccgaggaagagaacgagatcggcctggtcaccggcctggcctggaccgaggtgggtggcgatctgctgcagatcgaatcgacgctggtgccgggcaagggccagctgatcctgaccggccagctcggcaacgtgatgaaggaatcggcttcagcggcgctgtcggtggtgcgttcgcgcgccgtcggcttcggcatcgacagcgacttcctgcagaagcacgacgtgcacctgcatgtgcccgatggcgctacgccgaaggacggcccgagtgccggcgcggcgatggtcacctcgctggtatcgatgctgaccaaggtgccggtgcgtgccgacgtggcgatgaccggcgagatcaccctgcgtggtcgcgtcacggccatcggtggactgaaggagaagctgctggccgcactgcgtggcggaatccgcacggtcatcattcccgaggagaaccgcaaggacctggccgacatcccggccaacgtcacccgcgatctggagatcgtgccggtgaagtacatcgaagaagtcctggacctggcgctggagcgtccgttggcaccgaagaaggcgcgcaagagtgcgcaacgtgtcacggtgcgcagcaaggccaaaccgagtggaaacgcgcgcgtcaagcattga

SEQ ID NO: 493716 - DNA, 273 bp, Stenotrophomonas maltophilia
atgaacaagaccgaattgatcgatgccgttgctgaagctgcagacctgaccaaggccgagtccagccgcgctgtcgatgccgtcgttgctgccgtcaccaaggcgctgaaggacggcgatgcggtcaccctggttggcttcggtaccttccaggtccgcgaccgtgctgcccgcaccggccgcaacccgaagaccggcgacaccatcaagatcgctgcttcgaagaatccgtcgttcaaggctggtaaggccctgaaggatgctgtaaactaa

SEQ ID NO: 493717 - DNA, 1956 bp, Stenotrophomonas maltophilia
atgctgcagaaactccgcgacaagacctcaggctggatcgtcactgtgatcctggggctgctgatgattccgttcctgttcgtgatcgacaacagctacctcggtggcgttggcgcacagaacgtggccaaggtttccgcgccgccgacctggtggcgttcggcgccgtcgtggtggccggtgcgcatgctgtggcagcaccacgagatcagctcgcaggatttccgcacgcgtttcgagcaggagcgcatgcgtgagcgccagcagcagggcgacaacttcgacccgcgcgcgttcgagagcaccgagaacaagatggccgtgctcgatcagctgatcgacgagcaggtcgtgcgcctggtcggtgagcaggcgggcgtggtgatcggcgacggcgcggtgcgcgagtacatcgcgaccatgcccgcattcctcgattcgaacggcaagttcaacgagaacaactatcgcctggccctggccggcggcaacccgccgcgtacgccgacccagttccaggagctggtgcgcgagagcctgcagcagtcggtgattccgtcgggcctgcagagctccggcttcgtcacccaggcagagaccgagcgcctgttgaagctgctgggcgaaacccgcgacgtcgagctggccgcgttgccgcccgtaccggccgataccgcgccggtcaccgatgagcagatcaagcagtggtacgacagccacggcaaggatttccgccaggccgagagcgtgtcgctggagtacgtcgagatcaacggcgcgaacctgccggcaccggcggcggccgatgaagccaccctgcgcaagcgctatgaagacgagaaggcgaagttcacctcgccggagcagcgccaggcctcgcacatcctgatcaccggtgacggtgcagaagcgaaggcgaacaagatcgctgccgaagccaaggccgctggtgccgatttcggcgcgctggccaaggccaattcggaagatccgggctccaaggaccagggcggggacctgggttgggtcgagcgcggtgcgatggtgaagccgttcgaggacgcgctgtttgcggccaaggccggtgatgtgatcggcccggtgaagaccgagttcggttaccacatcatcaaggtggccgctgtgcgcggtggccagggcaagtcgttcgaggaagtgcgtgacacgctggccgccgaacagctgaaggccgacggtgagcgtggcttcaacgagctggccggtcgcctggtcgatgccatcaacaagagcccgagcgacctggccgctgccgccaaggaagtgaacctgccgctgcagacgctgggcccgatcacccgcgcgaccgccagtggcattgccgctgacccggccgtgctgcgtgcggcgttctccgacgtgctggtgcaggacggcaccgccagtgacccgatcgccctggggggcgcgaccaaccacagcgtggtcatccgcgtggctgcgcacaccccggaacaggccctgccgctggacaaggctcgtgaacaggtgatcgccgcgatccgcgctgaccgccagcgccaggccagcgacaaggcggccgatgccatcctggccaagctgaaggcgggtgccaccctgcagtcgctggccgccagcgagaagctgcagctgagcccgatgccgggcctgccgcgcagccagccggtgccgaccccggaaatcaaccgcgcgatcttcagtgcgccggtgccggccgaaggcaagccgagctatggcaaggtcgacgtcaatggccacgcgctgctgttcgcggtgaacaaggtcaatccgggcgacatcaaggaagtgactgcagagcagcagaagcagctgaaggaacagctgagccagatcgatggcatggccgcggccaaggcctacatcgaggcgatgcgcaagaagttcgtgatccagaccaccgaggcgaacctgtaa

SEQ ID NO: 493718 - DNA, 1203 bp, Stenotrophomonas maltophilia
atgatgcgccgaagtctgccgctggccctgggcctggtcctggggctggccggaaccgccggtgcccagtcgctgggcgcgggcatcggccagaacctggccgccgcggcggccctgccgctggatccggccgcgttgccggccgcgtcggtccgcaatggccaggagatcttctccagcttccgcgacggcctggccgagcccacctgcaatgccgaggccaccagcccgcgctggcagaagcagttcgcccacgccccgtcgcgcctggccaaccaggatgacgatgcgctggtgctgttcggctacgtggttgaagagctgcgcaaggccaacctgcctaccgaattcgcactgatcccgttcgtggaaagcggctaccggcccaatgcccgcaatggcagcggcccgaccggcctgtggcagttcatcgccaccaccgcgcgcaaccaccgcgtgcccatggccaacggctacgatggccgcctgtcggcggtcgattccacccaggccgcagtgcgctacctgaagaccctgcacggcatgttcggcggcgactggcgcctggccaccatggcctacaacgccggtgagtaccgcgtgttgcagtccatgcgcaaggccggcatgaacgcgcagaacgccaagccgtcggcgctgcccggcctgtcgccggtcacccatgcctacgtcgagaagctgcatgccctggcctgcgtgctggaagacgtggaagaccagccgggcgtgatggcctcgctggaccgcaccgtgccggtgctgaaggaccacaccctgcccgccggcaccagcgtccagcagtgggccgcacagcgcgccctggacccggccaggatcgcccgcctcaaccccgccctggcgggcggtggccgcgcctcgtcgggtaccacccgcgtgctggctcctgtctcggctgccaatgcgacggtcgcggacaccgcatccgccctggtcgccagcgctgcgccagtcgccaccgcagcaccgacgccgcaggtggccaagaccgtcgccgcgatcgctgatcgtccgcgcagccgccgccacaccgtgcgtgatggcgagtcggcctggaccatcgcccgccgctacggcatgccggtcaaggccctgttgtcgctgaacggcctgagcggcagcagcgtgctgaagccgggcgccgtgctgcgcgtggaagactga

SEQ ID NO: 493719 - DNA, 765 bp, Stenotrophomonas maltophilia
atgcgactgactgccctgcccgcatttgcggacaactacatctggacgttgatcgacgacgctggcgccgccgtggtcgtcgatcccggcgatgccgcgccggtgcttgcgctggccgatcagggcctgcgcgtggacacgatcctgctcacccatcaccacgatgaccacatcggtggcgtgcccgcgttgcaggcacgttttcccggtgtacgggtcatcgcgcccgtcgaggagcgcatccctgcagcgaccgagcgggtcggcgaaggtgaacgcgttcaggcactaggccggacgttccacgtactatccgtgcccgggcatacccgcagccacatcgcgtttcacactgctgaacatcttttcagcggagattcgttgttcagcctgggctgtggacgcctgttcgaaggtacgccgtcccagctgctggcatcgatgcgcaagctgggtaccttgcccgcgcaactgctgctttgttgcgcccacgagtacaccgtgtcaaatgccgtcttcgcgcggcatgtcgaccccgccaacgctgccctgtggcagcgccaagaggaggctttggccatgcgccgcgatgaccgttccaccctgccggtaaccctggccaacgaattcgactgcaatccgttcctgcgtgtgcacacggcgccgatccgcgcggcagtggcggcgcacctgggccgcgacgtcgttgacgacgtcgacgtcatggccggtctccggcactggaaagacggcttccgcgcatga

SEQ ID NO: 493720 - DNA, 645 bp, Stenotrophomonas maltophilia
atgcccgcgctgcagagcacccgtcaagcgagccaggccccgtggttcgacactgaaccggcgggctccttgcgcgtgctggagcggcagttgctgctgccgcagctgtccgtcctgccgacgcagccctggctgtggatcgcaccgagtgcggcctggctggaggatgcgcagctgggcgggcgcgggctgcggctgttccggcagggccagggctatgccggcgacacccgctgtgcgctgccgctgccgctggccagcgagagcgtcaacgcggtcgtgctgcagcatgtgaccgcgggcgatgcggagcgactgctggacgagtgcgagcgcgtgctgatgccgggcggccacctgtggctgagcagcctcaacccgttcagcccttaccgcacgcattggcgccagcacggactggtggtgcgcacgccacagcggatccgcctgctgctcggccgccacgggctggagtgcgacgatatgcgttacctcggcccgctctggcgcggtgcaggcagtcgccgcacgggcggttgggcgccgctgcgcgcggcctgcctgttccatgctgaaaagcgcacgctggccctgcccgggccgaaaccgttgccggtgcgttggctcggcaccgttgccacctga

SEQ ID NO: 493721 - DNA, 453 bp, Stenotrophomonas maltophilia
ttgaaaaccatcgaaatccacaccgacggttcctgccttggcaatcccggccccggcggctgggctgcgctgctgcgctacaagggccacgagcgtgaactgagcggcggcgaagcgcacaccaccaacaaccggatggagctgatggcggccatttccgggttggagacgctcaccgagccctgcaacatcgtgctctataccgattcgcagtacgtgcggcagggcctgacgcagtggctgcccggctggatccgcaagaactggaagaccgccggcggcgacccggtgaagaaccgcgagctgtgggagcgcctgcatgccgcgacgctgcggcatcagatcgactggcgctgggtaaagggccactccggtgacccggacaacgagcgggtggatacgctggcgcgcgacgcggccatccagatccgcgacgccagcccggtaaactga

SEQ ID NO: 493722 - DNA, 732 bp, Stenotrophomonas maltophilia
atgcgtcagatcatcctcgataccgaaaccaccggcctggaatggaagaagggcaaccgcatcgtcgaaatcggctgcgtggagctgttcaagcgccgcccgaccggcaacaactaccaccagtacatcaagccggactgcgagttcgaacagggcgcgcaggaagtcaccggcctgaccctggagttcctggctgacaagccggacttcgcgcagatcgccgatgagttcctggccttcatcgatggcgccgagctgatcatccacaacgcggcgttcgacctgggcttcctcgacaacgagctgtcgctgctgggcccgcagtacgggaagatcaccgatcgctgcacggtgatcgataccctggtgatggcgcgcgagcgcttcccgggccagcgcaattcgctggatgcgctgtgcaagcgactgggcgttgacaactcgcaccgtgcgctgcacggcggcctgctcgatgcgcagatcctgggtgacgtgtacatcgcgctgacctcggggcaggaagagatcggattcggcctgggggatgacgatggcggtggcgccggtgcggcgctgcaggccttcgataccagcaagctgctgccgcgcccgcgcgtaatggccacgccgtcggagctggaagcgcatgccgcgcggctggagcggctgcgcaagaaggccggccacgcactgtgggatgggccgaaggtggaagagcccgccagcgcgtaa

SEQ ID NO: 493723 - DNA, 705 bp, Stenotrophomonas maltophilia
atgatcgaattcggacacctcacccaccccggcctgcgccgcgagctcaacgaagacacctactacggtgacagcgagctggccctgtggctggtggccgatggcatgggcggccacgcctgcggcgaggtggccagcgcgctggcgcgggaaaccatcgtgcgcgagatccgccgtggcgcgccgctggcccaggccatccgcaccgccgacgaagagatcatccgcgcctcgcggcggcgcaacgacaccctgccgatgggtaccaccgtggtcgccgcacgcgtgcagggcaatcgctatgaagtggcatgggtcggcgacagccgtgcctacctctggcgtgacggccagctggcacagctcagccaggatcacagcgtggtgcaggaactggtcgcgcagggcaacctgacggccgaacaggcacgcgcgcatccacatcgcaacgtggtcacccaggcgctgggcgtcaccgatccggcacatctgaacgtggccaccaccagcggcgagctgcgccccggcatgcagctgctgctgtgcagtgacggcctgaccgaggaagtggacgaccgcggcatcgcccgcaccctcgccttcgaggatgcaagcgcacaggaatgcgtggacacgctggtcgccgccgcgctcgacggcggcggccgcgacaacatcagcgtgatcctggtgcgctgccattaa

SEQ ID NO: 493724 - DNA, 915 bp, Stenotrophomonas maltophilia
atgatgaacgaacgcttcacagatttgacccagccacagcgcgatcgtctcgcgttcgtggaattgcgcgtgcgcttcatcggggagatacgccgtcaggacttggtcacgcggtttggcatccagtccgccgccgcatccagggacttggcgctgtacaaggagttggcctcgggcaacatcgactacgactccaaggtcaagtcctacgtattggggccggacttccagcccatcttcgacttccctccggagcgggtgctgtcgtggttgacccagggctttggcgacggtgagcctatgcggctcaaggcatgggtgatgagcgagagcccgtcacggctcgcgcatccggatctggacgtgctagcgagcgtgacccgggcgatccaccaggagtgtccgctcggcattgagtactgctccatctccagtggtcgcaccgagcgggagatcgtcccgttcgcgttgatcgacaacggcttgcgctggctcgtccgcgccttcgaccgcaaatcgcaggaattccgggatttcgtcattaaccggatcaagtgccccgtggcgcttaaggcgcagctagtggcgccccacgagatgagtgatcaggacatccagtggaccaggatcgtggaactggagttggtgccgcaccccaatcaaccccgtcccgagatcgcggagatggattacggcatgactggcggcatggtgaagatgaagcttcgggcagcgactgccggctacatcctgcgcaagtggagcgtcgactgcaccgcagaccacagccttcgtgggccggagtacagactatggctgaaggaccacttggccttgtacggcgtcaagaacgccgtgctggcaccagggtatgcacccttggatgcggcccgagcaggagcggaatgtgactga

SEQ ID NO: 493725 - DNA, 501 bp, Stenotrophomonas maltophilia
atgaaagaatcctacctaccgacattgctgcagatgaggatgcttgtcggcttccttggcgagcgtgctcagtacgcctggtggccaacggcgttctatgaggcatcaaacaagctcttcctggagccggtcttctcgaaaacgtctcgcctcgctcagtaccacggtgtgctggaagcagccagacgattgcacgacgagcatttgagcgtgggtagctaccacctgttccggttgcccgaagaggtcgagcaagacctgcacgcgaccgtgcaaagtagcgtgggagaagaactcgccagccaggcgccacaaagcaaagaggctgcgcttgatgcgttgaagcgattggctgccacgggcggcacttccagcgtgggtccaacggcggtcgggggcatcaaggatctcgattccaccgacacactgaaggctatcgctgcggcctatctatcggcgttcacacagaacgccaaaacttatccgtatctggtggggtga

SEQ ID NO: 493726 - DNA, 510 bp, Stenotrophomonas maltophilia
atgctcgtttttacgagtcgggccaacccgatccttggcgacttcgtgcgccatgtttactgggctcgatacgccggtggatacacacagatcaccaatgaagacgcgcggacctttgtcgagcgcggcattgatgacggcaagaccatcaagcgctggtcggaaaccactgtacggcgtgtctccgcctatctgaccggatgctgcgccgactacggaatgctcgaacgtggactgcgctcaagccgtcgcatcctgccgttccgtatttcgccagccgtggccgcgtacttggcctacgaactgcatttttcctgtgtcggtgataacgccctgctgactcacgaagactggcagttatttggcttggcgcgcgaagacgtgctggaagaaatcaaacgactctcgctgaagggtttgctcatcgtccaggctgctggcgacgtgatccgcatcagctggaaacaacaagacatggaggcgctctgcgatgtcctcactcaaggctga

SEQ ID NO: 493727 - DNA, 576 bp, Stenotrophomonas maltophilia
atgtcctcactcaaggctgatttcgacgagttgcgcgagcgcatccggcacgggcgcgagcttggccatgcgagcttcgagccgatttattaccttgtcttcccaccagagcagatcctcgaggtgaagcggcaaacgcccgcttgggtggccaagctgcaccaggaaggctgggacgtgcacacgttctccatcgctgaacagatctgggccctactgaaagacgacccgttctggtcgctgtgcgtgatggaggacaagtcagcgcccttggattggccacgtaccaacaaggcgctggcggacatcctgacggcggataacggcctgctgaagcggctggaggatgccctgcagccgctcgaagcccagcagaacgcgctgctgttggtaacggatcttgaggcactgcatccgtttatgcgcatcggcgccatcgaaagccagctccagggcaagtttcacgtaccgacgatttttctgtaccccggcgtgcgaaccggcaagacacgcctgaagtttctcggcttctacccggaagacggcaattaccgctccgtccacgtcggcggctga

SEQ ID NO: 493728 - DNA, 3630 bp, Stenotrophomonas maltophilia
atgaccattcgctcactcttcgatccaagcaaggacatctaccggaccatcgaaaaggtcatcacctatggcgcctcgcaagaaggccgcctcaaggctgagatctctgaatacgtggtcaccgagagtattgaggagcagttccgcaagctcctcgatcgcatgcagcttgcgatggagtccggtggcgaaaatgaggtgggcgtctgggtctctggcttctacggctccggtaagagctcgttcaccaagtatctcggcttggcgtttgatgatcagcgcaccatcgacggcacgccgttcatcaactacctgcaagaccgcctgcacaagccacagaccaaggcgctcctcagcactgtagcgaagcgcttcccggctgcagtggtcatgctggacctcgccagtgaaatgctcgctggcgccacgatggaagacgtctccaccgtcctctacttcaaggtactgcagtgggctggctactcgcgcaacctgaaggttgccgcttttgagcgcatggtcgagaaggacggtcgcacgcccgaactccatgagcgtatcgcccaggcgctgccaggtgccacctgggctcgcgtgcagaacaacccactggccatcgacggcttgatcccgaaaatcgcccatgagatgtacccggcactcttcccggaggccaagtcattctcgtccagcaccgaaggcttcttccagttcgaagaccagcgcgtgcaagagatgatcgacatcgtccgcgagaagagtggtaagcagaacatcatcttcatcgtcgacgaagtcggccagtacgtggcctcacgcgacaacctgatcctcaaccttgatggcctggcgaagaacctcaagaggctgggcgacggcaaggcctggatcatctctacagcgcagcagacgctgacggaagacgacccgcgcgccgcgctgaactccgacaagctctacaagctgaaagaccgcttcccgattcagatcgaccttgaatcgagcgacatcaaagagatttgctaccgccgtctgctcggtaaatcgccagcgggcgagaccgagcttggcaagcttttcgatgcccatggtcaggcgctgcgacacaacaccaagctgcaggacgctaagtactacgacgcagacttcagcaaagagagtttcaccaatctctacccgttcctgccggcgcacttcgacatcctgctgcacctactcggcgcgctcgcaaagtccaccggcggcatcggtctacgctctgcgatcaaggtaattcaggatgtcctgaaaggtgaaggcggttccaaggccatggccgatcagcccgtgggctggctggccaccacggtgacgctgtacgacgaactggaaaaggacattcgccgtgccttcacgtccatccaccaggcggtcggcaaagtgcagattcgcttcccggattcacagctacatcaggacatcgccaagtccgtcgccgtgttgcagatcctcggcaacttgccagtctcggtgcagaacgtcgccagcctgatgcatccctccgtcacggcaccttcgcagctcgacacggtcaagaaagccgtcgaagagatgctgaacgatgtgcatgtgccgctcggcgagaaagatggcaacctcgtgttcctcagcgagaagctgcgggatatcgagcaggagcgaggcgcgattgcgttgcgcaccgtggatgtgaagcgcatcttcaacgatgcgctgcgcgagtccttcgatccgctgcctcgcgtcagcctccacggcacgatggccgtcgcaacgggcctgaaggtccaggccggcagcgccatcaccagcctggccggtgatcagagcaccatccaaaccgttgttgagttggtgccagccagtgactacgacaccgccaagaaccggatgctggatgattcccgcagccgggcgggtcgaaacgtcatcgggctcttggctcgcgcaaattccgaactcgacgatctggcgaacgaaatctatcgctgtcagcgcattgccgagctgcaccgcaacgagcccgaccaagaggtaaaggactactgcaccggccagctcgaccgtgctgccaagctggcgacccagctccagagcaagatcaaacaaactctgcaagccggctcgtttgtgttccgcggccaggccacggcggtgtcggcactggatgctgatttgctggaggccgccaagaagctgctctccgacgttgctgaccaggtgttcgaccggtacgtagaagccccagtacgtgccggaaccgacaccgccgagaaattcctgaaggtcgccaaccccgcggccatcagcagcgcgctggacccgctcggtttggtgcaaaccgtggccggtcgtgcctcgttcaaaaccgaccataaagcgatgatcagcatccacgactacatcgacaagcgcggcacggtcgatggcaagcgcctgctcgacgacttcagcagcgccccgttcggctggtcgccggacaccacgcgctacatcgtcgcggccatgcttatggctggagagatcaagctcaaggtctcgggacgcgaagtcacggccgctgggcaacaggccatcgatgccctgaagaccaacaactccttcaagcagatcggcgtggccctgcgcgacgagcgcccgtccatcgaaacgctcggtcgggcggcagagcggctcactgaactggtcggtgacatggtgatcccgcttgagcaagagatcagcaaggcggcggccaagcacttcacgcgcttccagcacgattacggctccttggctgaaaagctcagcggccttgggctggcgggtagcgaacgcatccgtactttgaaccaggacattgccgatgttctgtttacagatgcgtcagatgctccacagcgtctgggtgccgaaacctccgccatttacgacaatctcaagtgggcgctggaagtgaagcgagcgttcgacaatgggctcgacgctaccttgcgtgacttgcaagctcatcgtcgcgacatcgaagccttgccggacactggcgtgccaggagagctgcgccgcgaacttgccgaagacttgggaaccctgtcagagcgcttgggcaaagaagacttctacaaacacaccaccgacttcaattcgcagctaacccatctgaagggccgtttgcgcgatgcggtcatcacgctctccgatcagcaaaagctgcgtttgaaggaaggggtcgaggatctgcagcgcatcactgagtgggaagaactcacccaggaggagcgcggcaacgccgtgaaccggttggatgggcttgctctgtcagccacccaggatctggccggacttaagaaactgctggctcgcgactacgacatcaacagcaccctcgacgatcttaagcggtcgatccagcggcagggccaggaacgtctgcgccagcgcatggaggaagaacgcgtcaaaaacggagaagaaggtccggccaagctgacaaagtcgatcgcgattcccgtgacgatgacgtcggctgcggacattgatgcgctgatccaacagctacaggaaatcaaggcacagcttggcctttatgtagaggcggaaatcaactttgtgatgcatggtcagggcgcgtga

SEQ ID NO: 493729 - DNA, 1827 bp, Stenotrophomonas maltophilia
atgcttaccaatttggaggtgaatgaaggggccgagacggctaacgacccggggatgcggatgatcttcccgttgaaggaggaagaaccggttgtttccttgtttgtgatcgacgaatcgtcaatggttggagataaggagaatcacggtgatttcatgcagttcggttcaggccgattgctcctggatatcgtgacctttgcccgaatgaacagatcaggtcgcacaaagaatcaccttaccaagctgcttttcgtcggcgatcctgcgcagctacctccggttggagaaaatgcgtcaccggccttgtcagatgcgtatctgagtgagcaattcaagttgaaggtggattcgttcgatttgaaaaatgtcatgcgtcaggcgcagggcagtgccattctcgaccgcgcgacggagttgcgcgacgcgatgctggccgagcggttcaataaattttcactgcagcccaatggacaggatattgaacaggtagatgcccaaagagccgtcgatctggtcgttcaatggttgcagacaaaaacttctaacgtcgcagtcgtgcactctaacgccaatgcgctggactacaaccgtaacatcagagatcgtcgttggggcgatgccagtctgcctatccaggtgggcgaaacgctgttaataaacaaaaactcaacaacgcacgaactcagcaatggcgatctggtcaaggtcatagaggtgggagcagacgcacaacgtgtgccagtaaatctcaagggaggccaccatgttgagttgtggttccgcaatatcaccgttgcttttcgtgatgcggatggcagcgtcatccagacaaactgcctggtactagagaacttgctagattcgcctaaccgtgaattgaccccgttggagcagcgggcgcttttggtagattttcgaaagcgccaccctgacctgcatccaaagtcggctgaattccgcaaagttatccgtgacgacccgtacttcaacgcgctccaggtcaagtacggctatgccatgacctgtcacaaggcgcagggcggggaatggaatactgtccttgttgacttcgggtccggcaggggctctcgcaatgcatcgttctttcgttgggcttatacggccatcacgcgagcagccaagaaactgatcatcgtgaatccccctgacttcacacccaccggtgacatcgcctggactggctcatcaggcgcgtctgaaaaacctgaaaaggctggacttcaggagctcatgactgatccagactggcagaggctttcgttcacacccgctattgcccccttgatgaaaacccatcagcagttacgcctggtgtggggggctcaaggcatcgaaattgaacagttgcagcacttgcagtattgcgagcgctacaccctttcgcgcaatggcaaacgcgccgtagttcagtattactacaatggcaaattacaggtcagtcgctctggatctgttcctggcgccttatcagatagtcaattggcggaggatgcgctcacatcgcttggtgtgctggctgccaaatccagcacggagcagccaagccagttcatacaagagtttctggatggtctggataaagctattgccgaatcgggaattcaacgtatcggtcaaaagtcgatgccgtatcggctgcgattgagctttgctgatgcttgtcgcaaaggtgagattgatttcacttacgacggcgcctttacttggacggctgctcaggaagtcggcggcccaggcagtagccacggcctctatgaggaagtacagcgcttgatgacggcgcaaaaagaggaaaaccagtga

SEQ ID NO: 493730 - DNA, 1440 bp, Stenotrophomonas maltophilia
gtgagctccagtgaaatctttgcacttcgcaagcaaaaacggcatgcagaagccctggatttggccaggtcggagtacccccaaaacaatggtgacgtatggtttcttcgagcctacgcatgggcgctgtatgaccatgtaaaagaaatcgtcgatcgttacgagacaaagcagctatctcctgcggcgttatctggccaactgtcaccggacatgcgcgagttctcgcacatggctgacgcactgcgtggcgatagtgctttttcacaatttcttcgccttgcggggaaggcatccaaggattggtctgaatttcttctttttgcccgctgggtgggaaacgaaagtttttcagaagaggacaagaagcctttcgtcaatgaggcaggaaagactgtagatagtttgtataaacgcttcatacgtgccgtctgtcgtgagacagtggctaaggctgtcgatcctcagtcggatccgacgctgaatgagtggggtcttggcgttttggaacaagcgctaaagaatgagccaaacgaccaatggctcaactactaccagagcaaactgcacctggccaacggcgagccagaccttgcgatcaagcgattgacgccagtgttacgtcgacagtcgcgcgcggcttggccatgggcgctactaggcgagatcctggaagttgagcacccacaggatgcgttgacttgttatgcccatgcaacccagctggctcgggaggagcaggaagtcgcaagggttcgaatccatttggcacagcgcctcgcgcttgcgggccgtttcaatgaggcagcactacaggcgaacctggcactgcagtacagggaaaagcacgcctataaggtgccccaggaactgcatcaactgcttaccagtgactggtatcaagacgcactcgccaataactctctacagccgctgccgaaagctgagtccagtgcacgtgcattgcttcaacaactggaccgacaaaaccttacctacactcgcggtgtcattgaccacatcaatgcagaaaaggggctcagctatatagcgaccggcgccgctaccggcctcgggcttttgcataaaaagtttcccacagtggcaagcttgttgccaggtactgtagtggagattgggcgtgcagaggttgaaggccaagctctggattggcgaatatcagaggttcaaaccattcctggcctgtttgaaatttttagcggcactttgaataggcaggagggaaaaacatttgcattcatcagcaccagccgagatgacgtcttcgtcgccccagagatggcagagacctttactcctgaggtgcaatacgacgtcacctgtcaggccattcggcgtaccaacaagcagggtaagaccggctggcgtgctgtgaaattcatcgagaaaaaagagcagcagctctccgctgacttctaa

SEQ ID NO: 493731 - DNA, 1893 bp, Stenotrophomonas maltophilia
atggccttcgaccaaacaacaagaaaccgcctccagcgcttcgtcaacgatgcgcgccgggtgctggaagaggaattcacccgccagctgcagaacgactatggcatggacccgaacgcgggcaccgtggcggagctagccagcttgcgccatatcaacgacgcccagcgcgaatccgcccgcatcctgcgcgacaccctggcccactacaccgctagtggcgacatgaatgctacccaggggctggaccgcatcgtccgcgagcaagcctttaccgtgctcaaccgcctggcggcgctgcgcatggcggaggcgcgtggcctactggttgagtcggtcggcaacggcttccaggccaagggctttcagctctacgcccggctggctggcaccggcctgggcgaaaccggcgatgcctatcgcacctacctgttcagtgtgttcgatgagctgagccaggacttgcctggattattcgaccgctactcaccgcagggtcgcctgttcccgcgcgaagccgcgctgctgcaggtgctcaacctgatcaacgatgccgacatcgccccgctatggagcgaggacgaaaccatcggctggatctaccagtacttcaactccaaagaagagcgcaaggcgatgcgcgatgcgtcgcaggcgccgcgtaacagccgcgagctggcggtacgcaaccagttcttcacgccgcgctacgtggtcgagttcctggtggacaacaccttgggtcggctgtggttcaacgccacgggaggcgataccgatctgcgcgagcattgtcagtacctgctggtcaagcccgacgaaatgcgccaggccgctaccaagctgcgcgatccgcgcacgctgaagctgctggacccggcctgcggctccatgcactttggtctgtatgcatttgacctgttcgctgagatctatcgcgaggcctgggcctgggagcagcagcacggccccggctcgctggatgtttcgacccaaccccaggctgcactcaagccaatgagccagacctacgaagatgaggctgcatttctgcgagatgtgccgcgcctgatcatcgaacacaacatctatggcgtggatatcgacccgcgtgccgcgcaaatcgcttcattggcgttatggctgcgggcacagcgtgcttggcacgatgccggtgtcaaagccaaagaccgcccgctgatcgggcgggggcatgtggtggccgcgattgcaccgccggcagagcgtgagttgcgccagcagttcgtgaccaacctcgatcagcgcgacgccgagctgttcgagaagaccctgcgactgctcaagggcctgccggagctcggagtgctgctccaggtcgagcgcgagttgccgcatttgattcggcaggtctatgtgggcaaaggcaccggcctgtttgctgtgcaggagcaggagaactggcagcaagcggaggagcgactacgcgaggcacttactgagtttgcccaggcggcaaagtcgacgtaccaagggcgcctatttgcgcaggatgcgctacagggcttgcggctcatcgatctgtgccgagaagtgtttgatgtggtggtgatgaatccaccgtttggcgcgctggctgccaagaccaaggatcaactcgccaaagcctatccgcgcagcaagaacgatttgctggccattatggtggagcgtggcctggaactgctgcgccccggcggtcgcatcggcgccatcacctcgcgcacttgtttcttcctctccagtttccagaagtggcgtgagcaggtggccttgggtattgccaagccagtagtcatggccgacctggggcatggcgtgatggacgacgcgatggtcgaagccgccgcttacgtattggagaaagccgcgtga

SEQ ID NO: 493732 - DNA, 1413 bp, Stenotrophomonas maltophilia
atgcctgccggtgctgttttcggtcataagggaccggctgcattcttggaagagcataatgacgatgatctgttgagtttgctttctgtctgtatatcagcccctttcttgcgattgataggtttgcagcttgcagcgggggatgcggctgcacgttcgtacgaaatcgggacagtccagcggacgccgatacccgatatctcaacggattcgaagcacttattggctgtattggggagggagtattggcgcttaaagcgcaccctggacaccatcgaagagacgtctcacgcgtttgcgctgcccggtgcactgcgcgctcgcctgggcgattacgacccaccagccattgaagctgagctggctcgcattcagtcagagatcgacgccattgcctttgatctctatggctttagcgaagccgaccgcactaccgtgcagggaagccacgtcgaagccaaccagggcgatgtagaagccagcagagacgaggagagcgaggacgatgacagcgctacgccaatcgaccaaacggctggcttactgagctgggccgtcggcgtggcctttggccgcttcgactggcgcctggctacgggtgagcgcgctacgcctgctgagccagaaccattcgaaccactaccggcgaaaagccccggcatgctccccgacggtaccgcaccttttcatgcgtatgcgggcatcctggttgacgaccgagggcacccgcatgacctcgcgcgcttgattgaggaaattcttgttcgcgtcgaggtgcccgtaccggaagacgtgcgccgttggctgcaacgggattttttcgcctttcatctacagcgctactccaagagtcgccgcaaagcgcccatctattggccgctgtccacgacgtccggcagttacaccctgtgggtctattaccccagccttaccagccagacgctgtacaccgccatcaatgacttcgttgagcccaagctcaaacaagtcggtggcgacgtgacggtgctgcgcaatatgggttctgcccgcactcgtgacgacgagaagcagttcgaggcgctgcaagccttcgagttggaactgatcgagctgcgcgacaccctgctcaagctggcgcccacctacaaccccaaccacgacgacggcgtgcagatcagcgccgcaccgctgtggccgctgttccggcacaagccatggcagaaggtgctcaaggacacctgggccaagctagagaaaggcgactacgactgggcgcacctcgccatgaactactggcccgatcgtgttcgagagaagtgcaagactgacaagtctctggctatcgcgcatgggctggaggatctctacatcgagcccgaggccaaacccaagaaggcgcgcggcaagaagaaggccgggggtgatgaatga

SEQ ID NO: 493733 - DNA, 1809 bp, Stenotrophomonas maltophilia
atgattcaggatgtcaaagcgctgccggtcagcttctacttcagccccgatgggaccacgtcgttcttcattcccaagtaccaacgcgagtatgtatggggcggcaagaactgggacgcgctgttcaacgacctggaggagtcgcccagtgggcactttctgggctccatcatctgcgtgaacacccagcaagatggcatggccggcggccgacttgagctgatcgacggccagcagcggtttaccaccatcagcctgttgttctgtgcgttctacgacaagctgaatgccattccgaatccggatcgccgtctgctggtggagctggacaacctggaaagccgcatcttcgtccgcacttctggccagtggcgtctggagcccagcgagcaagcgcagaacaagacagatttccagaaggtgctgagcgatctgtttcccaagcaggtgaaagcgccgaagggcttgagcaatttcggaaaccgccgcattgcgcgcgcctaccgctacttctgtgagcgactggaagggctcagccaggacagcgcactggccctgctggaaaagctcaaagcggccatgctggtcaagatcgaggtgcgtagccattccgacgcattcatgttgttcgagtcgatcaacaaccggggcagcccgctctcggccatcgacatcatcaagaacaacctgctggccgagttggacaagcgcccggactacggcattgaccgagcgtttgacgagtggaaagacctgatcgaccagttgcccgacccggcggtgcaggagcgctttttgcgtcagctgtacaacatgttcaagtacctcaagcgggtcgaggtcaaaggctgcacccgcgccacgcgctcgaacctgatcacgatctacgacaccctgctgcgcaagcgcccggtctggctgttcggcgcgctgcaagccaagggcaaaacctactcggcactgctcaaccccgccgtggcgcgtgcggaatggggcgacgctgccgcagcggccttgcaagacttgcagcgcctgggagccgcgccggcttacgcatttttgctgtgggccagccaggtggcgcagagccagaaatggactgagggtgatgcggtgagccgtctggccgctttgctcaccaagtggttcttttggcgcaacctcaccgatatgccgcccactcgcgaactcgacccgatgttcatggaactggtcagccacttgctgacgcagattcgcggtggcgagatcacggcgctggacggcttcatccagcagagcagtaattggttgctgggacgggcagccccacaagatgtttgcgagtcgcgcctcaagggcgatgtgtacctggagaattacgacgccacgcggttcatgctctgcaagctggaagagacacaccaaacccgtgaaaacaaacgcgacctgtgggtgcatgacgccaatgatcgccccgtttttaccgtcgaacacatcctgccgaagaccgaaaacttggggccgggctgggtgacgatgctcgaagggaaccagaaaggcactgcggctgccattcgcgagcgctgtgcgcaccagctcggcaacctgaccctgagtggctacaactccaagctcggcacgatggaattcttgaagaagcgcgatcgcaagaacgatcagggtgatttcattggctaccgcaacggcttgtacctgaatgccgacttggccagccgagatgattggaacgaggccgccattacggcgcgaacagacaagatgctcaaggaggtgatgtccatcctgagcctgcgggagaacaaatga

SEQ ID NO: 493734 - DNA, 2526 bp, Stenotrophomonas maltophilia
atgacgattgcagaattcattcgagaaagcgtgctgcggccgcgccttaagcaagcgggtgccttggtggtgtatgacgccgacaagcgctaccgcgagcagtgcttcgacctagcagccgagaaggttcgggtcatcgatgcatctgaaagcagcatcgaaagtcgcgaggctgcgctgctggcactgcgcgaggtggggcaacccaaggcgccactggaaggtgtgttgatctatgtgcccaccaagcgcccagaaaccgacgagcagaagcaagctgatccattcgccgtatacgcagaatgcggcgcggtgttcccgcaagatgatggggacgagtatctgagcctgtgcctgcgtgctaagccagattacgcgacagaaattcgaagcctatttgtgcgcgaaccacgaccgcagtatgcggtgattgacgccattggcggcggtgtgagttggccccagttgcgagccacattgcgggtggagtcgggccgcgagattctggccgcactgctggccccgagtgccagtcaatccgaggcactcaaggggcaggagggctgggtgcaagaggcgcttgatttcctccgagccactctgggcctgagcgtgaaaacgcgcggcaagacctggtccgccctggcggatgagctgtggcgctacgtactgttcagcgagttcgtgtttgatttgccggtggcgttgccggacaccttgaagggggtgccgcacgcaccgatggaagccaaacccatcgtcgaggatgtgtgcgaccgtctgcgcagcgacccgaagtcacgcgcgatatacatcgagcgcgccgagaccaccgaggcggagctcaacctgaccgatctgtgcggtgcgattgaagacctgggcgaacgcgacaccttccccttcgaagagcggaccttcctgcgcactgcgatcaagggcattgtcagcggtgacaccgatgccacgcgccgtgtgctgacccgccacaagagttcggtatggctcggcaagggcgaaagccaggcccagtgggagctggtgcggtctggcttgagcctggttgaggcctgcgacgattttgagcgccagctaccggatcacgcccgctcgcaagcggagctgattgacttctacctgggcagtctgcgtgaagcagatcgcttgcagcgcgagtttgagcaagccgcaggcgacttcctcgaccagcacggcttgatgcatgaagtgatcagccaggctcgagcgcgctatcggcgcctggccgaaaaggtccagggcgtgttcgtgaagcacgtcgagactacgggatggccgccgactgggcgcctggccaatgccgatgcctttgatcggctggtagctgatcgactcaaggaaagcggacgcaaagtggcctacctgatggtggacgccctgcgttacgagttgggcgtggccctcgaaaagctgctggcggaagacggtcccgtcgagttgcaagcggcctacgcacagctgccgaccatcaccctagtgggcatggcgagcttgctgccgggcgctcgcacgggtttgaccctggcgctggagagcgactcactcctgcccaagctggcgggggcgccggtgggcaacgtcccgcagcgcatgaatgtgctggccaagcggtatggagatcgcttcgcggaaatgccgcttaatgattttgtccgtggtaagccgaagatcgcggagaccgtcgatctgctggtgcttcgctccacggaaatcgacagccaactggaaagcaacccagagacaacgctcgggctgatccctggcacgctgaagctgatccgcgtggcactgcataagctgcgtggcatgggcttcaaagaggcggtcatcgtcaccgaccacggcttcttcctgaacgcgcaagcagaagctggcgatgtgtgcgtgaaaccgcaaggcaagtggccggtgaatgcccatgaccgcatgatgctgggcgacggcacagcggatggtcacagcttggttgtcagtgcagagaaggtcggcattcgcggtgatttcacccaagtggcactaccgcgcagcatggcgccttatcgctcagggcacctgtatttccacggcggagcatccctggccgaggccgttgtgccggtgttggtggccaggttggataccgctgctcatgcggaactgcgcaaggtggtggtggagttgagctacaagaacggcgccaaacgaataactacgcgattgccggtcatcgaagtgatactggtggccgacgacatgttctcgcaagacatgagcgtggagatcttgctggaagcgcaagacagcaagggcaatgtggtgggagagccgcgcccaggtggcgatgtgaaccccgcgaccagaactttgaccctgatgccaggccagcgcaagcagattgcgctgcgaatggatgatgagttcagaggcaagttctcggtcaaagcgctgaacccaacgactctggctgcctacagcaatctggcgcttgaaaccgactatacagaatga

SEQ ID NO: 493735 - DNA, 2118 bp, Stenotrophomonas maltophilia
atgagccctatggacgaactcgaccaaaaactaaacgccacattcgacggcaaggtgcttcgcaaagacctgctgcatcgaatcaaaaaaggcaccaacgtcccgacgttcgtcctggagttcctccttgccaagtattgcgccagcaatgaccaggcagagatggatgctggcatggaggccgtgctgtcgtcactgcaggagaactacgttaggccggacgaggccaacgccgcgcagtccaaggtcgccaccaagggcaagcatcgcttcatcgacaaggtccatgtccgttacgtcgaaaaagaaaagcgccactgggcatcgctggagaacttcaactcgcaacgcatcgcgattggtgaaaaattctaccgcgacaacgacaggttgctggaaggtggcatttgggcggaggtgaccctggcgcacaacgacatagatgaagacgactatgcgttttccattgaggatctgcggccgatccagctgactcgttttgacttcgaccgttatgcagaggggcgcggggcattcacgcgtgatgagtggctcgcggcggtgttacgctctgtgggactggaacccagcaagctctcgaagcgcgtgcagatgcacttcatcgccaggttggctgcgctggttgagcccaactacaactacatcgagctgggaccacgcggcaccggcaagtcctatttcttcagtgaattctcgccctacgccaccttgatctcgggcggccaagcgaccaaggcaacgctgttctacaacaacgcgcgccgcaaggtgggcttggttggcttctgggacacggttgcctttgacgaggttggcgggatcaaagtgcgcgatccggacaccatccagatcatgaaggacttcatggccaacgggcgcttttcgcgcggggctgaggttattgctgatgccagtttgagcttcgttggcaacatcgacgtgtccgtgcagcaggtggtcaactctaacgagcacgatcttttccagccgttgccgccagagctcgacttggccgtgatggaccgtttcgccgcgtacattccaggctgggagatgccgaagaacagcagcgagttcctgaccagcaactacggcttcatcactgattatttggccgaggccttccactaccagttcaagcacacgaatcggtatgaggaagtgagcaagcgcattcggctcggtaaatcaatcgaggggcgcgacgagaaaggtatcaagaagaccgtctgtgcattcttgaaggtgctgcaccccaacgggccgccgacggatgaggagttcgaggaatacgtggcctatgccacggagtgccgccgccgcgtcaaggagcagatgaacaagcgcaaaccggatgacgagtttgcccggatcaatctgtcttacttcaaggccagcggtgaggaggtggtggtcttctgccctgagtccaaagatgcatcggcaacacaggagccagctcgccgtcgcttgaatcaggcggatgggcagccgactgaggcagtcgaagtgcaacccactgcacaagcggcacctgctgcactggagactccagcgggcccgaccccggtatcaccggccccggcttcgattgcggttgggccgtcaccgatcgagctcaaggaacagcacttcaccatcctctatggcgacaccgggtacagctatgagtcgatcctcggcccctacctccaaggcgcgaagtctgtcgtgatcgaagatccgtacattcgtctgcaacaccagattcagaatttcgtgcgcttctgcgaaacggtgctgaaggctggaaccgtgaagaagatcagcctgatcaccggctacgacgataagacccagttggccgacatcgctgagaagctcgatgagttgaagcagagcctgctggaattggatgtcgagctggaagtgaagttgaacccgaacatgcacgaccgagagattcgtatcgacaacggctgggtgatcaagattggccgggggttggacttcttccaaaagcccggagggtggttcgaggtaggcgtaaatgatctcagtttgcgtaaatgtcttgagaccagggttgatatattcagggttggaataaatatttga

SEQ ID NO: 493736 - DNA, 957 bp, Stenotrophomonas maltophilia
atgcatctggttgaaacaatggcctatgccggtgctaagccgtggcacggtctgggcaataagcttgaacagcaacagcccattgaggtctggaagcgtcaggcaggcatggattggcagatcgaggactccgaggtccgcttcatcacgggtagcaatgccatcggtgccatccactccttcccggagcagaaagtgctctatcgctccgataccagggagccgttggcagtcgtctccaagcggttcaaggtggtccagccgggagagatcctggagttctaccgtaatctgacgcagcacagtggctttgaactggagacggcgggtgtgctcaagggtggcaagaagttctgggccatggctcgtacgggccagagcacgtcgctgaaggggcgtgaccgggtggatggctatcttttgcttgctactgcctgtgacggcacgttggccaccacggcgcagttcacctcggtgcgggtggtgtgcaacaacaccttacagatcgctctgggagacagcagcggagccatcaaggtcccgcaccgcagtcagttcgacccggatgctgtgaagcgccagttggggatcaccgtctcgacctgggacaacttcgtgtctcgcatgaaagccatctgtgaccgtccagttgaccccgatacggtcgatggtctgttgcgacgggtgcttacctaccaaggccagggcaccaccgctgaggtcgtcaacgagcaggcgctggccagtgtccgtgccctgtatgagggcggcggtcgaggcgcgttgttgccttccagccgtgcaacggcctggggcgtactcaacagcgtcacggagtacgttgaccaccaccgacgagctcgtagcgatgatcaccgccgtgatgcggcatggttcggtgctggagctcagctcaagcagcgcgcgtgggatgaagtgatgaagttggtggcctga

SEQ ID NO: 493737 - DNA, 510 bp, Stenotrophomonas maltophilia
atggaagcgcaggcctatcacatgaccacattaggggccggatccaatgaggaggagagcaggatccgggtacgtgaggacaggacgattgcgagggcgctgcagatcctgcagaaacgggcatcgttgccaggggaggtgctgggaggagcaacccagggtgcattgttcttccggctacgtctgggaggcgaaaaccgcgagcatttcgaggttgcctttctcaacacgcagttccagctcatcgcagttgagcggcttttctcagggacgattgatgcagccgaggtccatcctcggatcgtggttcagagggcacttgcccacaatgcatcggcggtactcatggctcacaaccatccaagcggtagcttgcagccctctgcgtcagatcgggcagtcacggcgcggctgaaggctgccttggacaccgtggacgtgaggctgttggaccatttcgttgtcaccagccatgaggtggtctcgatggcctctcaaggcatggtctga

SEQ ID NO: 493738 - DNA, 990 bp, Stenotrophomonas maltophilia
atgagcaagcacaccgcgttgcgtttggttgatacgcgttcactggatcgccagcagtggctggaggtccgcaatggcggcatcggtagttcggatgctgccaccgccgtcgggttgaacccctacaagagccagctggagctgtggcaggagaagacgggccgcaagccaatggaagagatcccccctggacaagaggatccccgctactggggaaccctgctcgaacccatggtggccacggcctaccaggagcgcacggggaaccgggtacgtcgggtcaacgccgttctgcagcacccgacctttccgcacatgctggccaacctcgatcgagaggtaattggttccccgggggtccaaatccttgagtgcaagacagcaggggagttcggctctcggttgtggaaagacggggttcccgagtacgtgcagctgcaggtacagcatcagttggcagtgacggggaagcaggcagcagatgtggcagtgctgctgtgtggccaggcgctgaggatccaccgtattgagcgagacgaagagatcatcagccgcttggtggtattggaggtccggttctgggagcacgtcatcaatgacatcgagccaccagccgatggctcggagtcagcggccagggcgttgcggagcttgtacccaggcaaggacaccgttgtcgatttcagtcaggacccggaattggtcgagaccttcaccaaccttgtctcgttcactgaggcagttgcagagcaggaacagcaggtagaactgctcaagcagacactgcagcaagccatgggggacgcttccattgcccggttcggctcactgggagaagtcatctaccgccgtagtaaggatggcacgtcactggataccaagcggctcgcagccgagcacccggagatcgctgcggcctacacggcagtccgtccggggtcgcgccgattccggatcaacaccacgatcaaagaggtcacatcatgctga

SEQ ID NO: 493739 - DNA, 888 bp, Stenotrophomonas maltophilia
atgctgaagggactggccataacgccgcccgtgattgggcgtatttccatcggccgggtagtagagcgcaatggcaagcggctgcccgaaaaggacgaccagttcaccctcaccagccaggtacagaaccgtgatggctgggtgctgcacccgctggatgaagagctgcggaaggcatcggagggtaacaagctgcgatccatcccggtgcgcctgctcttcgacgatccaaccctgaacctccgggctgactattcgctgttcaatcgcgagaacggaagaccgctgtgtgtaggcaatggagacacctgccggcgtgctgggcctgaaggcatggagacgttgccttgtcctggtccggatgggtgtcagtttgccagtgggggctgcaaagcctatgcccgcttgaatgtggtcattggggacggggcgggggatgtgatgggtagctttgttctgcgcaccacctcctacaacaccatccgcacactggcagcacggctgcactacctcagtgcagtgtcgggcggaaggctgtcttgtctgccgctcgagctgaagctgcggggcaagtccacgacgatgagctaccgatcagcgatctactacgtcgatctggtggttcggagcgggctgacgctcgaacaggctgtcgcagaggcgattgagcgacacgcaacaagagctgcagcggggatcgaccaagctgcactggatgaggcggcgagacagggcttcgctaacggggccttcgaggacctggacgaagacgtgccggccgtggtcgaggagttctatccatcaggccagggtgaagttgtgcaggtatcagcgaacggaagtctcaaggacagactgaaagcgcaagcgtctcggttggtgtcgtag

SEQ ID NO: 493740 - DNA, 306 bp, Stenotrophomonas maltophilia
atgaagcacatgacgtccagtctgcgccagggcgtagacaaaagcatgactttggccgaagagaacaacagtgctgggaaagcaggttggccggatagtccgacgctgcgtctgaaggagctgatcaagctgctccgcgtcagcaggagcaaggcatacgagctgatgaagaccgatccggacttcccgaagggcattccgctctatgacagcgaactgtccccgaagttctactggacgcatgaggcaatggcatgggtagaaggccgtgcagtgaagttccgtcgtgcgaaggaggagaagtga

SEQ ID NO: 493741 - DNA, 345 bp, Stenotrophomonas maltophilia
atgatggctaattttgcagtccactcttcgccgcttgacgcgctcacgcacgctttgagtgaacagtcgaccaaggggaagggcaagctggagcaggacttcaggcaggcctatccgatcctggaacagcacatcgcaaagaagatgcgcaagaagatcttggtagagcagttcaatgctgcgtacaagcatgatctgaccctgattcagttccgcaagctgctcaaggaggagcgttctcgtcgccatgcggagggcgatgctgctcggtgccagagctgtggccatctgttggtcgaggccgaagaacagaccgctgttggcacgacagaggaggatgcatga

SEQ ID NO: 493742 - DNA, 1458 bp, Stenotrophomonas maltophilia
atgatgactatccatcggcagcgttatgcccccaaatatcctctggaaacttttcaccatgttgctcgtgaggcaggccttgagctccttcgcaacgtgcaagttcccgacgccatggttggcatgggtcttatcaatgccatttcgatggcgtgccaaggtctgattgatgtcaagttgccgaccggacagatcaagcctgtaacccagaacttgatgcttgtggctgagtctggtgagcgcaagtccacggtgttcgagctgctgcaggcgcctttccgcgatgcagacacgaaggcgatggctgcgttcaagcagcagactgtggcttatgagatcgactatggactctggacggccaagatgaaggggctaaggagcgcgatcagtaaaacagttgctggtggcaagtctgtcgaagcactcgaggcacagctgaaggagttttcagaaaagaaacctctgcagccccgcctgcgttgcttcctgaggcaggacatcacggccaaggccatcatggaggccgttcagggggatggtgagtccatcgccatcacgactgacgaaggtcatatgctgttcaagagcgaggcaatggcgaatgtgggcctgctcaatcgtctctgggattcgccaggaatgatgccgttagaccgtgcggataacgagcatctgattgcgatgaatccgcgcgtttctgtgagcatcatgacccagtacgaaccgctcaagcagttcctcaataggcgaggctctgtcgcaaaggggagtggacactgggcacgctatttggttgcgtggcctcgctccatgatgggctaccggcgaatcgaggacgtggagccggtatgggaacatctgccggcattccatgatcggatctctgagctgttgtacaagtacaaggagctgtcagctttgggagtcattactcgtgaagtggtgtccttctccatcgatgccagggcacgctgggtagagttggcatcagaaactgagtctttgctgcgcgacggggagtacttgagtgatatcaatgacttcgcggcaaagatcatggagatcgttgctcgactcgctgcgtctatgcagtacttcagtggagagggtggtgacatcaccctcgatacgatcaatcgtgccttcgacatcgttcggtggcatgttgaggagtacaagcatctgttctcaccagcgttcgtagtatcgcaggatcaggccgatgctcaagctctggatcggtatctgtatgccaagtggtggagagggatttattcggatacgtacgttcccaagaaccaggttttacgctgtggacctgtacgtaaccgagcaaggctgaatgcagctatctcgattcttgaaggtcagggagcaattcaggtctgcagtgggtaccgggacaagaggacgtatctgcgcttgatgaatcactactttgaccggagggcactgtaa

SEQ ID NO: 493743 - DNA, 750 bp, Stenotrophomonas maltophilia
atggcaagtttccactacagcatcaaaagcggaaagaaaggcagtgcacgcaggcacgccaactacatcgaacggcaaggttcacatagcgacaaaaaagaccttgtccaaacaggacatgggaacatgcccgaatgggcaggagatgatccgaaacggttctggagcgttgctgacaagcatgagcgtgccaacggagcagtgtaccgagaacatgaaatcactcttccgagtgagctcagcactgaacagcaggtcgaacttgccgaccggcttgcaaagaatctcgcagggatcaaaccctaccaatacgcgcttcatgcgcctgaaggaaaactcggaggggatccgaacccacacatccacctgatgtgctcggacagactgcctgatggcatcccccgtacacctgaacagaccttcgcccgctacaacgccaagaatccttccgcaggcggatgccgcaaggatagtggcggaaagagcccaatggagttgaagcagcaggtgactgcacagcgaaaacttgtagcggacacccagaatcagttccttgaagaaaacggttattcaacccgcgtagaccaccgcagcttgcgtgatcaaggcattgccaggtcccctgagcgccacctcggccaacgcttcgtcaaggagatggcagacgccgagaagtcgcagtatgctcaatgtcgtaaagccgtaaaggcagcttcagcagttaaaaatctgggagaggtaagtgcctaa

SEQ ID NO: 493744 - DNA, 1449 bp, Stenotrophomonas maltophilia
atggaaaacagcaacatcgaatcagggaagtacaagccgcgctttgacttcgaaaaagatcaaaaaacagatccgtctgagactggaagtatcagcgagcttttggaagagctcaactacgagatggcgcatgcgtcagatggcagcaaagccaaacactctaatacctcggggaaaacaataacccgcaaggagcttaaaggagtcattgacttcataaactccacattgggacaagagattcctactgggaactgtacacttccactctccaccctaaaaacaatcaagctcctttacatcaagaacgactccagcgacacccagctgcttcaaagaatatcgaaaccaggaaccattaaggccaccttcgagcactggatagagcgcaacacccccagaaacgaaaagaccataaaagcagcgtcctatctcatatccacacttgagcgtgagattgacgaagaaagacgcagccacatccacaccaacagactcacaccatcgaaactccttgaatactacgccaaacacatcaaggagcttatagaacccatctacatggctttcgatggcaatgatgaagccatagcaagcgcctttatgtttggcgcacatcaaatagaaagctatcaaccctcaactatcctgcccagcaaagaagccgcccccctccacgaaaggctgtacatctatttgctaacactcccattcctgcacttcgttggcgagtatcagcaggttgtcgaatcagaaaacgacgagttgagcaaatacaagatagagccactcttcgctcactccatctcctcaccgacggagtgcgatgccctattgcgacctgtcacatcactcgcagctattcactccttcctgcaaacccatgcaaatgagctggcacgcttggttcaccaagccactggttatgagttgagatccagcgagatcacaaacatagccgacgaaacgcagaaggttctgcatgcctatgtcttccacgaatggcacagaacagatcttgacgtcatcaacatttcaatggcggactgtgttgcagccttatcagccatcacgatccaaaagaagatcaaaacgaagtacacgcccaactggaaaggacagagctcaagcgagaaaacggtatctcgcctactgagtcacctggacacctcaagagacatcgaagagctatatgaagaggactacatcccgcaaggcgcgatgctcaccctctatcatcgatattgcatcgcctacgcattacttttcggtcgcagcaaccgcatggaagcgtttatgcgattccagatcgcatatctgaagcacatgtccatagctcactctcatttcgatcttgaagcaggcaacgaatacgagacagatatcaacattttttgcgaagaccttattcaatacatcgaagatcaagccacctcgcatgcaatgtaa

SEQ ID NO: 493745 - DNA, 1302 bp, Stenotrophomonas maltophilia
atgcgctacgcacttatcgacggcaacaccttctatgtctcatgcgagcgggtcttcgaccccaagctgcgaggcaaacccactgttgtgcttggcaatggcgatggatgctgtatcgccctgtcgccagaggcgaaggccttgggattgaaaatgggtatgcccatcttccaggtccccaaggacatcagaaagcaggtcctcgtcaggtcagccaacttcgcgctgtacggggatctgtcagccaggattgtgacgattcttcaggatctcttccccagggtggagatctattcaatcgatgaaaatttcgtcgacctggaaggcctcaaagaccctcttgcggcctgcctggaagcacgccaacgcatcctgcaatgggtgggcattccctgctgcgctggcctgggtgccacacgcaccctggccaaggcaggcaacaagctcgccaaggaccagtccaagcgtgccgtccatgcgggctccttggccgtcttccatgccaccgcacagaacgtcaacgctctggccgtcgaggatgtgtggggagtgggtaggcgctacgccgaacgcctggcaggcgaaggggtaagaactgctgcagatttggccgcactccccaccgaccatgttcgtgcgcactatggggtagttctggcccgcacccaaatggagctgcggggaattccctgcagcgatctggaactggaagaacccgaacgccagcaactggtggtcagccgtacttttggtcgtgacgtgaccgacccgatggaggccctggccacgttctgcagcgtggcctgcgagaagttacgtaagcgaggccaagcggcaggtgcactgtgggtctggctggacggcaactccttcaagggcgattcgttccatgccagcagagccgcacctttcccctttcctacgcaggacacaggggaagtcctacggacagtgcgacgcctggccaagtcgataatggatcaggcagaccgtggccaaggcatccaggcctataaacgtggaggtgtgggtctgaccaacttggtacaggctgaagcccgtcaggcagacctcttcgttggccctaacgagaaagccgaacgcaccatggccgtgctggaccagatcaatgcgaagttcggcagaggcactgtgggagtaggcaacgtgggctggcgggttggtggagccagacttggagagcagtccaacgtgactatcaacgctcaatggcgacccatattgcattcgttgtcgcccagctatacaacgaagtggggcgaccttctgcaggtgcgctga

SEQ ID NO: 493746 - DNA, 444 bp, Stenotrophomonas maltophilia
atgatgactctgcctgcgatagctctacctgtccgggacggcttgccatccctacacctacctgttctagcctcgactgcagcctgcggctttcctagccctgccgaagacttcttccgggaagaggaccgcttggatctcaatgccaagctggtgcctaacccaccagctacgttcctggtgcaggccgactgcggcgggtcgatggccgatttcggtatccacgacggcgatctcttggttgtcgatcgctcgatcagtccacgacctgggcacacagtcgtggctctgtgggaaggtggcttcgtctgcaagaagctctacatgcgtaacaactgcatggtcttggccagcggtagcggatatccatccatcgtcgtgccagaggatgtcgagctggaaatctggggtgtggttcgctggtccatcacccagcacctctga

SEQ ID NO: 493747 - DNA, 288 bp, Stenotrophomonas maltophilia
atgtcaaagcgtcgcaagttcagtgccgagttcaagcgtggcgcggtggagcaagccagtcggcccggtgtcagctgcgcccaggtagcccgtgagttgggcatccgtgacagcctgctgacccgctggaagcgggaggcacaggcggtgggaaaagccgcctttgttggcaccggtagcccgcgtgacgaggaagttgcccggctcaagcgcgagttggcccggatcaccaaggagcgggattttttgcgagaagcggcgacgttctttgccaaggcatcatcctga

SEQ ID NO: 493748 - DNA, 861 bp, Stenotrophomonas maltophilia
gtgatcgaacgttgccgcgatgagtttccgattcgcctgatgtgccgctgcctgcgggtatcgaccagtggctactacgactggagcaaacgactgcccagccctcgtcaatgcgacaacgagcgcttgctgagccgtatccatgcgctgcaccaggacagccggggcacgctgggggccggccgcatgcaggaggatctggtcgaggaagggttgttagccagtcgaaatcgggttgcccgattgatggcggcagcgggcctgcagggctggccacgcccgaaacggcgtggccagcgcgctcaaccggcactgacgccgccgggcgtgcgtaacctgttggagcgtgatttcagcgtcttggagccggaaaccaagtgggtgaccgacatcaccgagatcaagacccagcaggccaagctgtatctatgcgtcgtgctggacctgtttgatcagcgcattgtgggctggcccatgcatcatcggcaggaccggcagatggttatcagagcggtgcagatggcggtttggcaacggcaggagcggcatccgctgatcctgcactccgaccgcggcagtcaatttcgtagcggcgattaccagggctacctggccgccaatggcctgctttgctcgatgagtgctgtggggcattgtggtgacaacgccgcctgcggaggcttctttggcctgctcaaacgcgagcggatatatcgcacaacgtatccaacactcgatgccgccaggtccgatgtgtccgaatacatcgagcgccgccacaaccccaggatgcgacggcgccgggtcaaacaggatcagaagttttcagccctttccaaacagtccgtgatttcggggtag

SEQ ID NO: 493749 - DNA, 1068 bp, Stenotrophomonas maltophilia
atgaaagcagcacgtttttacgaccgcggcgacatccgcatcgaagacatccccgaacccgtcgtggcgccgggcaccgtaggcatcgaagtggcctggtgcggcatctgcggcaccgacctgcacgagttcatggaagggccgatcttcattccgccctgcggccatccgcacccgatttccggggagtccgcccccgtcaccatgggccatgagttttccggcgtggtgtatgccgtcggcgaaggcgtggacgacatcgaagtcggccagcacgtggtggtcgagccctacatcgtggccgacgacgtgcccacggggccgggcgagaactaccacttgtcgaaaaacatgaacttcatcggcctgggcggccgcggcggcggcctgtcggagaagatcgcggtcaagcgccgctgggtgcacccgatttccagcgacatcccactggaccatgccgccttgatcgaacccttgtcggtcggccaccacgcctatacccgcagcggcgccaaggccggcgacgtggccctcgtcggcggcgccggcccgatcggcctgctgctgtcggcgatcctgaaagccaagggcctgaccgtcatcatcaccgagctgagcgccaagcggaaagagaaagcccgcgaatccggcgttgccgatcacatcctggacccgtccgaagtggatgtggtggcggaaacgatgaagctcaccggcgacaagggcgtggacgtgtccttcgaatgcaccagcgtgaacaaggtgctggacgccctggtggccgcgaccaagcccaccggcgtggtggtgatcgtgtcgatctggagccatccggccaccatcaacgtgcacagcgtggtgatgaaggagctggacgtgcgcggcaccatcgcctactgcaacgaccatcgggaaaccatcaagctggtggaacaggggaagatcgacctggagcctttcatcacccagcgcatccagctggacgacctggtttcacaaggcttcgacaccctgatccacaacaatgagtcggcggtgaagatcatcgttcagccgcgattgaagtaa

SEQ ID NO: 493750 - DNA, 1755 bp, Stenotrophomonas maltophilia
gtgaccgaagtggaccgctacctcgatgcggccacgcgccagaacacggtgcgcagctatgcgtcggcgctgcggcactttgaagtcgaatggcaaggccacctcccagccacacctgacagcatcgcccggtacctggccgcctatgcgcagaccctggccaccagcaccctgcgtcatcggctggccgccattgcctcttggcaccgcgaccacggatttgtcgatcccacgcggtcgccgctggtgcgcaaggtgttcaaaggcatccagaccctgcacccaggccaagtcaagcaagccgcgccgctccagatccgccggctggtcgagctcgatgactggttggctgcagcgatcgccgcggcacatgcccgggatgacggtgcggcggcgcttcgctaccagcgggaccgagcgctggtgctgctcggattctggcgtggcttccgtggcgatgaactgctgcgtctggaagtggcccatctcaccttggtgccgggacaggggatgacctgcttcctgccgcgcagcaagggcgatcggcaggcggccggcgtcacctataaggtgccggcgctgtcgcggttgtgtccggtggaggcgacccaagcgtggctgcaggcggctgacttgcaagaagggccggtgttcgcacccaaggacaagatcggcgactggctggagatgtacaccaaggtcatggaagtcaattactggtcttccaccaactgcgtgaaggcccgctacgacgcggcccgcaaggaatgggaagtgacggtggagcgcgacggcgagacgctggtcatccggccgaagcacctggtgttcgcgaccggcatgtccggcaaggccaacgtgccgaagatcgagggccaggacgtcttcaagggcgtgcagcagcattcgtcgcagcacccggggccggatgcctaccgcggcaagaaggtggtggtgatcggcgccaacaactccgcgcacgacatctgcgccgcgctgtgggaacacggcgccgacgtgacgatggtgcagcgctcctccacccacatcgtgcgctcggattcgctgatggacatcggcctgggcgccctgtattccgatcgcgccgtcgccaacggcgtgacgacgaagaaggccgacctgatcttcgcctcgctgccctaccgcatcatggcggacttccagatcccgctgtacgaccgcatccgcgagcgcgatgccgagttctaccgcaagctcgaggaagccggcttcatgctcgacttcggcgacgacggctcgggcctgttcatgaagtatctgcgccgcgcttcgggctactacattgatgtcggcgcctgcgatctggtcatcgacggcagcatcaagctgcagtcgggcaaggacatcagccacctgaccgagaacgccgtggtgctggacgacggcaccgaattgcccgccgacctcgtcgtctatgccaccggctatggctcgatgaacggatgggtcgccgatctggtcagccaggaagtggccgacaaggtcggcaaggtctgggggctgggttcggacacgaccaaggaccccggcccctgggaaggcgaacagcgcaacatgtggaagcccacgcagcaggaaaacatgtggttccacggcggcaacctgcaccagtcgcgccactactcgctatacttggcgctgcagttgaaagcgcgccaggaagatctgccggtgcaggtctatggcctgcaggaagtgcatcacctgcgctga

SEQ ID NO: 493751 - DNA, 414 bp, Stenotrophomonas maltophilia
atgaaaatcagtgaggctgccgatgccagcggatgccacctggagacgatccgctactacgagcggatcggacttctgccgcgcccggggcgctcgggcaatggctaccgggtctatggcccggcggacattgaacggttgcgcttcattgcgcgcggtcgggacctgggtttcagcttggaagaggtccgcagcttgctgcagttggccggggatgaggccctttcatgcgcagatgtggatcggctggcccgcagccacttggccgacgtgcgtgcgcggatggccgacctgcagcgcatggccggcgagctggaacgagtgattgccggttgccacggagggcagcgtgctgaatgcaccatcctgtcgaccttgcgccagccggtttctgtggaggccgcgcaccagtga

SEQ ID NO: 493752 - DNA, 618 bp, Stenotrophomonas maltophilia
atgagtgactgcggctgccatcacgaggccaagaacgcgcaggagcgccgcgtgctctggattgccctggccttgaacgcggccatggccgtgatcggcggcattgcgggctggatcgcccactccaccggcctgttggcggacgccctggacatgctctccgacgccaccgcctatgccattggcctggtcgccatcgggcgcacggcccgcttcaaggcgaacgcagcctgggtcagcggtagcgtactgatggtgctgggcgtgggtgtgctggtggaggtcggccgtcgagtgatgtacggcgccgagccggtgagtggctggatgatcggcacggcgctgctatcgcttgtggtcaatatgaccgtgctgcgcatgctggcgccgctgaagtccggcgaagtacacctgcgggcgacttggttgttcacccgcgccgatgtcgtggccaacgtcggggtgattctggccggcctgttggtgtggtggctggccagtccgtacccggatttcgtgatcggcgccttgatcgggctgtatgtgatcaaggaagccgtcgagatcctgggtgatgcccgccgcgcacgtgccgacgcacgcaagacccctgcatga

SEQ ID NO: 493753 - DNA, 885 bp, Stenotrophomonas maltophilia
atgctactaacaaccaagcagttggacagcgccgccaaacgaagtggtcacagcagccagccagttggactcttggcatggcaccgatgtccgctttcggccagaagcggaccttcgagaacagccgggggagatgagcacggccttcccagccgcgttgaatcacaggcatgtgaccggtggcgatgcaactattcagtgctagcggggaagcgattcagatatcggcacaagacgaacggcactattcaggtaatcctggatcgtcgggcggtctcgaagcagcgaatcgctcttggttctgggcgttatgtgatcgagcacgccgagccacggtttcgacccggcgggggccgacgagcccttcgagctgcgtgcggccgatctcggtcagcgcaatcaccgcaccctcgccatacaggcagtccccgtgcgtttgcccatccggaccaccgtctctccaacaatacgcagtcgccaccaattgaccattggcatcgaaccatcgcgatgtaccgtccgtcgccgcctgccacctcaatcgattggctaggctggcgctgccggcggacatcaccctgcgatcgggggccgaaacggcgcgaccgggtgcgcgtgcggatacgtgctcgctttggcttgcatcgctggccgatgcgagccgatgttcgcaacggtcagcaggatctcagggggctgtgcggcctggctgcagcacagcgccagttggtgaagccggtgcaaggcggcgccaataccacgctcaggtgccggtgcggccgctcccggaccatgggcggcagcggcccgatgagcgtgaacgtgcagttcgctcgccatacccaagaccggctggaccagcaagcccacggccagctgcgatag

SEQ ID NO: 493754 - DNA, 1266 bp, Stenotrophomonas maltophilia
atggcataccagatggcatactggatggcataccagatggcataccaggcacgcatggcactgctaaccgacatcaaagctcgaagcatcactcccggaagcgcagcactgccacacggcggagttaccggcctgagtctgcttccttcacgcacccagaagggccaaggcaagtgggtcttgcgctacgtaagccctgtcactggcaagcggcgcaacgccggcctaggcagctacccgcacgtgggcgtcgctcttgccggcaagctggctcgcgagatgcgcgaagagattgcactggggcatgaccccctggcgatcaaggagacccctgtggccgcaccggtgatgccatccttccaagaggcagcaaaacaggtacacgccgaactgaagccaggctggaagaatgccaagcacgcacagcagtggatcaacacacttaccgaatacgttttccccaagatcggctccctaccgatggatcaacttcagcctcgtcatatggccgatgtcttgcgcccgatctggctggaaaaagcagagaccgcttccagggtaaagcagcgtttgcatgccgtgatggcctggggctgggcacacgggttcaaccaagccaaccccgtggatgtagtcacacatctgttgccggtacaacccagcaagacggtcagacaagagcatcaaccggccatgccttgggccgacatcccagcgtttgtaaaaaccagactggcggatacaaacgagctagatgtcaccaaacgtgcgctgctgtttttgatcttgaccgctgcgcgctctggcgaagtcaggggaatgacttgggatgaggtcaatttgcgcaacaaagtctggatcattcctgccgatcgcatgaaagccagccagacccatcgtgtcccactctctgagcaagccatcactttgctgcaggtacaggcagggaagcacgatcatctggtcttcccatcgatccagtcccgaacagtcctctcggacatgaccctaactgcgctattgcgccgcctgaaggcccacagcgatagcgacaagcggatagccaccgcgcacggcttccggtcaagctttcgcgactggtgcagcgaggaaggctatgctcgggatcttgctgaacgcgcgctggcccacactgtcaaaaacaaggtcgaagctgcctatcaccgcactgatctgctggagcaacgacgccccatgatgcaggcatgggctgatttcatccttcccagacctgctccggactga

SEQ ID NO: 493755 - DNA, 405 bp, Stenotrophomonas maltophilia
atgaccgctgaaatcctcgttcccgtttctttcggcgagctgctggacaagatttcgatcctgcagatcaagtccgagcgcatcagcgacgagggcaagctggccaacgtgcgcagggagctgtcggcgctggagcagacctggatggcacacccggcggccgtgaaggacatcgccaggctgcgtgccgagctgaaggtggtcaacgagcagctgtgggaaatcgaggacgacatccggctgaaggagaaggcgcaggcgttcgaccagggcttcatcgacctggcgcgcagcgtgtacctgcgcaatgacgaacgcgcgcgcatcaagaaggcgatcaacctggcgctgggctcggcgtacgtggaggagaagtcctatcaggattacgcgcagcgcgtgtaa

SEQ ID NO: 493756 - DNA, 1026 bp, Stenotrophomonas maltophilia
ttgtgcctcctgcgcctgtccgcacttggcgatgtcacccacgtggtgcccctggtgcgtaccctgcaggccgcgcgcccggacacgccgatccactggatcatcgacaaggtcggccacaagctgctcgacggcctgcccggcgtcaccttccatgcctacgacaagaagagcggcatggccggggtcaaggaactgcgcaggcagctgccgccggggcgcttcgaagcgctgctgcagatgcaggtcgcgttccgcgccaacctgctgtcggccttcattccggccgagcgccgcatcggctacgaccgcagccgctcgaaggacctgcatgggcttttcatcaacgaacgcattcccgaccgtcccggcatccatgtgctcgatgccatcggcagcttctgcgaaccgctgggcctgcgccagaccgaggtcagctgggacctggccgtgccgcagtccgcatatgagtgggccgccgcgcagtggcgcgacgatggtcgcccggtgctgatgatctcgccctgctccagccacgtgcgccgcaactggtacgccgaccgctacgccgccgtggccaaccacgcggtcacgcgcggctggcaggtggtgctgtgcggcggccgcagcgaacttgagcgcagcatggccgacgccatccaggcacagctgcacacgccggcgctggacctggtaggcaaggacacgctgaagcagctgcccgccctgctggcccgcgccaacctggtgatgacgcccgattccggcccgatgcacatcgccaacgcgatgggcgccaaggtgctgggcctgcatgcggccagcaatccgaaccgcagcggcccgtactcggatcgtcgctattgcgtggaccgctacgacgatgcggcacgcaagtacctcgccaagcaggccaccgatctgaagtggggcaccaagatcgagttcgacgatgtgatggaactgatcaccgtggaagacggtatcgctgccttcgaacgctacgtcgccgaccacctggggtga

SEQ ID NO: 493757 - DNA, 777 bp, Stenotrophomonas maltophilia
atgccatgtgttgttagactcaatgaaatggtcgcattcgacgccaatgaagcgctgacgccatgccgcgagggtcgcggcatcggggccattctgttcgaccgcgagcggctgcggcaagccgagatcggcctgttctcgccccagcactggggcagcagggcccggccggtgggcgagggcggccgcggcagcgcctggttcgtcgatgcgccgttcggtgccagcgtgctgcgccactacctgcgcggcggcatggcggcccgtatcagccatgaccagtacctctggcgcggctcggaccggacccgcagcttcgccgaattccggctgatgcgcgccctgcgcgagaaaaagctgccggtgccacggccgatcgccgcgttctacatgcgcgagggcctgcgctaccgggcggcgatcctgatggagcggatcgagggcgtgcgctcgctggccgaccgcgcactggtggccggccggggggcaccctgggaggagaccgggcgcctgattgcccgtttccatcgtgccggcctggaccatgccgatctcaacgcgcacaacatcctgttcgatggcagcggccatggctggctgatcgatttcgaccgcggcgtgatccgcatcccggcgaccgcctggcgcgagcgcaacctcaagcgcctgctgcgctcgctgatcaagctgcgcggcgagcgcagcgtggaagacgtgcagaaggactacgcgcggctgcgccgtgcctatgacatggcctggaaccggggcacctga

SEQ ID NO: 493758 - DNA, 768 bp, Stenotrophomonas maltophilia
atggactggtcgctgcgtttcctcggcgtcggcaatgcgtcggcggtcgagctggggtcgccgatgtcggtgattgaacgggaggggcgcccatggctgaccatcgattgtggtggcgaaggcctgaccgcgttcaaggcgcactacgggcagatgccgcaggcgctgttcgtcacccatgtgcacctggaccacgtggccggcttcgagcgcctgttcgtggataccttcttcaatgcgcaccggcgcggcaaggtgcgcctgtacgtgcccgccacggtggtgccgctgctgcacaagcgcatcggggattacccgaacgtgctggccgagggcggtgcgaacttctgggatgccttccagctgatcgtggtgggcgaggcgttctggcacgagggcgtgcgcctggaagtgtttccggtgcgccaccactggccggagacggcctatggcctgcgcctgcagggcgcgctgacctggagcggcgatacccggccgattccggagatgctggcacgctttgccagtgacaacgaactgatcgctcacgattgcggcctgcacggcaatccctcccataccggcgtggacgatctggagcgtgagtacagcgccgaactgcaggcgcggatgatgctgtaccactacgccagcgcggccgatggtctggcgctggctgcgcgtgggcaccgcgtggcgcagccggggcagtgcgtgccgctggcgagcccgaccgccccgcacgtgctggcgcaggacccgccgtga

SEQ ID NO: 493759 - DNA, 390 bp, Stenotrophomonas maltophilia
gtgagcggtaccggccagcccgcaggtgcggcgttggctgccgggctggaggcgctggagcgtgcactgcatgcgccgcaggtgcgtgccgaccgcgagcaactggccgcattgctggatgaggatttcagcgagatcggcagctccggccagtgctacgaccgtgcggccgcgctggtggagattccgctggagcgtgcccaggtgcagatcgaatcggagcagtacgccgtctggctgctgtcgcaggacctggcccaggtgcgctaccgcagccgccatcaccttgatgggcagctgcagcactgggtgctgcgcagttcgctgtggcgccggcacggggacagatggcgcatggtgttccaccagggcacgcccgaggcagggtag

SEQ ID NO: 493760 - DNA, 318 bp, Stenotrophomonas maltophilia
atggcctggatctatctgttgtttgccggcctgctggaaatcgtctgggccgtgtccatgaagcagtccgaaggcttcacccggctcacccccaccgtggtcaccatcatcggcatgatcgccagcttctggttgctggcggtggccatgcgcagcctgccgctgggaaccgcctatacgatctggaccggcatcggcgcggtcggggcgttcgtggttggcattgtgttcctgggcgagcaggtcagcccgatgcggatcggtgcggcggtgttgatcgtttccggcctggtgctgatgaaactctccagcagctga

SEQ ID NO: 493761 - DNA, 10893 bp, Stenotrophomonas maltophilia
atgaaccgcatttaccgtctggttttcaatcgtgcccttggggtaatgcaggttgcttcggaggtcgcccagaaccccggcggaagcgcggtcagcgcagggcgggtgccgcgattgcgggcgcaccagctggcggcggctttggccgccacactggccagcggatcggcattcgcagcgtgcaccggcaccacaaccgtaaactgcgacagcaccaccagcatcaacaactactccaacgcgaccaacggcctcacgctgaacatcgacgcgggtgcattgctgcgtacgccgccgatcgtaggcggcggcaacgcagcaacgctgaccggcgacaacgtgacggtcaacaacaatggcacgatcgatccgagctcgatcatcctcgcctcgcccggcctggtcatcggcaatggttctgccaacaacagcgcgatcgtcgtcaacaacaacgccagcggacagatcaagggtgtcgtcaacatcgcaacgctgctgggcttcggtggacaggcgctggtggcacagaatgtcaacggcaccaccaccatcaacaacgccggcctgatcagcacgtcgctgatcggtgcaggcagcgtttccgacgcgaccacggtagtgacctatggtggtgcagccgccaatgtgaccaacacaggcaccatcgacggacgcgtcggcctgggtgcttctggcggtaacacgttcctcaatgcgggggcggtcagtggcagcgttcacctgggtgattcaaccggtggcaacaccttcaccgcagtgtcgggttccagcgttgtgagcggcggcggcagcgctcttgccggcgtgattaccggtgtcaccggggtaaaggttgcggctgcgggatcggtcgacgccggtaccggcagtggtgcggccaacaacacgctggtgttgcagaacgtcgtcagcggtccggggtccggcaccggcggagcggtgaccacgctgggctggaaccagtacctcaacttccagaagctcaccgtcaacagcggcacctggaacctgcagggtgcgtgggcgggtgcgggtacgaccacgctcaatgatggcctggtcaatttcaacaatgccggttccttcggcacagggctgttcaccgccaacggcggtgccatcgcctccgccacggccggtctgaacctggccaacgctttcagccttggtggaaatctgtccctggcagggaccaatgcgttcagcctggggggcttgctgtccggtactggcgggctgacggtcaacaacaccggcatcgttactctcggcggcgcaaacctgttctccggcggcgtcaacctcaatgccggcggcctggtactgggcaatgccggtgcactgggcagcggcaacctgaccgtgggtggcagcgcttcactggatacgacggcgggcttcaccctgggcaacaatctagtgatcaatggcgggggctcgctgaacctgctgggcagcaatgcgttgtcattgaacggttcgatctccggtgccggcaacctgaccaagagcggcgccggcaccctcaccttgaacggcgccaatgcgctgaccggcagtttcaacctggccggaggcgcgttggcgctgggcgcgggcggcagcctgtcacccaccggcgcgatcacggtcggcgtcggtaccaccctggacctgtcggcggccgccaaccagaccatcggttcgctggcgggcctcggcggttcggtcaacctgggcagccacacgctcaccctcgcggggctgggcgataccagctacagcggtacgttcgccgcaggcacgggtggcctggtcaagctgggcaccggcgtgcagaccttgtcgggcgtgaacaacctcagtggcggcgtggcactcaacggcggtggcctgctgctgggcaatgctgctgcgctgggcagcggtgcactcagtgtcggcggcaacgtgacgctcgatggaaccacgggggcgcttgcactggccaacgcggtcaacctcggttcgggtgccagcctcaatctgctcggcaaccaggcgttgacgttcaacggcgtgatcggtggcaccggtggcctggtcaagagcggtgcgtcgtcgctgacgctcaatggcgccaacaccttcggcggcggcgtggcgttcaatgccggcagcctggtgctgggcaacggtggagcactgggaaccggtgcgctgaatgttggtggcgtggtgtcgctcgacaccagcgcgacgcttgcggtcggcaatggcatcacgctgggcgcgggtggctcgctcaatgtgctgggctcgaacgcattgacgctgggcggcgccatcggtggcaccggcagcctggtcaagaacggtgcagccacgcttacgctgggtggcgcgaataccttcaccggcggcctggcgatcaatgccggcaaggttgcggtgggcagcggcggaagcttggctgccggcggtgcggtcagcctgaccggcgttggcgcggacctggacatctcgctcggcggcaaccagaccatcggcgcgctgtccggtattgccggcagcacggtgacgctgggcagcagcacgctcaccttcggtgatgccaccaaccagacgttcgcgggcgtgatcggtggtaccggcggcctggtcaagcagggcaccggcgtgcagacgctgaccggcgccaataccttcagtggtggcctggaccttacggccggtggcctggtgctgggcaatgccggtgcgctgggaagcggcgcgctgacggtcagcggcaacggttcgctggataccacggcagcgttgaacctgggcaatgcgatcaacctcggcgcggccctgaccctgccgggcagccagaacctggccctggccggcaacatcacgggcaccggcagcctggtcaagaacggcgcggcgacactgaccttgaacggtaccaacaccttcagtggtggactgaacgcaaacgctggcgccctgctgctgggcaacagcggcgcactcggcaccgggacgctgggcatcggtggcaacgtctcgctcgacggcagtgcgccgctgaacctgggcaacaacgtggcactgggtgcaggcgccgcgttgtcgctgccgggttcgcagtcgatcacgctgggtggggtggtgtccggtgcgggcaggctggtgaagaacggtgccaccaccttgaccctcaatggcgccaacagcttcggtggcgggctgaccgtcaacggcggcggcctgctgctgggcaatgccggcgcgctgggcaccggtgcattgtcggtgggggccaacaccacgctggacagttcggtggcgctggacctggccaacagcgtcaacctcggcgccggtgcggtgctggatctgctgggcagccagaacgtgtcgctggggggcgtcatcagcggcaccggcgggctggtcaagaacggtgcggcgacactggcgttgaacggcgccaatacgttcagcgggggcgtcgggctcaacgcgggcgtactgcagcttggcaacgcacaggcgctgggtaccggccagctggacgtgggcggcaacgcttcgctggatgccactgcggcgctttcggtgggcaacaccctcggcctcgccgccggcgccaacctcaccgtgctgggcagcaatgacctgacgctgaccggtccggtgttcggcgccggcgggctgatcaaggatggcgcggcgcgcctcacgctgtctggcgccaacacgttcgggggtggcaccaccgtcaacgccggcacgctggcgctgggggccggtggcagccttgccgcggccggtgcggtggatcttgccggtgccggtgcgacgctggacatctccgcagccggtgccgcgcagaccattggcgcactcaacggcgtcgcaggcagccagctggcgctgggcgcgcagtcgctgacctttggcggcgccggcaacggcagctttgccggcgtgatcggtggcactggcggcctggtcaagacgggtaccggcgtgcagacgctgtccggtgccaacaccttcagtggcggtgttgcactcaacgcgggtggcctgatcctcggcaatgccagcgcgctcggcaccggtgcgctgggcatcggtggcaccaccacgctggacagcacggtggcgttgaacctggccaatgcagtgaacttcggtgcgggcacgcagctgacgctgagcggcagcaacgatgtcacgctcggtggcgtggtggccggcaatggcagcctggtcaagaacggtacgggcctgctgaccctcaacaacaccaacaccttcgctggcggcctgaccctgaacggtggtggcctggtcgtcggtgcggatggtgcgcttggtaccggcgcgctggcggtgaataccagcaccacgctggatgcgggcgcggcagtgacgctcggcaatgcggtcacgctgggctcgggcgttgcactgacggtgccgggcagcaatgcgctgacgctgtcgggcgtggtcggcggcaatggcagcctgatcaagaacggcgctaccacgctgacgctgtccggtgccaacacctacaccggcggtaccaccatcaatgccggcacgctggcgctgggcacgggcggcagcctggccgcggcgggtgacgtcacgttgggggcgggcgccggcttcgatatctccggtgccggcagcagccagaccatcggcgcactcaatggtctgggcggcagcacgctggcgctgggcggaaactcattgacgttcggtacggccggcaacgccgcgttcgacggcgtgatcagtggcggcggggggctgatcaaggtgggcgcgggcgtacagacgctgtccggtgccaacacctttggcggcggcgtgaccctcaatgcaggcgggctggtactcggcaatgacgcggcgctgggcaccggtgcattgacggtcggcggtgctgccacgctggataccaccggcctggcaacgctggccaacaacatcgcgctcaacgccgggctgaccgtgctcgggaccaacgcactgacgctcaacggcgtcctttccggtgccggcagcctgaccaagaacggcagcgcgacgctgaccttgaatggcatcaacacctataccggtggcaccaacatcaacgccggcacgctggcgctgggggccggtgccagcctggcggcgagcggtaccgtgaacctcgccacaggtgccacgctggatctgtctgccggcagcggcacgcaggtgttcggaaccctggtcggcaacggtacggtgaacctcggcgccaactcgatcgaagtcggcggcgccaccaatggcaccttcagtggctcgatcgcaggcacgggtggcctgaccaaggtcggtacgggcatcgagacgctgaccggtgccaacacctacaccggcggcaccttcatcactgccggtacgctggcgattggtccgggcggcagccttgcagccaccggcgcggtgacgctgagcgctgcaggcaccggcttcgatatctccaccgcaggggccaaccagagcatcggctcgttgaacggcgtggcgggctcgacggtgagcctgggtgcacagacgctgacactcggtggtgtgggcaacagcctcttcgatggcgcgatttccggcaccggtggcctggtcaagaatggcgccggcgtcctcatactgggaggcgccaatctgttcagtggtggcgtcgcactcaacggtggtggcctggtggtcggcaacaacgctgcgctcggcagcggtgcgctggcagtgggcggcaacgcgacgctggatgcatcgacaggcgtcaacctggccaacaacatcgggctcgcagcgggcgcgaacctcgacctgcttggcagccaggcgctgacactgggcggtgtgatttccggtaccggcggcctggtcaaggacggtgcggccaccgtgaccctgagcggtgccaacacctacaccggtggtaccaccatcaacaacggcacgctggcgatcggcgcgggtggcagcctcgccgcgaccggcgcggtgaacctggccggtgccggcacgttcgacatttcggcgggcaaccaggccatcggctcgctggccggcgtcgccggcagtacggtggcgctgggtggcagcacgctgaccctgggcggcaccgtggacagcaccttcagcggtgcgatcagtggcaacggcggcctggtcaagaacggcgcaggcgtgcagacgctcaacggcggcagcaccttcagcggcggcgtaacgctcaacgccggcggcctggtggtcggcaacaatgctgcgctgggcaccggtgcggtgacggtcgcaggcgctgcgacgctcgattcgaacacagcggtcaccctcgccaacaacttcaccctcaacaacgcgttgaccgtcctcggcagcaacaacctcaccctcaacggcaacctgagcggcaccggcagcctgaccaaggagggagccgcaacgctgaccctgaacggcaccaacacctacaccggtggcaccaacatcaacgccggtacattggcactgggtgctggcgcgagcctgcacgccagtggcatcgtcaacctggcctcgggtgcgaccttcgatctgtcggcgggcagcggcacgcagcagttcggcacactggtcggcaacggtacggtgaacctgggggccaacacgctgacgatcggtgatgccagcaatggcacgttcagtggttcgttggccggctcgggtggcctgatcaaggaaggctcggggacccagacgctgaccggcaccaacaccttcaccgggggtaccaccatcaacgccggcacgctggcgatcggcgccggtggcagcctggcggcgaccggtgcggtgaacctggccaatgccggtaccaccttcgacatcagcgcgggtggtgcgcaggcgatcggttcgctggcaggcgtggcgggttcgaccgttgcgctgggcggcagcacgctgaccctcaatggcgtgggcaataccacgttcgccggcaccatcggaggggccggtggcctggtaaagaacggcgcaggcatccagggcttgactggcgtcaacgtcttcacgggcggcgtgaccctcaatgccggtggcctgctgctgggcaacgacggttcgctgggcaccggcgcgctgaccgtgggcggcaacgccagcctggacggcaccagcgcgctgaccctggccaacaccgtgcagctggccaatggcacgctgaccctggcgggcagcaacgcgctgaccttgaatggcccgatcagcggcgctggcggcctgctgaaagatggcgcggcacccgtcaccctgggcggcgccagcacctacaccggtaccaccaccatcaacagcggcacgctggcggtggcggccggtggcagcctgtccggtgccagcacggtgaacctgtccggtgccggcacgttggacatcagtgccggtggcagccagagcatcggtggcctggccggcgtgaccggatccagcgtggtgctgggcggtgcgaccctgaccaccggcggcaacaacggcagcaccaccttcggcggtgtgctcagtggcactggtggcctggtgcagagcggcaccggcacgctgaccttgagcggcgacaacgtctataccggcggcaccaccatcaatggtggcagcacgctgcagatcggcaacggcggcagcaccggctcggtgctgggcgacatcaccaacaatggcagcctggtctacaacctgggcacgacggcaaccgtgggcgcggtggtcagtggcagcggcggcctgacccaggccggtagtggcacgctggtgctgaccggcaacaacacctacaccggcggtaccaccatcaatgccggcggcacgctgcaggtgggcaatggcggtgcgaccggcgcgatcgtcggtgacatcaccaacaacggtgcgctggtgtccaacgtggccggcaacaccttgctgggcggcaccatcagcggcaccggtggcctgacccaggccggtgccggtacgctgaccctgaccggcaacaacacctataccggcggtaccaccatcaatgccggtggcacgctgcaggtgggcaatggcggtgccaccggtgcgatcaccggcaatgtcgccaacaacggcagcctggtcttcgacgtcgcgggcaacaccaccgtcggcggcgcgatcagtggcagtggtggcctgacccaggccggcagcggggtgctgaccctggtcggcaacaacacctacagcggcggtaccaccatcaatgccggcggcacgctgcaggtgggcaatggcggtacaaccggcgccatcgccggcgacatcaccaacaacggtgcgttgatctccaacgttgccggcaacaccgcgctgggcggcaccatcagcggcagtggcggcctgacccaggccggcagcggtacgctgctgctgacaggcaccaacacctacaccggcggtaccaccatcaatgccggtggcacgctgcagctgggcaatggcggtgcgaccggttcgatcgtcggtgatgtcaccaacaatggcacgctgctgtccaacgtggccggcaacaccacgctgggcggcaccatcagcggcagtggcggcctgacccaggccggcagcggcacgctgaccctgaccggcaacaacacctataccggcccgaccaccatcaacgccggtggcacgctgcaggttggcaatggcggtgcgaccggtgcgatcggcggcagtgtcgtcaacaacggcagcctggtgttcaacgtgggtggcaacaccaccgtcggcggggccatcagcggcagcggcggcctgacccaggccggcaccggcaccgtggtcctggccggcaacaacacctataccggcggcaccaccatcaacaccggcggcacgctgcaggtcggcaacggtggcgcgagcggtgcgatcaccggcaacgtcagcaacaacggcagcctggtgttcaacgtgggcggcaacaccaccgtcggcggcaccatcagcggcagcggcggcctgacccaggccggcaccggcaccgtgatcctgaccggcaacaacacctataccggtggcaccaccatcaacgccggtggcacggtgcaggtcggcaacggtggggccagcggcgcgatcaccggcaacatcaccaacaacggtggcctggtgatcaacaccggtggcaccaccacgctgggcggcagcatcagcggcggcggcagcatcgtgcaggccggccccggtggcctgaacctcggcggcaacagtggtggcttcaacggtaccggccaggtcaccggcggcggcctgaatgtcaccggcaccatcggcggccagtggaccatcggcagcggcaccacgctgtccggcaccggcaccatcggtggcaccggcggtggcgtgacggtgtccagtggtggcgtgctgtcgccgggcaatggcccgggcaacggcagcggcacaggcaatggcaccggcacgatcactgtgggtggcaacctgaccctgtcgccgggcagcacgctgggcatcgatctgggtgccagcggcagcgatacggtacaggtgggcggcagcgccaacgtgggtggcagcaccgtaaaggtgaacaccatctcgccgagcaccagctaccagcagggccagcagtacacggtgatcaatgcgggcggtggggtgagcgggcagttcgcctcggcgaactcgccgtcggccttcctgaccatcaccccggtctacaccgccaacaccgccaacctgcagatcgacgtggcgcagacggcggcgttcaccaccgtggccaacacgcgcaaccagtacaacaccgctgcggcgctggacagcctgccgcagagtggcgcggcgctgggcctgtacaacacggtgctgctgtatgacgccagcactgcgcgcagcgcattcgaccagctctccggcgaagtgcacgcggccagccgcgcggtgctgctgtacgacaactacctggaagagggcatccgccagcgcctgggcagtgagctgccgaccgtgcgtggtgagcgtgcctcggcctggctggccggtagcggcaaggtgttcaagcaggatggcgatggcaatggcgatgagatccgttccaaccgcaatgcggtgatggcgggtgtggactggcagctgggtgaacacgtggtgctgggtgcggcggccggcaacgaacggctggatacgcgcctgtacgatcgcagttcgcgcgcccgcctgcgcggcaacacgttcggcctgtatgcacagggacagtggaacaacggctttgcggtcggtggcagcgtgtcgcgcggtgactaccgcacgcgcaccacgcgtgaagtgcctctgctgggccagaccctgtacagccgccaggattcggacgtgaccatcgcccaggtcgaaggcagctggacctggacccatggcaggacccaactgcagccgtacgtgcagttcacccggcactgggtcgacagtgatcgtgcgctggagcagggtggcagtgccgcactggtgctggaaggcggcaaggacacgctcaacgtcagcacggtgggcgtgcggggtcgctgggacgtgggtagcggcgcgcgcttcccggcgcagctgaccgtcggcctgggctggcagcatgcatcgggtgacaccgatgtggccagccgcaaccgcttcgcggtcggtggcgatgccttcgatgtctacagcgcggtgatggcacgcaatgcgctggtcagccagctcggcgtggcggtcggcctgggtcgcaacagccagctgtcgatgttcgtgcagggccagcacggtgatggccgccgcgatgtcggcgggcagatcaacctgcgggtaggcttctaa

SEQ ID NO: 493762 - DNA, 654 bp, Stenotrophomonas maltophilia
atgacagcaacaacctggcgcgctgacatgcaggtgctgctggccagcctgttgatggcagcaacctgggccgccgccgcgcaatccacggacgctgctgacaacgaacctccacaggcgcgattgctggcacgcgcctatggcctgggcccactcggtccaagctcgcctggtggtgaggtcgaggtcgagatccgtttgcgcgggcctgccatccgtattgatttccgcggcgacaatgcgcccgatgcatggctgaccacccagggccagcgcggccgggcatggctggtgagcgagcgcggcaactacacgctgccggtcgccgacgccagtggtccctactggtacgatcctgccgccccatgccacacgatcggagggcgctgctctcccgcacccggcgagttcatcctgggtcgcctcgctgccggctggcgctatgacagtgcgcatggccctgatggcaccacctccggcacgttgtggatcgatacccgcacgggcctgctgctgggttaccgcggacgcaccggcaaccagcgtaccgaacgcggcttgcgggttaccgaggtcactttcgatgaggtgccgtcgagcctgttcgacccgcccgccggattgcgtcgacgcacgcaggatgcggcgaactga

SEQ ID NO: 493763 - DNA, 735 bp, Stenotrophomonas maltophilia
atggtgcccttctccgcctgcggcaccgccatccacgagggcgttgcaatgaagcacatccgcacatccatccgccagcagcgggggcaatcgctgattgaattctgcatcgtggttccggccttcgtcttcctcatcctggtcatcttccagttcgtcctgatctatcgcgccaagtcgctgctggatttcgccacgctgcaggccgcgcgtgccggcgcggtcagtggcgtcaatcattccgagatgcgcagcgcactggaaatggcgatggctcccctgtacgcgacctcgccggatgccgccggtgccgtcgccgcccgcgccaaggtcgccctgctgtggaagaacccgttgctgtcaccgaagatcgaggtcatttcacccagccgcgcggcgtacaacgagttccgcgagcgccagttcgatgggcgctatgcgctgccgaacgacaatcttgccttccgcgatgcacgtgtcggcagcagccgcgtcagcgtgcaggacgccaacatcctcaagatcaaggtcacctatccgatgcccctgatcgttccctttgccgaccgggtgattgctggtctttcagacctggtcagcgaaggcgacagcttccgcccggcctcgatgctgatcgaggacccgatcaccggccatcgccgcatgccgatcgagtcctacgcgatcgtccgcatgcagagccccgtgcatgacagcaacaacctggcgcgctga

SEQ ID NO: 493764 - DNA, 384 bp, Stenotrophomonas maltophilia
atgagaaccggcgccctgatccgcgaccaccagcagttgctcagctgcgtctggcatgccgatcgctggcaccagcggctgcgcggcctgctgttgcgcgcgccactccagcctgggcaaggcctgctgataaccccctgctcgagcgtgcacaccctggccatggggtatccactcgacctgttgttcctggaccgcgatcagcgcgccgttggctggcgcgaggccgtgcgcccatggcgcggcgcctggtgccgcggcgcctactcgacgctggaaatgccggtggacagcctcaggcatattgctccggtgctgggcgagacgttccaatggtgcccttctccgcctgcggcaccgccatccacgagggcgttgcaatga

SEQ ID NO: 493765 - DNA, 891 bp, Stenotrophomonas maltophilia
atgaacgccctgctcatcctggtcgcactgcttgccgctgccgctgttgggctgcttgcattcgcgctgcgcggactggtgcagtcggtcgaggtggaccagcgcaactaccaggatccgctgccgctgctgctgcgcatcctgtggccgctgattacggtcgctacgcgcctggccgggccgcgcctgtcctcggcacagctggagcgcgcgcatcgcagcctgcagtcggccggccaggacttcgtgctgtcaccggaagaactgtatggcgcacgcatcgtctccgccgccgtggccagtagcttcctgttgctcaccatcatcctgctgggccggttcggagtcggctccgtgctgatggccctggcattcggcgcaccgttcgggtggatgtatcccacgctgtggctgggcgaacggcggaaagcgcgctccaagcatgtgatccgcgacctgcctatcttcctcgacttcatcaccatggccgtcgaagcgggcctgaacatcaccggtgcgatcgaacagtccgtcgacaagggtccacccggtccgctgtcacaggagttctcgcgcatgttgcgtgatctgcgcgccggccttccgcgtgccgaagcgctgcggcgcatgtccgatcgcgccgacatttcccaggtgaccagcttcaccagcgctttgatccaggcggaccgggtgggtgccagcctgagtgacacactgcgctcgcaggccatgcagcgccgcgaagagcgcttccttcgcgccgagaagctggccctggaagcgccggtgaagatgatgctgccgctggtgctgttcttcttcccgctgatcttcgtcgtcctggcctacttcatcttcctgcagatgaagcagcagggcatcctgtga

SEQ ID NO: 493766 - DNA, 855 bp, Stenotrophomonas maltophilia
atgagtgacatcctgctgatcgccctgctgtgttttgcctgcgtgacgggctcggtgctgttgctggcgcgtgccagctccggcttcatggaccgttaccgcgccaacttcatggaccaggcgcgggtcaatctggccgacatgttcctgttcgtcgacccgcgcgtgctgttcaggaccaatgtcctgatgctgctggcgattcccgtgctgctgtggatcgtcaccggcggcaacctgctgctgccgatcctggccctgatcctgctggccatagcgccacgcaagatctacctgtggctgaagcagcgccgcctcgaccagatccagcagcagttgcccgacgggctgctgatgctggccggcagcctcaaggccggcgtcggcttcaatcctgcgctggaagcactggcccatgacggcctgcctccgctggcccaggagctggcactggtactgcgcgagcagcacatgggcgtgcgcacggaggaggcgctggacaacttcgccgcccgcgtgcccattgccgacgtgaagctgttcgtggccgccgtcagcatttcgcgcgaggttggtggcaatctcgccgagagcctctccacgctcgccgaaacgctgcggcgcaagctcatcatggaaggcaaggtcaaggcacttaccgcgcaggggcgcctgcagggcatcgtcatggcgatgctgccagccggccttgtcggcttcctcgtgctgttctatccagaaacgatgaaccccatgttccacaccttcatcggctggtgcgtcatggccctgatcggggtactggaatacctcggctaccgcatgtgccgcaaaatcatgacgatcgatatatga

SEQ ID NO: 493767 - DNA, 1725 bp, Stenotrophomonas maltophilia
atgttcaacatcctcatcgacacacccaaccgcgaccagcgacgtgtccgctgcctgcaccgtgaatgcgggatcggccgtggcgacggcaacctggtggtgctgcagggctggagcatcgcccaacgccatgcggcgctgaagcgcgaggaccagggcatcttcatcgagagcctgggaggccgctcgccggtactggtgaatggcgaacaggtcaaaggcagccgtggcccgctcaccagccgtgaccgggtgcagatcggcgattacctgctgcaggtggtggacgacgacccgccagccgaacccaccgccgatgctggaagtttcaatgcgggcgcggccaacgatgtgccggtggacgccacgcccgcaccggcacccgcaccggcgcagccatccagcgaacgccagctggcgcggccggagcagctgccaccggacatggcggtctatcgtgcaaagctgcatgcctcgctggtcaagcagatggacctgcgccggctcgacgtgcgcagcatggacgatgagtcgctgcgcaacgccacgatcaagctgatcgatgaagtgatgcaacgggagttctccgagctgcccaagacgatcaacccacgcaggctggccaaggaggtgctcgatgaggccatcggcctgggcccgctggaagacctgatcgacgatgcgacggtgacggaaatcatggtcaacgcgcacgaccagatcttcattgaacgtgcgggccggatcgaacggtcccccattgtcttcaccagtgaccgcgcggtgctgtcagccatcgagcgcatcgtgacgcccctcggtcgccgcatcgacgaaagctcgccgatggtcgacgcgcggctgaaggatggctcccgcgtcaacgccatcattccgccggtggcgctgcgcggcccgagcatcagcatccgaaagttcgccaagcgcaagctggaaggaaaggacctgctcaccttcggttcgctcagccagccgatgctggaattcctgatcgttgcggtgcgcgaacggcgcaacatcgtcgtcaccggcggcaccggctccggcaagaccaccctgctcaacatcctttccaacttcattcccgataccgatcgcatcgtcaccatcgaggacgcggccgaactgaagctcgtccagcccaacctggttgccctggaagcgcgtcctcccaacatggaaggcaagggccatatttccatccgcgacctggtgcgcaacgcgctgcgcatgcgcccggaccgcatcgtggtcggcgagtgccgcggcggcgaagcacttgacatgctgcaggccatgaacaccggccacgaaggatcgctgacaaccgcccatgccaacaatccgcgcgaggcgctgtcgcgcctggaagtgatggtcatgatgtccggcatggagctgccgatgacggtggtgcgcgaacagatctcgtcggcagtggacctgatcgtgcaccagaagcgcttcccctgcggttcgcgcaaggtcagccacatcactgagttgacgggcatggaaagcggaaccatccagctgcaggatgtgttcctgttcaaggcacgctccactgccggacgcgatggcaaggtggtgggcgagttcgtcgcgaccggtgcagtgccggagttctatgaagagcttgccgagcgcggcgtcgccgttgacctggacattttccgtaccgggggacggcggaatgagtga

SEQ ID NO: 493768 - DNA, 1497 bp, Stenotrophomonas maltophilia
atgcgcagcaataatggaatccgcagcctcattgccgccactgcggccatcgctgttgtcacctcgccactgctggccgtggcacagaccaccggcacccagctgaccccggtaccggtcatggccgcaccgcgccctgctgtccaggcgcaaccgcagcccaacaccaaccatgcaccggtacccggtgggcagagcgccttcccggcgccggttcccgatcccgcctatcgcaccagcgcgtcggccatgcccgcggtgccactgcccacccgcgcccggatctatgccggccaggccgccgtctacacgctgcccagcgggctcaagcgcgtggccgtcggtagtggcgagatgctcgaggtcaccaacgtcggcccgcgcgacctgatcatgatgggcatgaagcccggctccaccacggttcacctgtggctgcagaacggcaagcagctgcaggtgcaggtggacatctccgagaacgatgccgtcagcctggccgagaccatccgtaccctgctggccgacgtggaaaagatcaatgtgcatgcggtcgccgaccgtgtggtcattaccggccaggacatcaacccgggcatcggcagccgcattgatgcgatccagaagatctacccgacggtgttgaatttcactactgccgacccggtgggcatgcgcccgatggtgcagatggacgtgaagatcatggaattcgacaccaatgcgctggaagaactcggcatccagtgggacaacgtcatccgtggcccggtggcgggcatcgtcaaggatttcaccaacaacaactactaccgcatcaaccccgagcagagcccggccaacggcgtgctgctgccgaacaagctgcagggaacccaggccttctttggcatcgccacgcagatcggctcggcgatcaacctgatgatgaacaagggcaaggcgttcctgctggcctcgccccaactcagcgcccgcagcggcgggcaggccaagttcctggccggcggcgaagtgccgatcccggttccgcagggcttcggccaggtcaccgtcgactacaaggaatacggcatcaagctcgacatcgagcccctggtcaacttcaaccaggacatctccacccgcatcctggctgaggtcagccgcgtcgatccgacggtgaccgtgcagggcgtgcctggcttcaccacccgccgcaccgagtcggaaatcaacgtccacgcaggggaaaccatcgtcatctccgggctgatcgactccagcgcgcagcaggatgccaagcgcctgccgctgctgggcgatatcccgatcctcggaaagctgttccgctccgatggcttccgtggcaaccgtaccgagctggtgatgttcgttactccgcgcgtggtgacgccgggctcgcaggaaaacctcgatggcctggagcgtgcgcgacagatccaggagcgcggccagcaggccatgccgcgccggaacaaagatttcgtgcagtga

SEQ ID NO: 493769 - DNA, 795 bp, Stenotrophomonas maltophilia
atgaaggcgctcccgctgaaagccaaccgcaacgtcgtcttcatcatcatcgccctcgcgctcggcctgttcgcggccctggtcgccgtgcgctacgtgcagaaggcagtgaacgagcgtgccgctccgccggtggaaatggtgccggtagccgtgcccaagaccgacatggagccgggcagcattgtcaccgttgccgaccttgcagtgcgcgaagtccccgccgacctgccgcctgccgatgcgatcacgccggacaatgtgtccgaatacagcggccgcatgctgcgcgcgccgatccgcgaaggtgcaccgctgggtgccagtgcactggtaccgctgtacgaccagttctcgcgcgtgattgccaagggcaacgtgggctacaccctccaggtggacgagacgaactcgatctccggcatgattgcccccggggatcacgtcgacatcctgctcaccgtcgagcaggaacagaccggtgcccgggtgctgccgctgcttgaggacatcaacgttctggcaaccggcaaccgcgtcggcgaaacgccggcctcggaagaccagcagggctattcgaacatcactctggaactgacaccggcacaggcgcagcgactcacggtcgccgccaaggccggttcgatgcgggtgatgcttcgccaggtggaggatcgtggtgcgttcggcctcagtggcatgacgcagagggaactgctcggcaacggcacgcagggtcgtgctggcgtgcaattcatcattgggggcaaagggtcgacgaatgcgcagcaataa

SEQ ID NO: 493770 - DNA, 186 bp, Stenotrophomonas maltophilia
atgagaaaacgcattcccccgtccctacgccgccagcgcggggccgcactgatcgagtacgccgtggtcgcttccgtcggtgtcctggtcctggtcgccgagccgaacatcgtgctcgagctgatcgattcactgcgcaaggcgtaccaggggttcacctatatgctgtcgatgggagtcgtatga

SEQ ID NO: 493771 - DNA, 669 bp, Stenotrophomonas maltophilia
atgcgccgtcgcgttgacctgctggcggcactggccgcgctgctgttcgcctggcctgcgctggccgcgtcctggccggacattcccgagcccgagggcgcgcagagcgagtgggtggccaaggacatgctctacaacggcctgcccatgcgcatctcgcgcttcacgtccgcattgccggtgtcgtccatcgtcagctactacaaccgcgaatggcccgggcagaccgtgatcaacgaggtcggcggcaagaccgtgatcggccacgcacacggcgagtactacgtgaccatcgaggtatcggccaagggcagtggcagccagtcacagatcggcattacacgcctgctcaagcgcaagcccgatgccgcggccggcgccgatttcccgaaaccgtccgggacgcaggtgatcaatgacatcacctacctggacacgcccgggcgcagcctgtccatggaaagcacgctgtctccgttccagaccgatgccttctatgccagccgcctccctgcggacggctggagccgaagttccggccctgcggggtgttcgatgatcgcgctgcagtgcgttgtccgctacagcaagggcagccaggaaatgaccatgaccttcaaccggcacgagcagggaacctcgattgtcgtcaaccagtcgcagcactga

SEQ ID NO: 493772 - DNA, 816 bp, Stenotrophomonas maltophilia
atggacagggaacgcccattccgcggcgcgcgtcgccagcgcggccagagtcttaccgaagtcgccgtgctctgcgccgtgctggtgccgatcttcctgctgatcccgatcctggccaagtacatccacgcccgccaggccacccagcaggccgcgcgcgcgatcgcctgggaagccaccgtatcgccggactacaagctgccggccggcggccgccagcgcgatcttgccgtcgaccgctatttcgggcgtgccaacgatcccatcgtcagccaggcgcagaccggcgcacgcgatgccgccgtcggcgacgtcctgatgaataccttctccaaccagccgctggtgcggcgcggtgacctcgccctggtctcctacaccagcacgtcggcaggcggcatgatgaagaagatcgccgacgtgacctcgatgttcggttcgttcccgcccaaccgcaacggcctgacccaggcccagctgcagttggatgtgcaggatctgaaaagtgccaacggcagtgctgccgcctatctggaacccttcgattcgctgggcctgaagctgcaggccacccatgtggtgctggccgacccctggaatgcagccggttccgggctcaaggtcaactcgtcacgctcggtgatcgcgcaggtcaagccactggtgccatcccagcacatggcgggcatcgccaaggcgtttgacggcctctccggcatcccgatgatcgggacgctgagcaggcttgatcccggttacatcgcgcccgacgtggtgcctgtcgacaagttgcctgcctatgcgccgtcgcgttga

SEQ ID NO: 493773 - DNA, 786 bp, Stenotrophomonas maltophilia
atgacgtttgctgttttcaatcgcctgcacctgtcgatcgccacactgctgatcagcggctgtggcagcgcggcggacaacggcgagcccgccgctgccaggaacatgccgggcatccatcttgaccagattgccgaaaccctggtggatggacgcaacgcggcgcgcaccagctaccagcaggcactgagcgactgccaggcggcaggattgccgacccgcgcactggatgacgccgatgtcgcccgcctgggaaccgtccgttacgaagcctggctttccagcaaagaggaagtgttccgtacccgcgaatggcgcctgctcaacgatggccctgcgaccagctgccagttccggctggaggccaccggcctgcaggagacccagagcgcctccggcgtggagcaggtcgatctggcaacgggagagcgtagccagtcccccgccgacagcgacgggctcacccgctttgccgccgaagccgacgaaggcagcgcctcgccgggcttccagcgcgcgggcaaccgcagggtcgctggccagccgtgcaacgtgtggaaggacgagaacggacggttcagccagtgcgtgtggtcggctggtgccagctggggcttcacccccggtgcactgaacgactaccggccgagccgctacgccattgtcctggagcaggaacccctcgacggcaatggcacccgcctgaccacgcagcgcatgacggtgggccaaccctttgaacgcggcgacctcgaggtaccgcgcgaaccgtcctcccaacgatga

SEQ ID NO: 493774 - DNA, 1452 bp, Stenotrophomonas maltophilia
atggttctcgggctggcactcattctggttctatgcatcgggattgtcctgctgttcaacacagggcaggtggtgaacaagaaggtggagctggtcaatgcggccgacgccgccgcctacagcgttgcgatccagcaggcacgcgcactgaactacgcggcctacatgaaccgtgcccgcgttgccaacgaagtggccgtggcacagacgatcagcctctattcgtggctgaaccagatgcacaccacctccatcgtcatccgcaccacgctggatgtgctctccgccattccctacatcggcgtggtgttcaaggcattggcaaccgccttcaaggtcgccgaacgcattctcaaggtcacccgccagacgttccagcctgtcgcgcaggcggccatcatcgccatcgacaagctcaacatgatgttcgccgcctcggtgcagctcgtcatcgagggcgtatcgcggctggacagctacaccatcgccaaggatgtgctgcagcggaactcaccgcaggcacaactgggcaccatcggaaccgcggtgctcggcacgcaactggccacggccgagaaccggctgctgcagcgctacagcattccccgtaccgccaacggtggctcggccacgcagcgccagggcgccgaccgcttccgcaatgtggtgatgcagtcgcgtgatggcttcagcaagagccgcagcgatgatttcctcggcttcctggtgcagtccggcggcaccgacatggtcgactacaaccgatgggcagcgctggacaccatggccgtcgagcttccgctgccatggccgctttccgatatcgatattccggtcggctggggcggtgcgcaagccgtggaaagctatcgcaaccagcgcttcctcaacggcttcggcaacggcaacggctggtactcggactgggaccgccgccgctaccgcccgtatggcgaagcggtgcgccgcaatcgcggcgcggcgtggattgtcgaccgcagccaggatgccaacgtgcgcttcgccaatggccagcatcgcaaggccttcttcaccggctacaacggcctgcgcgactatcacgacgtcaaggccgggcaggcactgcagccttacgccgagaatgatcgtgaccgcgacaaggtcggcccggtcttcaccatctatgccgagaccgccggcaccagcgcgcgcaccacgtccggcgccggcatcggcgccccggccggctcgcagatggaactgccggacaggatggccaacaacaagatcgccgcactttcctccgcgcaggtgttcttcgaccgcccggtgcagctgcgcatgttcagccgcgatgaccgcaagcgtgaaaccggaaacctgttcagtccttactggcaggcacgactggtcaagaccgatgccaccaccaaggctgccctggcggcagccggagccttgatgccatga

SEQ ID NO: 493775 - DNA, 273 bp, Stenotrophomonas maltophilia
atggaacgcagccgtcgtcacatccgtttttcccgtaagcaggccggtcagggcatgaccgagtacatcatcatcaccgcgctgatcgccatcgccgcgatcggagccgtcaccttcttcggaggcacggttcgcagccaggtggcaggcatgtcgaaggaactttccggccagagcgcgacgcagtcgatcaaccgcgccaagaaccaggccaacagcgcccagcaggaagctgacaagaccaagggcatggacgcgtacaagaacaagtaa

SEQ ID NO: 493776 - DNA, 1056 bp, Stenotrophomonas maltophilia
atgacgcagaagcacggatcgacgatgtccgcagtgcgcgcgagcctgttggccgccagcctggtactggcactgggtgcctgcaagcgcgctggcgaagcgcctgcagagggtggcgcttcctcgcccgcaccttccagcaccgcagccgaaccatcaccgcaggcggctgcggccacggatggaagccagaaggccgcagcgttcaatgttgccgagctgcccgtatcgcaggcaacgatcggcagcttcccttatctcggactgccgcagggctacaccagccaggacgtcgtagacagcgaattcgatcgcgtaccgttctggaccggcgatcgcgtggaatggattgaaggcaaggttcattcttcggtcctgcagagcagcagcgatcacccttattcgcagctggagctcagccgcaatgtacagagcctggtcgaggccctggggggcaagcgcattttctccggcaccataccggccgatgcatcgcgtgacatcggcaacagcaaggcggcgaccacctatgtcggcggcatcggcgacatctacaacgaacccgcagaaacctatgtcatccatcgcgaagatcgcgatatctggattcacctgggctcgggtggaaactccggcggcctgctcgtcgcagagacaaaaccggtgcagatcacggccaaggtcattgaagcggacacgctgaaacaggcactggacagcagtggcaaggtatccatccaggtgaacttcgcaaccgacgctgccgagatccttcccgattcggaaccgcagatcgcacaggtcacccagctgttgaaggccgacccacagcttcgcctttccgttgaaggacacaccgacaacagcggcagccaatcgcacaaccagacgctctcgcaggcgcgtgcggagtcggtgcgcacgcgtcttgtcggcggtggaatcgcagccgaacgcctgagcgcgaaaggctatgggcagagccagccggtcgccgacaacgcaaccgaagaagggcgtcgcgccaatcgtcgcgtggaactggtcaagcgctga

SEQ ID NO: 493777 - DNA, 342 bp, Stenotrophomonas maltophilia
atgcggtatttcatgacgaagctagtgatcacctccgccttgctgatcggcagcggcaccgcagtcgcacagggcggcggtgcggcgcagttcggcgcactgggaggcacgcatgcaggcaatgccctggcgtgcggcgcaaccccggaacaggccgccaagctgcgcgcaagccacaaggcacaggcaaaaaccgtgttcggcgccgaagcaggcttcgaccaggcctatgacacggccgaagcgcagacacagaagaagatcaccgatgcctggaagaagggccagtacaagcccaccagcgaagtctgcaacgaactgatgaagcaggtgcgttcatga

SEQ ID NO: 493778 - DNA, 465 bp, Stenotrophomonas maltophilia
atgacgttctggcgcatgcagttgcacccttcggatagcacccgagcagtcgcccataccacccggtcacttggcttgggatacgtgggcttggactttgcggatccaccaggcgatctgactgatgtgaagcaacaagatatcgaccagagccagcgagactactgggatttcgcgcactgcatggatgttggcgacatcatcttggtcgtcgcccaccattatccctgcgcattggcccgggtcaccggaccatacaactacatcagagctccggaagtagaactgggtgtgtggttccgccacttccgaaagatcgaagtgctgggctactacgcggatatcgtcacccatcctgcaaagtgggagaagaccactatgaccgacaccatctccatcctgagagatccggacggtgtctctcaccaactcatttccaaatggctcgctaaattaggcgagtaa

SEQ ID NO: 493779 - DNA, 138 bp, Stenotrophomonas maltophilia
atgaccacgcgttcttacgcccatatcggttgcgcgacggtcctgctgggaggcgccggcctgttgttcacggctggcggccttgaggccctgcagcagggcacaccgcttggttggctcgccatcgcgggcggctag

SEQ ID NO: 493780 - DNA, 321 bp, Stenotrophomonas maltophilia
atgaacacgatcaggaccatcgctctcagtttgaccattgcctccgcgctgacggcctgcggcagcaaaccctccgacgatcaggccaagaaagccattaccgctgagtttgagcgcgtgctgggaagccaagtctgggtgaaggaataccgagacttcagcctgagcggctgcaagaaatcggaaacggccgagggagtgatttgcgacgtgggaggatcggtcgtcttggacatcggcggcgtcgcccaggcccggccgttcgttcagccggtccgcttttcgaaagcgtccggcgagtggaccgcccacaagctttga

SEQ ID NO: 493781 - DNA, 753 bp, Stenotrophomonas maltophilia
atgaagaagaacaccatgggagtggcggccggccttgccgcgacgctgtttgtaaccgctaccgccttggcccaagcacctgctgagacgaagcccggcttcttccgccagctcggcaagagcctgaaagacgccggccagcaagcgctgggggccaggtcagcaaccagcggcgcatccacctccggtccgctttacaccccgatcagtggtgggggccgcatcaacggcctgttcaagaacgagaaccaccagagcgcgcagcagggccggctggactggccccgggtcgcgctgaccttcaaggaatggggcgcttccctgccttgctggaccgtcgaagcccggatctggaccagcgctaccgcctccaccaccgagaccttccaggcatgcgcggatgcggcgttgaccatccgggacgacctaggcgaagaagcggagctcaacagcaatgctcgagccaaagccaccaccgacctgatggcgggcctgagggttcgcgctggaaagccgaacacgggcgacgatcgaaccactggccctaccccacccagggaaccgttcaacgtgcgaaccacccgcgagggcgtggcgtggcaggcccgaaaagtggcgttgagcaccgcttgggtctccggtttcctgcgggcggatgacctgtatcccggcccctctggaatgctcacgcccttccgcgacacccgcatgtggatcgccggctttgatccggccggcaaccgcgacaagtaa

SEQ ID NO: 493782 - DNA, 243 bp, Stenotrophomonas maltophilia
atggggctcgataagaagctggcgagcagccgggttaatcggtatgagacggaggtcagtgggattgacctggatggactggggaagctggccgacgtgctgggcttgccgatggcttatttggtcgccgaagatgaggtcattgcggatgccattttggctctgtcccagatgaaccgtaaggagcgagtgcgtgccctgcgggcactgattgaagcggcccctccgtcaacccaagactga

SEQ ID NO: 493783 - DNA, 672 bp, Stenotrophomonas maltophilia
atgagcaccaagtggggaagcttcccgaaagcggcagtggactccggaaagctggcttccctcaccggggccaatggggaggtgggcacgcacatcgcctctcataaggtctatttggcgctcgcgctagaggtgaacttccatactcgtcaggtcgagatggggatgtcattcctgcaagatcgcaccgctcttgctaggccgatgttgggcagagccctggcggccctggagcaggctggcgtgttgcaggtagagcgtgacggctaccggaaccgctatacgcagcttctgcacgcgccgaacgcctttaggcaggttccaaggattgcgactagccaagcgctgaagctcaagttcaacagaggagtgactgtcttggcggcttggaagcttctgcctgtcctgcttttcttgcgtgatggcaaaacgggtgatgcgctggcgatgcatgagacgcttcagcgctactcacgcgtgcggcccgaacatgtcagtgcagggatatcgcagttggtggagtgggggctagttaggcaccgtcccacagagagtaaccgcaacggtcatccaagcttcgtctatcgactgacgggggagttcggaggcggggcacctgagagcagtagctcgaacactccggtgctgaaaccgaacactgtccccttctga

SEQ ID NO: 493784 - DNA, 1011 bp, Stenotrophomonas maltophilia
atgttcatctatgtagatgagtccggcagcttcgtttctgcgacgaggggcgacagctggtgtgtcgttgcggggtatgtcgtcccagaggtggccaggaagcgggtagagctgtcgctaggactgctcaaacgacgcttggggcgcggtatccaggacgaggtcaaactgaaagatctgtcagaagcaaacctgaaggacttcctaggcgagcttggtaagctcgaagcaacgctcttcatctctgcgattgacctcggccatcaagaccccgaagcggtcgtatcccatcagaagaagcaggttgcgagcgtcagggccaaccgtccaaagatgctttacgaagaggggcgtgcttccatcgatgacctgtcgggcagacttgagcgcctgtctccacagctatacatccagatggtggcgcaaatagacctgctggatcaggtctttcggatgactacgctctactatgcccagcgcgttcctgccgcgctgagcagctttaaatggcgcatggacgagaagaactcagctcgccccctgtttgagcagacgctcacccacatggcaccgggcctcatacaagccaagtctttgcgagaccccgggatctttgtcgagggcttcgattactctcactttgagaagcacttcaggagtgcccccgaagacatcccggcctacctccaagaggcggcaggccatgccataaagtcagcggtgaacttgggggctgtcatgcgggattcgaagttcgtccgatcgcatgacgttcctggcgtccaagtggccgacctattggcatctgcatggcgtagggtcctgagagcggagttcgaggacaacgacagcatcgcgcgtcttcttgggcgactgacagttcagcggcagacgccgaacccgtccatccatctcatgtcattgggggaagaacggttggcggagggatcagtccatcgtgcaactttgattgctaaaaatagcgcaagacccatgctgcgcagacgttaa

SEQ ID NO: 493785 - DNA, 1491 bp, Stenotrophomonas maltophilia
gtgacctacgaacaactcgcaaagatcgctgccaactttggtttgcgagactccatcgttcatatctgggcctacagcctgcatattggccatgggtatgacctgcccatggaatatgcccactctcgcccaggcttggccgatcagatcaggccgcatgtctttgagttctatttggacctctacgtaagagaaatcctccaacatgcgggtccttcaaaaggggcacgccgctcgctacgcaactggaacgacctcggtgccttgcacaatgccattcgaggctacagcgagttcaaggcaaagtgcgacctcgacatttggacaacgatgcatcgaattgggcaccagcagctgccgcacttcgatcgctttgacgctgcctacttcggacgctactggtcgctctacaagcgcggccgcctttcaaacattgtattcagaactctagggctgacctctgaagactacttcctcgtggctggggcaacccaagcgctgttcatgcagaactatgaggtgtcgctgatgccgcaactggcgacgcttggcctggattcttccgcggtggctgcaagagtggcagccatcagcggaacgcccaagctactgcggaaccgctgcgccctggatgctcgttacgactcatcttgggactacaccccgaatcccatcgccgtgaagcccctgatccagctgcgctctgacgctcccgaacgcctggcatgtccacggccctccttactggggaagcgccttctggctgggctcttctatgacttagcagatgccgatggattcgctcaggcgtatggcgatgcctttgaggaactggtaggcgattgctttagccacctaaccggtcagacgaaagctgagcgtcctgccccgtattttgtaggcaagtcgcagcaccacggaagcgactggctgctgagggactcatccacaagtctttttgtggagtgcaagaccatgcgcattcccgtcccagcacgactcgcagccggtcccggcgatttggagtccggactgacgcgcctggcaaaggcggttgttcagaactatcgcaatattttggatgcaacatcaggacgtgccggcatcaagctgccggatgggcctatctactccctgatagtgaccttggaggactggatcctctttagccataagtccgttgatgcgctcaccagcctcgtggagaaggagctggaggcacgagggatggatactggcctccaagagcgttaccccttttccatcgtcagctacgctgcgctgccagaagtggttgactccatcagtgagcatggcctccgcatctttaccgaaaaatccacccaccgattcaagggctacctctttccccagtttttgaaggatgccgagctcagtaaagagggatcggcagcctccatgtttgaccgtgaatgcgaagacctgatggcccggctcaaggctaagtttccggcagtggcggcccactga

SEQ ID NO: 493786 - DNA, 1275 bp, Stenotrophomonas maltophilia
gtgacctcccccacctcgcaacacctcaactcttacttggccgacccaaccggcacgctgaaactgacagacgttcgcattggccgtgtccgcatcggtgaaatgatcgtcactggtcgagaagcagcgatccatgctcaagagatcatcaacgatgcctgtgagcggacccgtcgggcgcaccttggaaagggcggcacgcgctacccagagccgctccccctggccgcccctgcccgcctactgtcgattgagatccgcgactacgtggctgaccgggagcgcatgggcctgacacgcaacaccatcgaggccacagcgcggtcactgaagatgcttcagatggcctgcggggatattccggtgtctcggatcgaccacgttcacatctaccgactctgggagctcatgcgttgggctcctcctcttctccagtcggacccgcagtataggagctacacatacgagcaagcggtagctcaggggaaggcactctgtgtccagccgcccgcaccggccaccgtagagaagcaccgacgattcctggtcaccttctttggccgactggaaaaagcaaaagccattgcgggctctcccatgcactttttccctgaggcgaagaaggatctggtcattgaccccgacagggcggagcgcttgtttgacgaagaagatttgcgtcgcattttcgcgcccaacacattcatcccctgggccatgaaagcacctcaccggtggtgggtgccgatgattggactccatacgggagcgcgtatcaatgaagtcgctcagctgaaattgaatgacatcgtccaagaggctggcgtgtggtgcatccggattcagaagaccgtcgatagcgacctcagtcataaggatcgcaaccggagccgccaaagcctaaaaggcaaagcagccgtccgaacgctccccattccccaaccgctgctcgatgctggtttcctggcgttcgtggaggacatccgagcttgcggccatcctcgcctcttcccccacctgtctgccggtgtgcgacgcgacactggcgagaccaacgcccgttacagccaaggcatcctcaaccagttcagcagatacatgaaggatctcggctttcctaaaggcgtcgggttccacgccttccggcacacccttgccacggagctgcatcacatgggggtggccgatgaagacatcgccttggtcaccggcactccatcagcaagcgggtccccgtgctgcatgaggcctacttccacaagaagccagcattag

SEQ ID NO: 493787 - DNA, 693 bp, Stenotrophomonas maltophilia
atgaggaagtcgatgttagaggaagtttggccggcatctgtccgcttcgtcccttacgtgggtgagcgcttttcccaaggcttcgatgggcagcggctgttgctgcttggggagtctcactatcggacggaaggagtcagcgatgccgtagaggtgacccggccatacaccaagaacatctttcaagggatggctactcgggttcgggattccagtgatggtccattctttcgtgccttggacctggtgcttaccggggacagtcagcattcgatagcggaggcggcagaggtctggcggcgcattgccttcatcaacctatcccaggctttcgctggcaccaaagcaaatcatcggccgcgcagccaggcgctgcgggatggtggcaacgttttggtcaacgatatcctgccagtcctaaacccggatgtggtgctggttctgggtcgcaccgcttggcggttctttagtcatggtgaaccacaacctggcttagagcccttcattgcccaacaggtgaatcgaggagcgagcaagccacgctacatcgaatccagggaagtctggtcactggactacgagggagggtcagccctgatgacgtgggtctaccatccatcgtggaacgtcgacacatggaaggaccgggcgggagcgctgcgtcacctgatggcgcttgcgaagcagagctga

SEQ ID NO: 493788 - DNA, 1074 bp, Stenotrophomonas maltophilia
atgagcgaggcaggggatttggctaaagtcgttcggaagacggcgagcagcggaaagctcgactatgtgcccgtcgtggtcctcaatgagacgacgcggaccaagctgcatgtggttggatggctgattcctcatagcgaccatacagagttctccataaagcttgagggattcaagaagaccaaggcttcgccctggcaggaggacccggtcaagagcatcaccttgaccgaggcctccacgctcaagctcttcaaataccttcagacgcatcttccattggcgcagcaatcggaagccggtgagttcatcctgatcaaggtggctaacggggcggcggatctaagcgggcacgatccgcagaccctggtcggcgcgcttactaaggtgctctcgcattcggacctggtccagcacttggctagcacggagctcactcacgaactgaccaccgcgctacgcggatctatccgcctcagcgaaatgcgctcggcagtcgctgagctgcgctcgagcttggggcgtggggaggcggcagagcaggtctaccagtcatggtgcgaaaagcactgctgggccttcggtaatgcttacgtggttcgggacgaggtgcgtgcaatcaccactggggacaacatcgatctgatgttgcctaacgtcattgcgggctatcgagacatcgttgagctgaaacggcccgacatggaagttctgctctatgacaaagctcacaagaaccactacttttccgccgaggtatcgaaagccatcggtcagtgccaccgctacctcgacatgctccacgacttcgctgacaagggcttgctcgaccacaaggaagtggtggcttaccacccgcgcgccactatcgtcatcggtcgctcccatgagtggacagacgagcagcagcgcgctctccacggtctcaatcggcgcatgcatggaatcacggtcatgacctacgaccatctattggcgcaaggagagcggctgatcgagatgatggtgcccgagtcccatcccgaactggcctcagttttcgctgagcggccagacgacgaaactccgtggtag

SEQ ID NO: 493789 - DNA, 501 bp, Stenotrophomonas maltophilia
atgcatttctacacggtcaaggaagagtatctcgatctacttagggcggtggattcaaaggtccccaatagctcgggtgataactacaaaggtaagaagcccttcatcggcgttgtactgcagataggagggcataactttttcgcgccactgacttcgtataaggcatctcaggaaaaaataaaatcttcttcttgcactgcttttaagttgcatgaaagaggtaatcctgacaacaagcttggcctcatctctctcaactacatgcttcctgttcctgaaaatgcactggaacgcttcgatcttgaaggtcaagaggagaagtacaagaggatgatgtatctccagtatgaattcataaaagctaatgacgttgagatattggagcgtgcattgaagttatatgagtcggtggtggtgaagagagtgccttttttggtcaatatttcctgcaaattttctgcgctcattgataagagtagggaatattcagttcgctag

SEQ ID NO: 493790 - DNA, 1542 bp, Stenotrophomonas maltophilia
atggctatcttccacacctcaatcaaaaccttcagccgaggcaaaggccaatcagccgtcgcggcagccgcctaccggggagggctgctgctcacggacttgctaaccgggcagcttcatgactaccgccgccgtagtggtgtcgtcgagagcttctgtcttgcgccgccagacgctccccaatgggccttggatccccgggagctctgggcagtcgcagaggccgcggagcggcggaaagactcgactgtggcgagggagtttgaagtctccttaccccatgagctatccgaagagcagcgggcgcacttggcgtttgtcatcgccgacgcgctggtcgatcgttacgggttcgctgtccaggccagcatccattcgcctgggacgcctgatgggctcaaccaccatgtccacatcctggccaccacgcgccgcctcggacctgagggctttggggacaaaacccgggagctggacgtggggccgtctggcaaggtccaggtgcagtggattcgggagatggtcgcggcgactacaaatgcccacttggaggcggccggccttaccagcaccatcgaccaccgaagtctggccgaacaagcacggtctgcgatggagcgaggcgacgacttggcggcagcggcgctctcccgtgaaccgactcagcacctaggcaagcatgctgcggccctagctgggaagggtgtggcgacggacaaggcaagcacgaatgaccagatcgccgaaaacaatcgggggcactatgacttcctcgtgcgcaaagcagggctggaaggaaagcccgtcccagtgcctggccaagaggccgcaaagcgaactggacgagtgctcaatgcagaaaccgcggggctacttggggggctggagatgcgaggcgtatccgggatccggctgcagaacctgctcctctcgtctcacgggcatacgccggaaccgacgcccatcagccttgtcgaaaagattctcgatgcactgcgcgacgtggacgagatttcctgggctagggcagacttggccatggagaaggttcgcgatgccttgaggtgggctcagcggcagctttcctctcaaggagaaaccagcgagcttcggcagtgggtcaccagtgcttcgctccaggttcgtgcccttaagtccctcatcatcagccgggctcgcaggctgcttaacgtgaagagtgcaaccaggctgcgtcacatggccgagcaggagtgggaacggttcaacgccgattgtccgccggggtcgaccagatactcgaggtcggagtggaccctgcgccgagggcggcggctttcggttctcgagaaacatacagccgagctgaaggcggctcaggagcgggcatcggagggagagctgaatgccatcgatgctgagatccttaccaaggctgaactgcttgcagcgttgccccatccctcacaggctgtcgctcctacgctcgctgagccgaagcaggtggcctcgagcgtcttgggttccgtcccgtcggtcccccgagggccaacgttccactga

SEQ ID NO: 493791 - DNA, 792 bp, Stenotrophomonas maltophilia
atggctaacggatcagtccctcacgacaccaaagtggccgttttggtcgattgcgacaacgtcagtcccgagatcgtggagcacgccctgctgatggtggcccagttcgggcgcgtggtgctgcgccgcgggtatggaaaccacgccacgttggcgaaccgctggcaggaagtgctcgtccaacaggcgtttacaccttgcctccaataccaatacgcctctggaaaaaacacttccgacattgccctggctctcgatgctcaagaggcgttgttcgatcatcgtgccgacaccttctgcctggtgaccagtgactccgacttcgcttacctatgccgaaagctgcgggagcgcggagcgactgtctgtatcgtcggcgagcccaagacgccagcggccctgcgaaacgcttgcgatcagttcttcgaatgggagcgcaaagcagtcgccgagccctgcgaagaccgacccaatgcatcaccggccaaagcggagggcaacaaagttgagcccgcggcagtcgacaccaagccgcttcccaagcgccgtcccaagttcgtggtggaagcggtcacgctgctggctggagacacctcagaaggcgaggtaggactggggccgttgggccaatacctcaaacgaacagacccgtccttctctcccaatgcctatgggcattcgggcctactcagcatgctgaagacctatgacctgctgaccctacgccggcaggaaggaggccagtggaccgtcagtctcgcgccggaaagcagcccagcaagacaagactga

SEQ ID NO: 493792 - DNA, 1629 bp, Stenotrophomonas maltophilia
atgggacgacggagcggcctagaagggtttctgcgggcagccggccgggcagcggcggcagcgcagcgcgaaaacaagcgccagcagcgaatgcaagcgacgcaactgaggcagttggagcgccatgagcgtatggctgctgcgcaacagatgcgggagctgcgcgccctggagaagcaggagaaggaagctgcgcgcttggccaaagccgaatatctccaagaccgacaggcggaagcagacgacctcaacgccgagctcaaagaccggctggaggaactggagggcctgcttcttcacaccctgtcggtgaacgacaccatcagcttcgacagcctgcgtcacaccgatccctatcccggcttcaaggtgcccaaggacttggttccggggttggcgccggtcgaggtcgaggttccgggtcccaccggcttcgcgcgcttttggcccggggctgcaaagcggcacttggcagcccaggcggcggcccatcaagcccaccagcaggttctcgaacagttccatcgagcggaagcgcaaaagaagcaacggctggccgatctacgggcccaacacgagaccgaacgcacgctctatgaggctgacgttggtcgccgaaacgctgaagtggatgagtttcagagcgcctacctggctcacgagcctgatgccgccgtggcctacaacgacatggtgctcacgcgctccgaatacccctccgagggcttccctcaggcgttcaagctggcctatgccgaggcatccaaagaactggtcattgagtatgacctccccgaggtgggcgtcgttcccaccgaagccgattatcgctacgtcaaaacacgcgatgcgatcgactccaaggcgcgcaaggccagcgacatcaaatcgctctaccaagacatcattgcctcaatcgcgctgaggaccttgcacgaagcctttgaggccgatcaagcaaacgcattggcgctggtcaccttcaatggcgtggtggacacccacgatcccaccaccggccaagaggttcgggtgccggtggtgtccgtccgcgcaacgaaggccgccttccttcagctgcggctcgaacgcgtggagaaagtcgcatgcctgcgcagcctgggtgctcaagtgtcaaacaggcccgatgaattgcaggccatcaaaccaatcgtcgaattcaacatggtcgacaagcgcttcatcgcgcaatcggacgtgctctcaggacttgaatcgcgccccaaccttctggatctgacccccagcgagttcgaatcactcgtctccaacctgttcagtcggatggggctggacacgaaactgacccggagctcccgcgatggcggagtggatgcggtggcctttgacacccggcccgtcttgggcgggaaggtcgtcatacaggccaagcgctatcgggacaccgtaggggtcagcgcggttcgcgatctttacgggaccatgctcaacgaaggcgccagcaagggcatcttggtttgcaccagcggctacggcaccgaagccttcaactttgccaaagacaagcccattgagctgatcgacgggggtggtctgctctacttgctgagggaacacgccggcttggatgcacgcatcgcagcttaa

SEQ ID NO: 493793 - DNA, 1503 bp, Stenotrophomonas maltophilia
atgcgcatcccccatcacctcacctgctctcccaccggcctttgggctttccggcaacgcgtgcctaccgacctccaaggcctggttggccgacgcgtcttcaagcgcacgttgcgcacccgcgacctgcccacggccagactgcgcgcactggccctggctgcgggctatgctcaggccttcgatgtgttgagggaccaacgcgtggacaagctgagcaagcgcgaggccgatgaactgatcgcccgcctgacccaatccgacaacctgaaggaattgatccttcaccggtcccgcgccgccgatggcacggtcaccgagcgctggcagatcgacaacgaggaagacctgcggcttttccagaagatgcaacgccagggcgcagacccgttgctggacgccgtcaacggcgccccctcccccgccccggcaccagtcccgaagtccaaactgacccccatcaccctcgaagacgcctgcgacgcttggctggccacgctcaagggcaacacgctgcccaagacttggacgatcaagcgcacggccatcgtttccctggtcggcttccgcgggagcaagaccaagctccacacgctgatgcgcacggacttggcccgctggtatcagcacatgcgcgaagagggcgcctcaacccccaccctgaccaacaagcagtcttacattggcggcaagggcggcttcttcgagtgggccatggcctcgggctactacccgaggggcgacaatgttgccgctgggcatgtcagctactccatccgagagaagcgagctcggcgaaagttcggcttcaagccttacgacacccaccaagtccaagccctctttgcgccagccgccttcgagcgactggcgctttccgcccgatgggccgcggtcatcggtctttacaccggcgctcgcgccgccgaggtgggccaactgcttcccagcgatgtcaccgagcaggcgggattgctctgcatccacatgtccgacgaaggggagcatcagaagctcaaatccgatgccagcatccgaaccgtccctgttcaccctgatctgctggccctcgggtttaaggaatgggttgagggattacgggcggcagatgcaaaacggttgttcccggccgccaaaccggatgccaagaacggcgccggcaattggatcactaaggcgttcggccgccacctggaagccgtgggcaagaactggacgcccggcaagcgcggcttccattcgctccggaaaaccgtcattcagtcgcttcaaggagcgggcgtaccgtccgagctccgagcccaggtggtgggacacgagttggacgacgagcaccacgcgacgtatagccgcgaattcaccgcccacgagaagctgcatgggcctggaaagaacaccccgggattggcggtgctggattttggcttgaacctgcctgcgctgcgcgcccttttgaacgaccaaacgcccagaaagcgcgttagaaggacgtcgacaggttag

SEQ ID NO: 493794 - DNA, 2079 bp, Stenotrophomonas maltophilia
atggaacatccgatggaaaacggtggcctgatgtcctatctcgtccttgcccgcaagtggcgtccgaagcgtttcgccgagctggtgggccaggaacacgtggtccgtgcgctcagcaatgcgctggacagcggccgggtccaccatgcgttcctgttcaccggtacgcgtggcgtgggcaagaccaccatcgcgcgcatcttcgccaagtcgctgaactgcgagcagggcaccagcgccgacccgtgcggccagtgcgcggcctgcctggacatcgacgccggccgctacatcgacctgctggaaatcgacgccgcgtccaacaccggtgtggatgacgtgcgcgaggtgatcgagaacgcgcagtacatgccctcgcgcggcaagtacaaggtctacctgatcgacgaagtgcacatgctgtccaaggcggcgttcaacgcgctgctgaagacgctggaagaaccgccggaacatgtgaagttcctgctggccaccaccgatccgcagaagctgccggtcaccgtgctcagccgctgcctgcagttcaacctcaagcgcctggatgaagaccagatccagggccagatgacccgcatcctggcggcggaagcgatcgaggccgatggaagcgccatcgtgcagctggccaaggccgctgacggcagcctgcgcgatggcctgtcactgctggaccaggcgatcgcctatgccggcggcgcgctgcgtgaggacgtggtgcgcaccatgctgggtaccgtggaccgcacccaggtggcggcgatgctcgatgcgctggccgacggcgatggcccgcgcctgctgcaggtggtagccgcgctggcagagttctcgccggactggagtggtgtgctggaagcgctggccgaagggctgcaccgcatccaggtgcagcagctggtgccgggcgctgccgcggcggaaggcctggatgtcgccgcattcgccgagcgcctgcgcccggaagtggtgcagctctggtaccagatggccttgaatggccgccgcgacctgccgctggcacccagcccgcgcgcgggctttgaaatggccgtgctgcgcatgctggcgttccgtccggccgcagcggtaccgccggtgccgaaggccgtcgacggtgcgttgggcggcacgccgggtggcaacgctgccggtggtggcgccggtaccggtagccgcgatgcgacgccggccgccgctgccgcttcgggcagcccggcggtagcggcgcaggcagccgcgccggtgcaggccgcgccgcgcgaacctgaacccgagcccgaaccggccccgcaaccggaaccagatccgacgccggagcccgagccggttccggtggaagagcccgtgtcgccgccgccggtgaaggctgagccacaggtgccggcgcctgccgtcactgcagaggcaggcgacgacctgccgccgtgggccactgacgaagccgaggcgcgtgacgaggcattggcggccgagatgtccggcccggacgccgccatggctgcgccctggcacgaaccgccggctcccgtcgcggctcccagcgagcctgcgccgcccgagcgcccgttccgcgccgaaggcattgccattgcgccggccgaacatgccaagccggccccggcgcatgccgccgcgccgcaggaaggtgtcagcgagctggccacggccgaagactggctggacctggtcgccaacagcggcctcagcggcccctcgcggcagctggccgccaacgccgcgttcatcagctgccagcacgggaccttgaaactgggcctttcgcccggatttgaatacctgcgctcggagcgcgcgctggctgccctgggcgagatgctgcagaaggccctcggccaggcgccgaagatcgtggtcgagaccgtggaaaccgaacacgttccggccgagaccctgcatcagcgggccgaccgccagcgtggcgagcggcagcaggtggcagaggccgttttcatggacgacccggaagtgcaggtgctgatccagcagcacggtgcccgggttgtttccgattccatccgttcttttgacgagtaa

SEQ ID NO: 493795 - DNA, 321 bp, Stenotrophomonas maltophilia
atgcgcggaaacatcgcccaactgatgcagcaggcccagaagatgcaggaaaacctgcagaaggcccaggaagaaatcgccaagatcgaagtgaccggcagtgccggcggcggcatggtcagcgtgaccctgaccggtgccaaggaatgccgcaaggtgcgcatcgacccgtcgctgaccagcgacccggagatgctggaagacctgatcgccgccgccttcaacgacgcttcgaacaagatcgacgccgagtcgaagtcgaagatgggttcggccaccgccggcatgcagctgccgccgggcatgaagctgccgttctga

SEQ ID NO: 493796 - DNA, 600 bp, Stenotrophomonas maltophilia
gtgtccgcacccctgcttgaacaattgatcgacgcactgcgggtgctgcctggcgtgggccagaagaccgcacagcgcatggcctaccacctgctcgagcgcgagcgcgaaggtggccagcgactggccgaagccctggcgctggcggtggagcgcatcggccactgcgcgcagtgccgcgacttcagcgaaaccgagctgtgcccgacctgtgccaacagcagccgcgagcgcagccagctgtgcgtggtcgaatcgccggccgaccgcctggccatcgaaaacgccaccggcttccgcggtgtctacttcgtgctgcagggccggctgtcgccgctcgatggcatcggcccgcgcgagctgggcctggagcagctggagcagcgtctggccgacggtgaggtgcaggagctgatcatcgccaccagtgccaccgtcgaaggcgaagccaccgcgcactacctggcgcagctggcgcgcgcgcgcaaggtgcagcccagccggctggcacagggcctgccgctcggtggcgagcttgaatacgttgaccgcggcacgctgtcgcacgcgttcggaacgcgcagcgaattccgcgattga

SEQ ID NO: 493797 - DNA, 360 bp, Stenotrophomonas maltophilia
atgagcaacgaaaccctcttcagcaagatcatccgtcgcgagatcccggccaccatcgtctacgaggacgacgaggtgctgggcttcaaggacatcgcaccgcaggcgccggtgcacgtactgttcattccgaagaacgagatcatcccgaccctggacgacctgcagccgtcgcaggcgcacctgatcgggaagcttgccctggctgccgccgaatatgcgcgccgcgaagggttcgcgcaggacggctaccgcatcgtgatgaactgccgcgaggatgccgggcagaccgtgttccacatccacatgcacctgctggccggtgcgccgctggggcatttcggtacgccggggcgctga

SEQ ID NO: 493798 - DNA, 528 bp, Stenotrophomonas maltophilia
atgaacaccaagttcctcctcaccgctgtggccacgctggccctgtcggcctgcgccacggcccccaagccgctgcagggacagttcagcctggtctccccgcgcgactcggtcgccacccagcaggtcggcacgccggtccgatggggtggtcgcatcattgagaccaagcccggccagggcgagacctgcttccagatgatctcgcgccccctcaacgccagtggccgcccgaacaccacctcgtcggacgccagcgacggccgcttcattgcctgccgcgccggcttctacgacccggccgtgtttgaagccggccgcgacgtgaccttcatcggcaagatcgacggctaccagaacacccgcatcggggagtacgactatcgcctgccgaagctgtcggccgatgtgatctacctgtggccggaacagcgccaggtcgatgtggtgccctacccctatggcccgtggggcccgggcccgtatggcccgtactggggtggttacggccgttggggctggtggtga

SEQ ID NO: 493799 - DNA, 1950 bp, Stenotrophomonas maltophilia
atgactgagcctgccgtcctgctcgatcgcaacgcccgcagctggaccctggccagcgcagcgctggcgctgctgccactgctgctgcagctgccgccggtgctggccatcgtgatcgcgatcaccgccgtgctgaccgctgcgctttcctggcggcgggtgctgccgatgccggtgcgcctgctgctggtgctggccatgctcgccaccatcgtctggcagatgggcatggtgcggccggggcgtgataccggctgtgcgctgctggcggcgatgctggccatcaaatccagcgaactgcgcaacctgcgtgatgcgcgcagcctgctcggtttcgcgctgttctcgccgttcgcggccttcctgctcgaccagggcccgctgaccacgggactggctgcgctggccgcggttgccgcactgctggccctgcaacgcctggcccaggacgagggccgcagcccacgcctgccactgcacggtcaactgcgcggcgtcggccgcctgcttggcatcggcctgccgctggcactggcctgcttctggctgttcccgcgcttgtccacgccgttgtggggcgtacccgaacgagcggtgggtacacccggcctggctgacagcatggcgccggaccaatggctggacctgatggccgacgacaccccggcgctgcgcgtgcagttcttcggcgccgtgcccgagcccgcgcagcgctattggcgcggcccggtgctgacttccttcgatggccaccgctggagccgcgatcgcgcgacggcccggcgccccgcccccgtggtcgaagccgccgcacggggatgggactaccagatcgactacgaacccaccgaccgtcgcctgctggtggccctggacctgcccagccgcgcaccggaaggcagcagtttcgatgcggacatgagcctgcgcagcgaccgcacgctgtccgcgctcagccgctggcggttgcattcggcgcctccgcaacggttcgacaccgatctgtcgccctacctgcgccgtgccgcgctgcagcttccccccggcttcaatccgcgcaccgcccagctggcacggcaatggcggcaggaggccggcaacgatgacgaagccatcgtccgccgagcgctgcagtggatcacccgcgacttctcctacacgctcgataccccggtggccgggcgcgatccggtcgacgatttcctgttcaactacaaggccggcttctgccagcacttcagctcggccttcgtggtgctgatgcgcaacgccggcattccggcccgggtggtgaccggcttcgcaggtggcacccgcaaccgcatcggggactactgggtagtgcggcgcatggacgcccacgcctgggccgaagtctggctgccccagcgcggctgggtccgggtggacccgactgcggccgtggcaccggaacgcatcctggacacgctggacgaccgcttgcaggccggcacggacaccccgctgcagcagcgctggctgcagctggggcagatgggtgactggctgcgccgtggctggaacgacctggtgctttccttcgacgcacgccgtcagcagcagctgctcaggccgttcgggctggatgatctcgggccggcgcagctggtggccggcttcgtggtcgccgcactgctggcattggcatggatggcctggctgctggcccgcggcgagcgcgagcgcgacccgctgctgcgcgcctggcaccggctggggcggcgctatgcgcgccttggcctggcccgcgccccccacgagacggcatgcgactggtcacgacgggtacacgccgtgcgccccgaccccgccctgctggcactcagccagcgtttcgccgacgcgcgttacgctggaacttgcaccgacctcgcttcattattgcgggacctgcgcaggcatcgcccgacttccggagcctccccatga

SEQ ID NO: 493800 - DNA, 924 bp, Stenotrophomonas maltophilia
atgcagctgctggcacgcccacgcaggcccgaagccctgccgcagcgactggatcgccgccgcatctatgtactgccgacgcgcttcggcctgttcgtcgccaccctgctgtcggcgatgctgctgggcgcattgaactacaacaacaacccggccctgctgctggcactgttgctggccgcagcagcgatcgccagcgccattgccgcgcacctgcagctgtccggcatacagatcgatgcaatctccgccgagccggttccggccgggcaccccctgcgcctgcgcgtggacctgtcgttgcgcgacccgcgcgcgcgccacgggctgcacctgcagctgggcgcaagcgaggcgtgggtcgcactgcctgcacacggtcgcggcgaagtggagctggatgtccccagcgagcgccgcggctggctggaactgccgcgcatccgcctgtccagcacgcagccgctggggctggtgcgggcatggtcgtgggtgtggccggagcagccgctgctggtttatccactggccgaggcactggcaccaccccttccggaaagtggcagcgatccactgcacacccgcgcccatgccagtggcgaagagctgcaccagctgcgaccctatcgtgccggcgacgccccgcgcagcattgcctggaaacactcggcgcgccgcgacagcctgctggtacgcgaatacgagaagccgatcggcatcgaagtggtgctggactggcgcacgctggcgccgctgggccatgaagcacgcatcgcgcggttggcacgctgggtcgacatggccgagcgcgaaggccggcgctacacgctgctgcttccagcccatcccccgttcgggcccggccagggcgccagccaccaccacctgtgcctgcgcgcactggcgctgatgccccatgactga

SEQ ID NO: 493801 - DNA, 954 bp, Stenotrophomonas maltophilia
atgccagcctcgtcccccaatcccagcatgctaaccgatcaactgcgccaggccctgcgggaggcacaggatcaggtgaacgcactggtactgggcaaggtgccggaagtcaggctggcctttgtcgccctgctttccggcggccacctgctcatcgaagatctgcccgggctgggcaagaccacgctggcgcatgcattggccagcagcctcggcctcagcttccagcgcgtgcagttcacttccgacctgttgccggcggacgtactgggcgtatcggtgtacgaggccggcagccgccagttccagttccaccccggcccggtgttcacccacgtgctgctggccgatgagatcaaccgcgcaccgccgcgcacgcagagtgcgttgctggaggcgatggccgagcagcaggtcaccctggatggacagacgcatccactgcccgatccattcttcgtgatcgccacgcagaacccggtcgacctgtccggcaccttcccgttgccggattcgcagctcgatcgtttcctgctgcggctggcgatgggctacccgagcgtgcaggccgagcgcgagctgctgcgtggcagcgatcgccgcgacctgatcgcccgcgcggtgccgaagctggatgacacccaggtgcgtgcgctgcgtgaagccgttggccaggtacacgccagcgacgcgctgatcgactacgtgcaggcactgttgacccgcagccgccagcatgccggcgtacgcgtgggcctgtcaccgcgcgccgggctggccctgctgcgtgccgccagggcgcatgcactgctgctcggccgcgggcatgtggtgcccgaagacgtgcagaccctgttcgtggcagtggccggccatcgcctggtggcggaggccgaatccagctccgggccggcattggcgcgggcgatcctgcagaccgtcgcggtggactga

SEQ ID NO: 493802 - DNA, 1836 bp, Stenotrophomonas maltophilia
atgcaaggcgaacagcgcgcgcgggcaatatttctctggttatggacgctgatcacagcggccaagctggtggtggctgcacgcctgccgctgttcgtcgatgaggcgttctattggcaggaaggccagcacctggccgccgcctattccgacctgccggggttgacagcatggcttgcacgcctgggcgtggaaatcggtggccatcacgtgctcgcattgcgcctgccgttcctggccatcggtgcgttgctgccgttgctggtggtgcgcatcgccacgcgctggtttggcaacgtcgcagggtggcaggcgggcagcctgaccctgctgatgccgctgtcggccacgctgggcctgctggccgtgccggatgtgccgatggcgctggcggcggtgatctgcctgcacgccggtgcgcgccttctgcacaacgtggatgcgtcgtcggcgatgaagctggcgctgggcctgctgatcggtgcgctcagccactaccgtttcattggcgtcatcggtgtcggcttcattgcgctgctggcgctgccgcagggccgccgcatgctggccgacccgcgcgtatgggtggcgctggcggtgggtgtactggcctggctgccgttgctggcgtggaatgcggacaaccatgatgccggcctgaagttccaggtggtcgagcgccacccgtggacgttcgagtgggaagggctgtggttcctggtgatccagccgatgctggtgacgccgatcctgtgcatcgcgatgtggaaggtcgccctggcgggtacccgcagtggtggtggtgtgcgggtgcaatggcgctatttcggcctggtgggcggggtgtcgacgctgggcatcttcctgctgggcttcttcaccgatgtcgagcggatcagtttccattggccgttgccgggctacctggcgctgctggtggccgtgccggtggtcctcaacggctggccacgctggctgcgccgcaccggctggtggctggcagctgcaggcaccgtactggctttcggctactacctgatggcgtccacgccggcgctgcgcgagcagatggccggcagcaagtactacccgcgcaactttgccggctggcagccgctggccgtggcggtgcgcgacgaactgcggcagatgccgccgggcacgcgtgtgctggcgggcaacttcaaggtcggtgccgaactgggcttccagctgggcaacggtgatatcgaggtgttgccgcatccgctcaacgacaagcatgggcggaccgcacagctggcacagtggggcctgctgcacgaaggcccgcgcagtgcgccgatgctgctggtgctgtcacccagcgaccagcgctaccgcgatctgctggcgcgctatcacgcgatctgcgagcaggtggggccgttgccggcgccgcgcgtggtcagcagcgatcatggtttccagcgcttcctgctgttccggctgccggtgcagcgcgcgcaggggccctgcgtgacgccggcaatggcctggctggatgcaccgtccaacggtgagaaggtctccggaacgctcgccatcaagggctgggcattcaaggatggcgtggggttggcgcgcgtcgaagtgctggtcgatggccattcgattggcgatgcgcgctacgggcgcatgttcgacatccgccacacctggccggacagcaccgatccgcagcatccggcggtgggcttcgacgcatcgctggataccaccacgctggcgccggggcggcattggcttggcctgcgcctgcacggccgcgacggcagtgtggaggcgtggcaggagcagccgttcgaagttcgttga

SEQ ID NO: 493803 - DNA, 570 bp, Stenotrophomonas maltophilia
atgtcactggtcctggcctccacctcccgctaccgtcgcgaactgctggaacggctgggcctgcccttcgactgcgcacgcccggacgtggatgaaacccctctgggcgccgagaccccgctggccctggccacgcgcctggccgccgccaaggccgccgacgtggccgcccgccatccgggcgcctgggtgatcggctcggaccaggtggccgacctgaacggtcagccgctgggcaagccgggcacggtcgaggcggcctgtgcgcagctggcggcaatgtccggacagacggtgcgctttcacacggcaatcagtctcaggcgggatggagaatccctcgccaccctggatctgaccgaagtacgcttccgcgtgctggacccgcaggaaatcatccgctacgtcgccgccgagcagccgctggactgcgccggcagcttcaagtgcgagggcctgggcatcagcctgttcgaggcaatcgacaaccgcgacccgaccgcgctggtcggcctgccactgatcgcgctgtgcggcctgctgcgcagggctggattcgcggtgccgtga

SEQ ID NO: 493804 - DNA, 471 bp, Stenotrophomonas maltophilia
atggttgtagcgcgaaggcgcttcgacggtcaggtctccctggctgaattgacccgcctgcaggggttggtcgcagataccgacggcgagtgtgtctactcgcttgaattcggtcgcgacgacgtcttgcgggtatcctatgtggaactgaccatcgacaccgcgctgccgctgacctgtcagcgcagcatgcagcgattcctgttgccggtgaaggtgacccagaggcttggcctgatccgcgacgaggacgaggaatcgtccctgccggaggaatacgaggcgttgctggtgccggaagacggccagctgcgtccgctggatctggtcgaggacgaattggtgctggcggtgcccgtggtgccgctgtcgcccgacggtgaagcagtcgacaaggactgggcaccgagcgaagaagaaacgaagaaggccaacccgtttgcggcgttggcagcactgaagaaacaatag

SEQ ID NO: 493805 - DNA, 195 bp, Stenotrophomonas maltophilia
atggctgtgcagaaatcccgtgtcaccccgtcccgccgcggcatgcgtcgtgcccacgacgccctgagcgccaagcagctgtcgaccgacccgaccaccggcgaagtgcacctgcgtcaccacatcactgccgacggtttctaccgcggcaagaaggtcatccagaccaagacctcggccgtcgaagaagattga

SEQ ID NO: 493806 - DNA, 978 bp, Stenotrophomonas maltophilia
atgagcaagcggatctattcgaggatcgcgggcaccggtagctatttgccggaaaaagtcctgaccaacgccgacctggaaaaaatggtcgaaacctcggatgagtggatccagtcgcgcaccggtattcgtgaacggcacatcgcggccgaaggcgaaaccaccagcgaccttggctacaacgccgccctgcgcgcgcttgaagccgcaggcatcgatgcctcgcagctcgacatgatcgtggtcggcacgaccacccctgatctcattttcccgtccaccgcgtgcctgatccaggccaagctcggtgtggccgggtgccccgccttcgacgtcaacgcagcctgttccggcttcgtgttcgcgctgggtgtggccgacaagttcatccgctccggcgactgcaagcacgtgctggtgatcggcaccgaaacgctgacccgcatggtcgactggaacgatcgcaccacctgcgtgctgttcggcgatggcgccggcgctgtcgtgctcaaggccgacgaagacaccggcatcctcagcacccacctgcatgccgatggcagcaagaaggaactgctgtggaacccggtcggcgtttcgaccggcttcaaggacggcgccaatggtggtggcaccatcaacatgaagggcaacgacgtgttcaagtacgccgtcaaggcgctggactcggtcgtggacgagaccctggccgccaacggcctggacaagtccgacctggactggctgatcccgcaccaggccaacctgcgcatcatcgaagccaccgccaagcggctggagatgtcgatggaccaggtcgtggtgaccgtcgacaagcacggcaacacctcctccggctcggtgccgctggcgctggatgccgcggtgcgttcgggcaaggtcgagcgtggccagttgctgctgctggaggccttcggcggcggcttcacctggggttcggccctgctgcgctattga

SEQ ID NO: 493807 - DNA, 783 bp, Stenotrophomonas maltophilia
atggttgagcccatcgtcatcgaagggcaacgtgcctggctgaagcagtacggcaagggaagccgggcaatggccctgggcctgctcaattttgttgcgcgccgtttccatctggatgcgctgcgcccgccgccgcaccgcggtggcgacgccgcacgcgaaaccgaggcccgccgcctcgcggaactgcaggcgcagggtgtgaacgtgccggacgtactgggcaccggtcatgccgcgctggtgatcggcgacaacggcagctcgttcaatacctgcctgcgcgaagccgacgaagccggtcgcgatcagctggtgatggcggcgatgctggccattgctgaagctcatgcccgcggcgcctatttcgggcagccattgccgcgcaacctcacatgggatggcgagaaggtcggcttcatcgatttcgaggaagatccgctggaagtgatggatctgtccgaagcgcaggcccgcgactggctgatgttcggttacggcgtggccaagtactacgccgaccgccccgggcacctgcaggcgatgatggccgaggcgatgggtgacgttcaggcgccggtgcgcgagcacgtgcatgcggtcagcggccgcctgcgcagcctggcccgggtctgcatgaagctgggccgttcggcgcgcgcgctggcccattccatcttcatcgcccacggcgccagcaccgccggcgtgttgatgctggtgggcctgtgcgtggatttcctcgccgacggcgacctggacgtcctgcagctgttctgctga

SEQ ID NO: 493808 - DNA, 945 bp, Stenotrophomonas maltophilia
gtgaccgtatccaccctcgcttttgtcttccccggccagggctcgcagtctgtgggcatggtggccgagctggccgaactgcacccacaggtgcgtgaagccttcaccgaggcatccgatggtgccggcgtcgacctgtgggcgctgtcccagggcggcccggaggaaatgctcaaccgtaccgaatacacccagccggccctgctggccgcgagcatcggcgtgtggcgcgcctggaacgccgtgggcggtccgcgcccgtcggtattggccggccacagcctgggcgagtacaccgccctggttgccgcaggcgcactgagcctgcatgacggtgcgcacctggtgcgcctgcgcggccagctgatgcaggaagccgcaccggccggtgtcggcgccatggccgccgtgctcggcgctgaagaccagctagtgctggacgtctgcgccgaagcggcaggcagccaggtggtggtgccggccaacttcaattcgccgggccagatcgtgatcggtggcgacgccgacgcggtcgaccgtgcgctggcgctgctggccgagaagggcgtgcgcaaggcggtcaagctggccgtcagcgtgccctcgcacaccccgctcatgcgcgaagccgccaaccgcctggccgaagtgatggccggcctgtcctggcacgcgccgcagctgccggtggtgcagaacgtcgacgcccaggtgcacagcggcatcgacgcgatccgcaccgcgctggtccagcagctgtaccagccggtacagtggaccgggtgcgtgcaggcgctggctgcccgtggcgtcacccggatcgccgagtgcggcccgggcaaggtgctgaccggcctggtcaagcgcatcgacaaggccatcgacggccgttcgctggccacgccgggcgacttcgaagccgcccgcgaggcatggtcggcctga

SEQ ID NO: 493809 - DNA, 744 bp, Stenotrophomonas maltophilia
atgagcaagcccctgcagggtgaaatcgcactggtcaccggcgccagccgtggcatcggtgccgccatcgccgatctgctggccgcccagggcgccaccgtcatcggtaccgccaccaccgaatccggcgctgccgcgatcggcgaacgcctggccgcccacggtggtcacggccgcgcgctgaacgtcaccgatgccgccgcgctggacagcgtgctcgatggcatcgccaaggaattcggcccgatctcgatcctggtcaacaatgccggcatcacccgcgacaacctgctcatgcgcatgaaggacgaggactgggcgtcgatcatcgacaccaacctgaccagcgtgttccgcaccagcaaggcggtgatgcgcggcatgatgaaggcgcgcaagggccgcatcatcaacatcgcatcggtggtgggcgtgaccggcaatgccggccaggccaactacgccgcggccaaggcgggcatcatcggcttcagcaagtcgctggccaaggaaatcggttcgcgcggcgtcaccgtcaatgttgtcgcacctggcttcatcgacaccgacatgaccaaggcgttgccggaagaagcgcgcaccgcgctgatcaacgacatcgccctcgaacgcctggggtcgccggaagacatcgcccatgcggtggccttcctggccagcccggctgccggttacatcaccggcgaaaccctccatgtgaacggcggcatgtacatgccgtaa

SEQ ID NO: 493810 - DNA, 240 bp, Stenotrophomonas maltophilia
atgagcaccatcgaagaacgcgtcaagaaaatcgtcgtcgaacagcttggcgtcaaggaagaagaagtcaccaacagcgcatcgttcgtcgatgacctgggcgctgactcgctggacaccgtcgagctggtgatggccctggaagaagaattcgagtgcgagatcccggacgaagaagccgagaagatcagcaccgtgcaggccgccatcgactacatcaaggcccacgtcaaggcctga

SEQ ID NO: 493811 - DNA, 1263 bp, Stenotrophomonas maltophilia
atgaagcgtcgcgtcgtcgtaaccggcctgggtatcgtctcgccgttgggcaatgatctggccagcagctgggaaggcatcacccacggtcgttcgggcatcggtccgctgaccaacgtttctgatgcctatctggatcggttcaccaccaagattgccggtgaggtcaagggattcgacatcaccgccgacaatgaactgttcggcaagttccgggtcagcggcaaggatgccaagaagatggacccgttcatccattacggcctcggtgcctcgttcatggccctgcacgactcgggcctggagatcaccgacgccaatgccgagcgcatcggcgccatcgtcggcgccggcatcggcggcctgctcggtatcgaagagcagaccatcgagttccacgagggcaagaagatctcgcccttctacgtgcccaagaccatcatcaacatgctgccgggccagctgagcatcatcaccggcctgaagggcccgtcgttctcggcggtgtcggcctgcgcgacctcgaaccattcgatcggtaccgcgatgcgcatgatccagtacggcgacgccgacgtgatggtggttggcggtgccgagcgtggctcgtcgccgaccgcgctgggcggcttctgcgcgatgaaggccatgagcacccgcaacgatgccccggaacaggcctcgcgcccgtgggacaaggaccgtgacggcttcgtgctgggcgacggcgccggcatcctgatcctggaagagtacgagcacgccaaggcgcgtggcgcgaagatctactgtgaactggccggcttcggcgccagctccgacgcgtaccacatgaccgcaccgagcgagaacggcgaaggcgccgcgcgctgcatggccatggccatgaaggacgcgggcgtgaccccggaacaggtgggctacctcaacgcgcacggcacctccacgccgctgggcgacctgggcgagacgatggcgatgaagaccgccttcggcgaccacgcctacaagatgatggtcagctccaccaagtcgatgaccggccacctgctgggtgctgccggcggcgtggaagcgatcttctcggtgatggcactgcaggacaacgtcatcccgccgaccatcaacctgcagcagccgggcgaaggctgcgacctggactacgtgcccaacgaagcacgccaggccaaggtcgacgtggtgatgtccaatggtttcggcttcggcggcaccaacggcacgctggtcttcaagcgcgtctga

SEQ ID NO: 493812 - DNA, 1365 bp, Stenotrophomonas maltophilia
atgacccacgcaccgctgatccacccgctgccgcacccgatcgatctgctggccctgcagcagcatgacccggcgcgctttccgctgctgatggaatccactgcctcgggcaccgcgcagggccgctggagcctgctgctggccgcgcagggcgatcgcctgcgactggatgcggatggccaggtgcgcgaccagcacgacgcggtgcacgccggcagcttcctgcaggtgctggaccgtgcctggcagcgcgaacgcctgccgcatgacggcagccacagcctgccgttccgcggcggctgggcgttgatgctcgattacgaagtggccagccagatcgaaccggtgctgccggcgcgcgcacgcgaggatggccgcccgaccgcgctggcgctgcgctgcccggccgcggtgctgcacgaccaccacaacgatgccagcttcgtcatcgccgaggccggcgagcaggcgttgctggatgcgctggtggcactggcctcggccgcgctgcccgaagccgggcagggctggcagccgccgcaggcggtgggcgaggatgcgccgcagcgcttcaccgacggtgtgcgccgggtgatcgagtacctgcgtgccggcgatgtgttccaggtgaacctgtcgcggcgctggagcgcgcagtttgccgcgccggtcagcccgcaggcgctgtacgcgcagctgcgccgtgccaatccggcaccgttcgccggcctgttcagcgcccacggccgccatgtggtcagttcctcgccggagcggctggtgtcggtgcatgccggccacgcgcagacccgtccgattgccggtacgcgtccgcgcttcgagggggacgatgatgccgcacgcatccaggagctggtcggccaccccaaggagcgtgccgagcacgtgatgctgatcgacctggagcgcaatgacctgggccgcatctgcctgcccggcaccgtggtggtcgatgagctgatgacggtggagagctacgcgcatgtgcaccacatcgtcagcaacgtcagcggccacctgcgccccgatgtgaccccgggcgaggtgatcgccgccacgttcccgggcggcaccatcaccggctgccccaaggtgcgctgcatgcagatcatcagcgagctggagcaggtgccgcgtggtgcctacaccggcgcgttcggctggctgaaccgcgatggcgacctggacctgaacatcctgatccgcaccgccgaagtggatggccaccaggtcagcttccgcaccggcgccggcatcgtggtcgattcggacccggacaaggaactggacgagacccgcgccaaggcccgcggcctgctgcgcgcgctcggccagcagggctga

SEQ ID NO: 493813 - DNA, 1062 bp, Stenotrophomonas maltophilia
atggcgggagccaagcgcgggtgtctgttcgtggtaacgctggtggtggtgctggccgccgtcgtggccggcgcgggcgcgtggttcttctaccagcagacccgcttcgccgacgccccgatcaccccgaccgccgagagcgtggtcatcgccagcggcgatggcatgaacagcgtgctgcgcaagctgcgcgacgccggcgtggacgagggccaggacacccagtggcaactgctggcgcgccagctcgatgcggccggcaagctgaaggtgggcgagtacgcgctcggtggcgagctgaccccgcgcgagctgctgctgcgcatgcgcgccggcaaggtgctgcagcaccgcgtcaccattgtcgagggctggaacatccgccagctgcgtgccgcgctcaagcgcgccgagccgctgctgcacaccaccgacaacctggatgacgccgcgttgatgcagcgccttggcttcggtggccagcacccggaaggccgcttcctgccggagacctacgtttaccagcgtggcgacagtgatctggacgtgctcaagcgcgcccacgccgcaatggaaaaggcgctggacgaagcctgggaaagccgcgcgccggacctgccgatcaacacgccctacgaactgctgacgctggcgtcgatcatcgagaaggaaaccgcgctggccagcgagcgcccgcagatcgccggcgtgttcatgcgccgcctgaagatcggcatgcgcctgcagaccgacccgaccgtgatctacggcatcggtgccgcgtatgacggcaacatccgccgccgcgacctgaccaccgatacgccgtacaacacctatacccgtgccggcctgaccccgaccccgatcgccatgcccagtcgcgacgcgctgatggccgcggcgcagccggccgccggtgatgcgctgtacttcgtcgccgtgggcgacggcagcggcgcgcacgtgttctcgcccagcctggaccagcacaacgccgccgtagcccgctacctgcagcagctgcgccagcaacgtacccaggagaccccggcgcaatga

SEQ ID NO: 493814 - DNA, 666 bp, Stenotrophomonas maltophilia
atgagtcccgcgctgcttcgccacccgcgtttcgtcagcctggaaggcggcgagggcgcaggcaagaccaccgccatcaatgccatccgtgactgcctgcgccgccacggccacgaggtggtactgacccgcgagccgggcggtacgccgctggccgagcgcatccgcggcctggtgctgaagcccgatgccgagatcgccgccgaaccgctcagcgccgaagccgagctgctgctggtgttcgccgcgcgcgcgcagcatgtgcgccaggtgatccggccggcgctgcagcgcggtgcctacgtgctgagcgaccgcttcaccgattccagctacgcctaccagggcggtggccgtggcttggacccgcagtggattgccgacctggagcgccgcgcggtcggcctgctgccgggcctgaccctgctgctggatgtggacgtggccgtgggccgcgcccgtgccaatggccgcgacctgtggccggaccgcatcgagagcgagcaggacgatttcttccagcgcgtgcgcgccgtgttccgcagccgcgcacagcaggacccgcagcgcttcgcgctgatcgacgccggccaggtgcaggaacgcgtggccgccgatgtggttgcacatgtcgagcgttggctgcaggaaggggagggcgcatga

SEQ ID NO: 493815 - DNA, 957 bp, Stenotrophomonas maltophilia
atgagcacgttttcgccgtggcagcagcgcgcgttcgaccagaccgtggctgcgctcgacgccggtcgcctcggtcatggcctgctgatctgcggcccggccgggctgggcaagcgcgaggtggcgctggcgctggccgaccacgtgctggcgcagggtgatgcaacgcacgccacgcgtacgcgccagctgatcgccgccggcacccatccggacctgcagctggtcagcttcattccgaacaagagcggcgacaagctgcgtaccgagatcgtcatcgagcaggtgcgcgagatcaccgaaaagctggcgctgaccccgcagtacggcgtggcgcaggtggtgatcgtcgacccggccgatgcgatcaaccgctcggcggccaatgcgctgctgaagacactggaagagccgcagcccggccgctacctgtggttgatcagcagcgacccggcacgcctgccgcagaccatccgcagccgttgccagcgcctggaattcaagctgccgccgcagcacgaagcactggcttggctgcagcagcagggccacagcgaagcatcggcgcgcgaagcgctggacgcggcgcgcggccaccccggccaggccgacaactggctgcgcgaagacggtctgagcctgcgccgtgaagtaggccgcgagctggaacagctggccgccggcaagaccggcgcggtggagctggcgcagaagtggtgcgccgatgacaacgcggcgctgcgcctgcgcttcgctgccgacctggcgctggcccaggccagcaccgatgccttgaccacgccggagcgattgcacaagcttgcagcctggttcgatgcggccaaccgcacccgcgacctgctgcgcaccacggtgcgtgcagaccttgcggtggtcgagttgctgctggcctggaacaaggtgaacgagcggcctgccgcaaggggaaatcgatga

SEQ ID NO: 493816 - DNA, 354 bp, Stenotrophomonas maltophilia
atgagtgccagcaacgcccgccagggcatcctgtccttggctgtgaaggacaaagccgcgctgtacagcgcgtacatgccgttcgtgaagaatggcggcatcttcgtgcccacgcccaagcgctacttcctgggcgacgaggtgttcctgctgctgacgctgcccgattccagcgagcgcctgccggtggccggcaaggtgatctgggtgaccccggccggcgcgcagggcaaccgcaccgccggcatcggcgtgcagctggccgacggtgccgaaggcgagggcgtgcgccacaagatcgagaccctgctggccgggctgaccggttcggacaaaccgacccatacgatgtga

SEQ ID NO: 493817 - DNA, 564 bp, Stenotrophomonas maltophilia
atggacgccgaacacctggagtacttcaaggccgcactggaaggccgcgcaagcgtgggctggaacgtctggttcgccgccaaccagcaggcgctggcacaacaactgagccgccctgcactgctgcgcttgaagttcagcacactggatgaagccgaacgcctgctcgccaaggccggcatcgtgccccgcagcacggcgggcaagcgctacgaaatgtactgcgcgcagttctcgccggacgtggtggacgcgaacggtcgcccgctaccggcgatctggcgcgcggcgcacggcggtgccatcggcctgcttgccgagggtgagcaggaggccggccaggcgaagctgctcgcggagttccgccgcgtccgcaagcgcgggctgcaacaggcccacgaatggttggccgatctgtgctttgaaggcgagatggaactgaccagcggcaatgccgaggtgggccgtagtctgctggcggtggtggcgcaggccggcagcggacacgacctgctggatgccacggcgatgatcgcgcgcgagctgctggagcggcacggctga

SEQ ID NO: 493818 - DNA, 408 bp, Stenotrophomonas maltophilia
atgaccaactgcaccgccatccatccccgcctgcacgccttgatcggcgacatcgccgccgacgtgcccggggacctcgcacgcgagatcgagtgcgccctgaacgaacagaaccttccggcgcagtcggccacgttcttcgcccgtctcaatgcgatcaaccatgccgacggtgatgacggacagccgtgcatcagcctcaccctcggcgccagcaatcacgcttcgttgcgccgctcgctatccgggctcggcgcattgctcgatctgctgcaggccgccaaccatgcgcgcaacgaaggcggcccggacgaacagttgggcgccttccataccgacggactgatcgtggccgcacgacagttggtgcgcgaggcacatcattgcctctccagcggcgatgcctga

SEQ ID NO: 493819 - DNA, 381 bp, Stenotrophomonas maltophilia
atgccgctcgcccgcatcgatcttcgcaaaggtaaatccgccgactacctgcaacgcgtcggcgaaaccatctaccaggccatgcgcgcggtgggtgtgccggaaaacgaccgcttccagatcttccaggaacacgcgccgggcacattgatctacgaccccggctacttgggcgtggatcgcaccgacgacttcatctgcatccagatcacctggaacgaagggcgcacgctggagcagaagaaggcgctgtacgccggcatcgccgatggactgcatgcggcggtgggcatccgccgcgaggatgtgttcatcaacctggtggaggtgaagaaggagaactggtcgttcgggaacggtcaggcgcagtacgtgagttga

SEQ ID NO: 493820 - DNA, 1098 bp, Stenotrophomonas maltophilia
atgaacaagccccgctacagcctggacattgtcattgccgcacccggcaccccactgctcgatcccgattcgggaaagcagcagctgacgcccgatggcactcctgatacttccgggcctggccacatgttctatgttctgcacgctccaggtaaagcggcgcagagtttcggcttcgcacccgtcgagcatggcagcatgaatggtcccgggcgcatcgtcagagacgacgtgaaagtctataaggaccccgcccatgtccgtaccatcgaaatcaccgaagcccagtacaacaagctcaaggcgttcggcgacgatccagtggcgcacggcttcagcaagcactacgccgacgtgcgccacaactgcgtggacttcacctgggacgcattgaatcatgccggcatccagcgcaagcacagcctggacgtgaacagcatcggcggccccgtcggccaattgctgccagacgtccgcattccgctgggcgtccagtcacagggcaaggacggttatcgccccctgcgcaacatccatggcgtggacagcattgaaccgcccttccccaacagcgaactcaaccgcacgaccacccatcccctgcccgagcgcagcttgaagcagcgtctgctcagcgaaaccgatggtattgatggccccttgggcgagcgtctggctgcggacgcgcgcgcaccggggcacagccttcatgccttggaccagaaagtgcgtaccgcactcgcccaggccggcgaacagcagggactgccccccggacaggagcacgaacgactggccggccatctgacccacgcggcggtgcaggccggcttcagcgaaaaggacacgctgcaggtggcattcagttcaaacagcatcgccgaggcacccggctacgtattcctgcatcgcagcggcgacaccgcctcgccggaccctgccgccaatcgccagcgcctgtccctgctcgatacgcagcagggcgacgcggacacgctgtatcagcaggccaacgtgcagcagcaatcccgcgacgcaagccggctggcgcaggacgagcaacaggcacaacagcaggcgtcgccgcgcatggcctga

SEQ ID NO: 493821 - DNA, 582 bp, Stenotrophomonas maltophilia
atgaccatccccatcaagccccgcctgcgcatcggcctgcttggtctgtccgggctgctgcttgtctcctgcgccgacaacgggccgcccccaccgccagagccgctggaactctcacagcccatcgccgtggacgcgcccggccagcaggtgcagttcgagttcgaaaccacggcgcgcaattttgccagctaccgcacttatgcggtggaactggagctgcagcggcgaagtccagctacaacgggcacgcccgatatagcaagtatcaacatcccattcgaagtatccctgcagcgtcgggaaggcactacctggcaggagattgcaacacaggacagctatcaggcacgcgcgcgcaacggtgttgagccgctcccctcgtggcaccactctgagagctggcgctatgcctcgctcgcatcaggcagcgacggcagctacctcctgaacgtgacagcgctgccgctggagctcgacagcagataccggctgcagattcaaacggtccatgccatatcaggactgcaagactattcggcaaggctagtcgtgcacgcctcgcgtcctgcagggaagtga

SEQ ID NO: 493822 - DNA, 396 bp, Stenotrophomonas maltophilia
atgctgctggtgctgctcgccccgctggtgagccgctggctggcgcacggtcacgtggctgccgctgcgccggtggcagccatggaccacgcaatgcacgcagagcatgcgcagcacgcgatggaagggcaccacgaccatcacgcgatggcgatgccgcacggcgaggccacgaagaagccgcccgccgatccacacgccgatcatgagatgggcgtggactgcgattactgcctgatcgctgcacggctgatcaccctgctggtggcggccgtgctgctgttggcgccgatggcacaggtgtgccgcgcactgcgcggtgcggtgcaggcgttgccgcaacggatcagcggcacattgggagcgcgtgggccgccggccttgatggccgtctga

SEQ ID NO: 493823 - DNA, 2139 bp, Stenotrophomonas maltophilia
atgaaaacgaaccccaaccccgcgcgcctgcgccgggcgacgctgcctgtcctgtgctcgctgctcttgcatgccgcgcccctgcttgccgccggcgcggcacccccgaccacgctggagaccgtacgcgtggtcgatacccgcagcggtgaactgtcttccaccgccagcgccggctctgcgttgggcctgagcgtgttgcagacaccggccagcctgacggtcatttcgcgcgagcagctggagcagcgcggcgacagcaacctcaacgatgcgatcagccgagcgggtgcgatcagtgccgtgccgcacccgggcaatggcctgagtgcgctgtccagccgcggcttcaccgacggtgcctcggtgatgcggctgtacgatgggctgcgccagtacggcggcgtgggcatcacgttcccgttcgatacctggtcgatcgagcgcatcgaagtgctgcgcggcccggcctcggtgatccatggcgacggggcgatcggcggcgtgatcaacatcgtgccgaagaagcccacgcgcggcgccatcgagaaccagatcagcatgaccgtgggcagcgaggacaccgcgcggctgggcttcggcagtggtggcgcgctgacgcctgagctggcctatcgggttgatgtgagcggcaactacagcggtggctgggttgatcgtggacgcaacagcgacgcgacattctccggtgcgttgctgtggcagccacgtgcggacctgcagctgatgctcacccatgcgcagggctaccagcaacccatgcgctacttcggcacgccgctggtcgagggccgccagctggaggcgctgcgccaccgcaactacaacgtggacgacagcgagatccgcttccgcgaccgctggacccagctcgacgcgctgtggacaccgaacgcgaacgtggaatggcgaacccgcgtctaccagatcgacagccagcgtgattggcgcaatgccgaggcctatgtctacaaccgcgctaccggcttgatcgatcgctcgggcaataccgagatcacccacaaccaggaccagaccggactgacctcgacgctgcgtgtgcagggaacggcgggtggcctgcagaacaacttcgtggtgggcctggacgccaaccgcgcgcacttcaagcacaccaacaacagctatgccggcagctcgggcccggtcgatccgttcgatcctgtcccgggccagttcgccagcgacgcgccgaacctgccgcgctaccgcaaccgtgccgagcagtacgcgctgttcgtggaagaccggctggcgctgagcgagcgctggtcggtgctgggtggcctgcgccacgaccgcgcgcgcattgatcgcaccgatctgatcagcggccagaacgcgttctcgaagacctacagcagcacaggctggcgtgcgggtacggtactcgcgctgcagccgacgctgagcctgtatgcgcagtattcgcaggcggcggacccggtcagtggcctgctgatgatcagcccggccaacggcgcctttgacctggccaagggccggcagatcgaggtgggcctgaagcaggccttcgacggtggcgagtggacgctggcggcgtatcgcatccgcaagaccgggctgctcagccgcgatccgctggtgccggatcgccgggtgcaggtgggcgcgcagacctcgcgcggtatcgaggcgtcgttgaactggaacttcgcgccgcgctggtcgctcgatgccaacgcgacggtgctgaaggccgaattcgaggacttcctggaaaccacgggttcgccggcggtgctggtatcgcgtgatggcaacgtgccgccgaacgtagccgagcgcctggccagtgtgtggctgggctggcagttcgcaccggactggagtgcggcgggtggcgttcgctacgtcggcaagcgctacgccgacaacgccaatacgctggaactgcccggctacagcaccaccgacctggcactgacctggcaggcggcaccgcgcactcaactgtccgcgcggttgttcaacgtgttcgacaaggcgtactacgccaccgcgtactacaccagcacgcagtggctgctgggtgcggaccggcgcgtcgaattcaccgtcgaccatcgcttctga

SEQ ID NO: 493824 - DNA, 1515 bp, Stenotrophomonas maltophilia
atgacgttgcgttccaccgccaagcgctggacctacctggtgcatcgctggctgggcatcggcggatgcctgctgatgctgctgtggttcgtcagcggcatggtgatgctgttcattggttacccgaagctgacacccggtgagcggctggcggcgttgccggtgctgggtgaggcccgcgacctgcaggggctgtcggtactgccggctgccgtgcaggccgagccggaggctgtggcgttgaccacgctgcgtggcgaggcggcgtatgtggtgcgcagtggcagcaacgtgggggcctggtctgccgtgaccggccaggccctgctgccggtgtcggcacagcgcgctgaagcatccgccgcgcagttcgcgggcggccaggccttcgtgggtgcaatgcgcgtgaatgaggatcgttggacgcattcgcgtgcactggacgcgcatcggccgctgtatcgggtggaggtgggcggcgctcagccgggcgacctgtatgtgtcctcgcataccggtgaggtggtgctggacgccccgcatgcgcagcagcgctggaactatgtgggcgcctggctgcactggctgtacttcctgcgcatgcagtcggtcgacccggtgtggacgtggggggtgatcgtgctgtccgcactgtgcacggtggcggcgatcagcggcatcgtggtgggcgtatggcgctggcgtttccgtgggcattatcgttccggtgcgaagacgccgtacgtcgagccgtggatgcgctggcaccatctgatcggattgtgtgctgcggccttcgtgttcacctggattttcagcggcctgatgtcgatgaatccgctgcaggtgttcagcagcccggcggatgcgacgaatgccgagcgttatcgcggtgcggtggtggcgctggatgatgcgctggcccagccgcaggcgttgctggcctccgcggcacgggcggggtttgcgccggtggagatccagtggcggcgtatcgatggccagctgtttgcggtgctgctggacgggcagggcggtacgcgcatcgtctcgcgcgtagatgggcagctgcagcttgcgaagcaactgccggtggcgtggctgcagcagcgtgcaccggtcttgggcaccgcaccgctgcgtgcattcacgatcctgcatacaccggatgcctggttctatccccgcgcgcctgaggcgatgaacggtgcggcggtgcggcgcttcccggtggcggtggccgacttcggcgatgaacacgccacgcgggtgtacatcgatctggccaccggcgatccgttgctgatcctgggccatcgcgaacgcgtcggccgctggctgttctacttcctgcacagctgggacctgccgggcatgctacggcaggagaacacgcggctgggcgtgctgttgctgctgagcgtcgcgggtacggggctgtgcgcgactggcgtggtgatcggctaccgtcgcctgcggatgaaattcggccggccgcgccagcgaaggggatga

SEQ ID NO: 493825 - DNA, 1338 bp, Stenotrophomonas maltophilia
atggaagtacgactcacgcgcgagcaggtactcgcgcttgcgccggatgcggcgtcggccaaggccggcggcggcctggccatcgatggcaaatggggcctgctgggtgccgatgacgaggcgctgtggggcgaatgccagggcagcggttccaagccctaccagacccaggtggacctggccgcgctggtcagccggtgttcctgccccagccgcaaatttccctgcaagcacgggctggccctgctgctgttgtatgccgccggcaacccgcgctgcgtgccacaggcgcgaccggcgtgggtggacgaatggctgaacggacgccgcgaccgcgccgcgcgcaaggaggctgccgtggaggcggccgctgttgcgccgcccccggacccgcaggcgcaggctgcggctaccgccaagcgcgagcaggtgcgctggggccgcatcgaagccggtgcagccgagctgcagcgctggattgccgatcagttccgccagggcctggccaacctgcccgccgatttccacgcgcagggccagaccatggtcgcgcgcatgattgatgcgcaggcgccggggctggccagccagctggaggctgcgctgggcgagggcataccgggcctggctggcctgggcgaactgggcgcgcggctggggctgctgcagctgctgacccaggccgtggcacgccgtgcgcagtacgaaccggcgcgactggccgacctgcgcgccgcgctgggctggccggtagaccgcgaggcggtgcagcgcgatggcgaggcggtgcacgaccgctggcacgtgcaggggcaatggctgctggaacagccgggcaacctggtcgagcgccgcgtctggctgcatgggctggacagcgggcgcagtgcgctggtgcaggatttcagccacggcggtcgcggctggcaggaacaatggcgcactggcagcgtgcatgcggcgcggctgcatttccatgccggcagtgtgccgctgcgcgctttggtgagcgaattcgaagcggcccgcgctgaaaccaccacgccccgcaccgataccttcgacgcggcctcgcaggcgtacgcgcgcaacccctggttgccgcaggtgccgatgcgcctgcaggacgtccacatcgcccatgacggcacgcagtgctggctgcagcatgccgaaggcgcgctgccgctgcagctgccgggcctgcaggcgtgggcgttgatggcgtttgccggtggtcatccggtgtgcgtgatgggtgagtgggacggccaggtgctgttgccactgtcggcatggaatgcgcgcgacgagcgctgggaaaggagtgccgcatga

SEQ ID NO: 493826 - DNA, 1527 bp, Stenotrophomonas maltophilia
atgaaccaggcctggttgaagccggcgttgctgggcattgaccgcccgcaggtgattgccgtgggtggcgcgctggatgtgctgctgcaggcggtggccgatgcggacgaaccggcattggcctacagccgccaagtgggcgtgctcgccgcctgcgagcgcgccgccgtgcgcacggccgcagcggtgagcgtgccgccaccagtggcggatgacccactgcagttggcggccgaccacccgtgggttgcgttgctggccacggtgttccagcccggccagttctcgccttggggcaagcggctgcggctgcaggcctgcgcgcagctggccgcacacggccggcacctgccggtggcggtgctgccacaggcgctggaggcaggcgcgcgcctggccgtgctgcgcgaggcgctgcgtgcggtgctgggggtgcgcggttactggctggcggcctgcaatccggagtggcgctatgcgtctgcaccgctggaagcgcaggccagcgcggaggaggtcgagcaggtctggaaagagggcagcagcgaggcacgcctggccgtgttccagcagcagcgcctggaggatgtagcggcggcgcgtacgcggttgcaggacagcctgaaggaactgcccgcacgcgagcgtgccgcgttcgtggccgcgctgcaggcgggcctgggcgcggacgatgcgccgctgttgcaggccttgttgaaggaccgcagccgcgaggtgcgcgcgctggccgggccgatgctggcgcgactgcccgactcggcgcacgcggcatacctgcaggtgcagatggcggcgttgctgcagcagtcgcgcagcggcctgctgcgtcgcctggcgtggacgctggaggcgccggccacgcttgacccgggctgggccgaagcggcgatcgacggcaagcggcccaacggcgaagtgctgggcgagcgggcctggtggctgtaccagctggcgcgccagctgccgctggcctggtggtgccggacgctggaaaagccggccgccgaggtcgtggcctgggcgcgcgagggcgactggtaccaggcgttgctgcgcgcgtggctggagcgcgtggatgccagcgaaccggagtgggtggaagcgctggtcgcgctgaaggaaacccatgcgcgcaagagcgagctgctggcgttgctgcctgcggcgcagcgcgagcggtactggccggccaagctgcaggacctgatcgcacagggcctgctcgatgatgtgctggacagcaccggcgcggcgcagtcgttgagtgcggcctattcgcaggcgctggcccccagcgtgggcgcactgttcggcgatgaacgcctgcgctacgactacctgctgcgcgaccgcctgctggaactgctggcggtgctgcatccgtccacgctggccggcgtgcagatcgccgagccgccggccacggccaccgacgcgatgctgcactgcgcgcaacaggcgcgtgcgctgctggccctgcgccaggccctgtattcccccttctga

SEQ ID NO: 493827 - DNA, 1083 bp, Stenotrophomonas maltophilia
atgaccactgccgtcctgcgccagcacgccgaacaccaatacgccgaggaactggaggagctgcgccgccaggacaaccgccagcgcccggccaactggacgatgtcgccgtgggcggtcgtcacctatctggtgggtggcacgctggacaacggcttcgtggtcagccccaagtacatcggtgaccgccggctgatggaaatcgccgtggccaccatcgccaccgaccgcgcgctgctgctgttcggcgtgccgggcacggccaaatcctgggtgtccgagcacatgactgcggccatcagcggtgattcgaccctgctggtgcagggcaccgctggcaccagcgaagagcagatccgctacggctggaactatgcgcagctgctggccaacggccccagcgaaaaggccctggtgcccagcccgatgatgaacgcgatgcgcctgggcaagatcgcccgcatcgaggaactcacccgcattcctgccgacgtgcaggatgcgctgatcaccgtgctttcggaaaagaccctgccggtgcccgagctgggcagcgaagtgcaggccgtgcgcggcttcagcgtgatcgccacggccaacaaccgcgacaagggcgtcaacgagctgtcgagcgcactcaagcgccgcttcaacacggtcatcctgccggtgccgtccagcgaggaagacgaagtggccatcgtgctcaagcgcgtgggtgaactgggtacggcgctggacctgccggccgagccgccggcgctgcaggaagtggcgcgcgtggtgcgtatcttccgcgagctgcgcaacggcgtcaccgaggatggcaagtcgaagctgaagagcccgaccgctacgctgtccaccgccgaggccatctcggtcatcaacaatggcatggcgctggccggccacttcggcgatggcgtgctgcgcccggcggacatggccgctggcatgatcggcgccatcgtcaaggacccggtgcaggacgcgctggtgtggaaggaatacctggagacggtggtgaaggaacgcagtgagtggaaggatctgtaccgcgccttccgcgaacacgcctga

SEQ ID NO: 493828 - DNA, 2295 bp, Stenotrophomonas maltophilia
atgagtgaagggacttccctgttcggcatccgtcaccacggcccgggctgcgcgcgcagcctgctggccgcgctggacgcgttgcagccggactgcgtgctgatcgagggtccggccggtaccgaggacctgttgccgcacgtgctggatgcggccatgcagccccccgtggccctgctgtcctacagcgtggacgacccgcagctggcggtgttccatccgtacgcgctgtactcgccggaatggcaggccctgcaatgggccgcgcgcaatgcggtcgaggtgcgcttcatggacgtgccaccggcgttgtcgctggagtggctggagcaggcgcggccggcgccgccgcaggacgaggatgccgaggatgccgaggcagacgatgctgctgaggccgccgccgaagaggccgccgaggagcgcccggccgatccgctggactggctggcacgggtcgccggccacgccgatggcgaggcctggtggaaccacatggtggaggaacgcggcgatggccaggggctgttcgaggcgattgccgaagcgatgaccgcgctgcgcgaacacaccctggattatcccggccgccgcggcgagcaggaagcgatgcgcgaggcgcacatgcgcacggcactgcgcgcggcaagcaagaacttcagccgcgtggccgtggtctgcggcgcgtggcacgtgccggcgctgcagccggcggcgctgcgcgccaacagtgcggctgccgacaaccgcctgctgaagggccagagccggcgcaaaacgcagagcacgtgggtgccgtggacctaccgccacctgagcgcaggcagcggctacggcgccggtgtcgatgcaccgggctggtacgaccacctgtggcgcaatgccggggtgcatggccagcgtgcggtgggctggtatgcgcgggtgggccgcctgctgcgcgaacacggcctggactgttcgtccgcgcatctgatcgaggcgacacgcctggccgataccctggcggccctgcgcgggcgcccggcgcctggccttgaggagatcggcgaggccagccgcagcatcatctgcaatggcgacgatgcgccgatgcagttgatccgcgagcagctgctgattggcaatgcgctgggccaggtgcctgacggcgtgccggtggtaccgctgcagcgtgacctggaagcgcagcagaagcgcctgcggctgaagcccgaggcactggaaaagaccctcgacctggacctgcgcaaggacaacgatctggcccgcagccacctgctgcaccgcctgcgcctactgggcattgaatggggccggttggcgcgctccggccacgctgcacgtggcaccttccacgaactctggcagctggcctggcagccgcatttcctggtggcgctggtggaagccagccgccatggacagacgctggtggatgcggcgtcgaacctggcggtcagccaggcacgcgcagcggctgacctgccggcgttgtccgagctggtcgaccaggtgctgctggccgatctgccgcaggccgtgcaggccattgcggccgaactggaagcgcgcgcggccaccgatgccgatccgctggccctgcttggcgcgctgccgccgctggccaacatccatcgctatggcaacgtgcggcagaccgagggcgtgcaggtcgcgcacctgtttgacagcatgctggaacgcgcggtgatcggcctgtcgctggcgctgaccggactggacgaagcacgcgcggaagcggcccgcgaggtcgtgctggctgccgagcgggcgatcagcctgcgcgacgatgccgacggccgcgatgcgtggcggcaggcgctgcgccgggtcgcgctgtcgcaggccagcacggcactgctgcgtggtgtcagcctgcgcctgctgttcgatactggcgcgctggacgccggcaccgtgcacacccagttgcagcagcaactctcgccgggtgccgagccgctgcaggccgcgcagtggctggatggctttctcaaccgcaacgccaccgtgctgctgcatgacgatgcggtgtggcggatgatcgatgactgggtggtgagcctggatgaaacccagctggtgcgcgtgctgccgctggtgcggcgcacctttgccgcgttcgaggcggctgaccgccgcgacctgggcacccgggttgcgcgggccactgtgacgaaggcggtggccagcgaagccccggactggaacctggcacgcgccgagcgcgcgctgccgatgctgcgcgaactgttggggattgccggatga

SEQ ID NO: 493829 - DNA, 1203 bp, Stenotrophomonas maltophilia
atgagcacgccagacgacctgtccaatgacacagtgggccagctgcccaccacgcgcgaacagcgctggcggctgatcctgggccagcaggccgatggcagctgcggcgcactgcccaagcccctgcagggcatcgaccaggcgctctccgcgctatacgaaccggagggccagggcggcctcaaccggcgcggcgggcgcggtggatcggcgccgaacgtggcgcgctggctgggcgacatccgccgctacttcccttcctcggtggtgcaggtgatgcagcgcgatgccctgcagcggctcaacctgacccagatgctgctggagaaggaaatgctggagcaggtgcagccggacgtgcacctggtggccaacctgatcggcctgggccaggtcatcccggcggagaccaaggacaccgcgcgcatggtggtgcgcgcggtggtcgacgacctgctgcggcggctggaagagcccatgcgttcggcggtgaccggtgcattggaccgtgcccgccgcaaccgccggccgcgcctggccgagatcgattggcaccgcaccatccgcagtaacctgcggcactggcagccggaactgcgcacggtggtgccacaggaactggtgggttatgggcgcaaggcgcgcaagccgcagcgcgaggtgctgctgtgcatcgaccagagcggctcgatggcggcttcggtggtgtattcgagcatcttcggtgcggtgatggcctcgctgccggcagtgtccacgcggctggtggtgttcgacaccgaagtggtggacatgagcgagcagctggatgacccggtcgatctgctgtttggcgtgcagctcggcggcggcaccgacatccatcgcgcggtgagctattgccaggggcttatccgcgaaccacatggcgcgatcctcgtgctgatttccgatctttacgaaggtggagtggaggacaagctgctggcgcgtgcgcacgagctggtggagtcgggcgtgcagttcatcgtgctgctggcgctgagcgatgaaggtacgccgtcctacgaccagcagctggcaggcaagctggccgcgttgggcgtaccctcgttcgcctgcacgcccgatgcgttccccggcctgatggccgctgccatccgacgcgatgacatcaaccagtgggccggcgccaatggcctgctggcgacccgtggccgctga

SEQ ID NO: 493830 - DNA, 648 bp, Stenotrophomonas maltophilia
atgacccccgctgtccatcaccgcctgcgtattgccggcgaccagtacaccggccagaaagtggtcgaccagcagttccatgagtgcgatttttccggtgccgacctgaccgccaccgagttcatcaactgcagcttctacgatgccgacagccgcagcggctgccgcttcaatggcgccacattgaaggaggccagcttccgcagctgcgacatcagcatgtgccacttcaacttcatcaaggcgctgggcctggagatcagcgagtgccgcgcgcagggtgcggatttcagcaacgccagcttcatgaaccagatcaccacgcgcagctggttctgcagcgccttcatcaagaagtcgaacctgcgctatgccaatttctcgcgggtcacgctggagaaatgcgaactgtgggagaaccgctgggacggtgcaaacgtcagcggcgccagctttgccggctcggacctgtccggtggccagttcgagggaatcgactggaacagcgccaacttcaccgactgcgacctgaccaattccgatctgggcgagctggacctgcgcagcaccaacctgcgtggcgccacgctggatgtccagcaggtggcgctgttgatgcagcgcatcggcatcacggtggtgccgtag

SEQ ID NO: 493831 - DNA, 675 bp, Stenotrophomonas maltophilia
atgtcttcgttctccgatccgcaggccgttgcccgctatgccgagggcccgctgcgccaggtgccgggcttcctcgcgttgcagcagatgagtcgcctgctgctggccgaacacgttcctgcgcagggccgcgtgctggtgctgggcgccggtggcgggctggagctgaaggcatttgccgaggcgcagccgggctggcagctgctgggcgtggacccggctgcaccgatgctggccctggccgaacagacactgggcccgctgatgtcgcgcgtgcagttgctggaaggctacatcgacgatgcccccgacgtgcgcttcgatggtgccagctgcctgatgaccctgcacttcctcgacgccgcgcagcgcctgcacacgctgcgcgagctgcacaggcgcctgcagcccggcgcgccgctggtggtggcccaccacagcgtgccgcaggatccggccggcaagctgcgctggttgcagcgctacgccgcgttcgccgaagcctccggcgttgcccacgccgatgcacagcgcgcgatcgacgccattgccgagcggctgccgctgctggcccccgaacaggaggtcgccctgctgcaggaggccggcttcgacgatgtggagctgttctatgcgggcttcagcttcaagggctgggtggcgtacgccggctga

SEQ ID NO: 493832 - DNA, 699 bp, Stenotrophomonas maltophilia
atgaccccgattctcttctacggcgtgccctcgggctgctcgttcggctccatcgtcgcgctggaatggctgcgccagccgtatcacctgtgccgtatcgacatgcccggccaggtgcagggcgaagactatcgccgcctcaatccactgggcgagacccccactctgtgcaccgcgcagggcgaactgctcagcgagagcctggccatcctcaaccacctggccgccaagggcgttgcgcaggggctgggcttcgcacagggcacctccggcttcgaccgcctcaaccaccggctggcctatctcaacaccagcttcttcggtgcctacgccccgctctggcacgcgctggaacacgccgagggcgatgacggcaaggcgctgcgtgcctatggcaccaccaaggtgcgccaggcccatcaggcgctggagcagatgctcatcacaggcccgtggctgctgggcgagcagcgcagcttcgccgacgcctacttcgccggcatcgcgcgctggaacgactaccaccaggtggtcgatcgccgcgagttccccagggtgcagcagctgttcgagcgcttgcaggacgacgccggcgtgcagttcgcccacgccatcgaagcacagcggccggctaccaacagcggcggcttcctcggcgacgtgcggctggaagacgtgcttgaggccgcggcggcctga

SEQ ID NO: 493833 - DNA, 945 bp, Stenotrophomonas maltophilia
atgctcaacctcaacgatctggccctgttcgtggccgcagtggagcagggcggttttgcagcaggcggacgccatctgggcctgccccgctcgacgttgagcaagcgcgtggcgctgctggaagaacacctcggggtacggctgctgcaacgcagttcgcggcgcttcgcgctgaccgaagtcggccaggcgttcttcgatcgcgcacgcgcggcgttgtccgaggtgaagtccgccgaggccattgtccgtgaccgccaggccgaaccgagtggcaccgtgcgcatcagcgcttcgattccggtggtgcagggcgagctcgcagtgtgcctgcccgcgttggcccgccgctatccgcggctgcgcatcgaagttgaagtgagtgatcgtttcgtcgacctggcgcaggaaggcatcgacattgccttgcgcagccacttcggtccgctgccggattccggtttggtgcagcgctcgctgggtagcgagcgcatcgtgctggtggcgtcccctggctatctggcagccgcgccggcagtggacacgcccgagcaactacgcgcgcatgccggcctgctgacggcgcgccacgcaacgcgctggacactgcacggcaccgatgcgcgcaccgtgcaggtggaaccgcaggtggcgctggtcggcaatgagtcgcagcttctggtctcggcggccgaagcgggtcttggcatcactgtgttgccgcacagcctgtgtgccgcagcgattgcggccggccgcctgcagcaggtcctgccggcgtggcatgccggcgaagtgaccaccagcgtgctgctgccgcatcgtcgtggacagttgccgggcgtccgcgtggtggtggatgcgctggtcgcgcattaccagctcaacgcaacgcccgcgccagcacctgccagatcctcgggtcctggcactgcgagacgttga

SEQ ID NO: 493834 - DNA, 1380 bp, Stenotrophomonas maltophilia
atgccgcgcccgctcacccgcatcgaatcggtcatccagaccgtccgcacccgcatcagtgcacgggtggatggccccggctcccgcctgccttcggtacgtgcgcaggcggcgaccatgggggtttcagtctccaccgtggtcgaggcctacgagcgcctggcggccgaaggcctgatcagtgcgcgcgcaggctcgggcttctacgtcagtggcccggccgcaccgctggcgctggctgaaatggagccgcggctggatcgcgcggtggatccgctgtgggtgtcacggcaatcgctggaaacgcccgcgggcgatctcaagccagggtgcggctggatgcccagtgactggctgtatcacgatggcgtgcgccgcggcctgcgccggctggcgcgtgccgatgccatgcaactggtggactacgccggcccgctcgggctgcccgcgttgcgccagctgctgcaaaggcgaagcgccacgcttggcatcgatgcaccgatggagcagatcctgctgaccgaatccggtacgcacgcggtcgatctgctctgccgtttcctgctcaagcccggcgactgcgtgctggtcgatgacccgagctacttcaattaccacgcgctgctcaaggcgcaccaggtgcaggccatcggcgtgccgtacacgcacagcggcccggacctggaggcgttcgcgcaagccctgcaggcgcattcgccgcggctgtacatcaccaattccggcctgcacaacccgaccggcgcggtgctttcggccaacaccgcgcaccgcctgctgggcctggccgaacgcagcgagttgatcatcgtcgaggacgacatcttcgccgacttcgaactgcagccggcaccgcggctggccgcgctcgatggactgtcacgggtgatccacgtcggcagtttctccaagacgctgtcggcagcctcgcgctgcggctacatcgctgcacgccatgactggatagaagcattgaccgacctgaagctggcgaccagctttggcggcggccatctggccgcgcagttgatgcacatcgcgctgaccgacagcggttaccgccgccacatgcagtcgatacgttcgcgcctggccgatgcacgccggcacacactgcggaaactgcaggcgctgggcatcacgccgtggctgcagccggaagccggcctgttcctgtggtgccagctgcccgacggccgcgacgccgccgcactggcgcggcaatgcctgcgcgagggcatcgtgctggcgccgggcaacgcgttcagccagtcgcagcgcgcggccgactatctgcgcttcaacgtctcgcagtgccaggacccgaggatctggcaggtgctggcgcgggcgttgcgttga

SEQ ID NO: 493835 - DNA, 864 bp, Stenotrophomonas maltophilia
gtggaacggtcggcgagtggttggatcaatggcttcatcggtgtggtgatcttcgccggctcattgccggccacccgcctggcggtgctgcagctggatgccgggttcgtcaccgccgcacgcgccaccatcgccgcggtgctcggtctggggctgctgcttctgctgcgccagccatggccgcggcgcggcgacctgccggggctggtggtggtcagcctcggtgttgtggtcggcttcccgctgctgaccgcgctcgcgctgcgtcacgcgtcgtcggcgcacaccatcgtgttccttggcctgctgccgttgagtacagcggtgttcggcgtgctgcgcggtggcgatcggccgcgcccggcgttctggctgttctcgttgctgggcagtgcctgcgtggtcggctatgccgcgcgcaacggaatcgaagcctcgttgcaggccgacctgctgatgctggcggcgatcgtggtgtgcgggctgggctacgcggaaggtggtcggctcgcccgtcatctgggcggctggcaggtgatcagctgggcactgctgctggcgttgccggtgatgctgccgctgacggtgctgatgcgcccggcctcgttcaccgcggtcggtgcctcggcgtggtgggcactgggctacgtggcagtgttcagcatgctgatcggcttcctgttctggtaccgcgggctggcccagggcggcatcgctgccgtcggccagctgcagctgctgcagccgttcttcggcctggccctggccgcgctgctgctgcacgaatcggtcagcctcagcatggtgctggtgactctggtcgcggtgatctgcgtcgccggcgcgcgccgcttcagccgctag

SEQ ID NO: 493836 - DNA, 924 bp, Stenotrophomonas maltophilia
atggactccatctccgccctgctcgccttcgtccgcaccgcggagtcaggcagcattgtcggtgccgcccgcgtactcggcctgtcagcctcggccgtcggcaagcgcatcgcccggcttgaacaggaactcggcacgcgcctgttccagcgcaccacccgccgcgtgcatctcaccgacgaaggcgaactgctgctgcaacgctgccgacgtgcgctggatgagctttccgaagcgcaggcggacctggcgcagcgacagcacgcccccagcggactgctgcgcatcggcctgcccaccatcggctaccgcttcctgctgccggtgctgcccggcttccagcaacgctatccgcaggtgcagctggaactggacttcaacgaccgcatcgtcgatgtggtcagcgaaggcctggatgcggtgatacgcagtggcgaactggccgattccagcctgaccgcacggcggctgggtggttttcgtttcatcctctgtgcggcgccgggctatctgcagatgcatggaacgcccggcgatgtgggcgacctgcgcatacataccgcgctgcgcttccgttaccccaccaccggaaagctgcatccgtggcagctgcccggcatcgaaggcgacgccggggcgcgccttcccacggcgatgacctgcaacaacatggaggccgtgctggccgctgcgatcggatgcatgggcctggcctggatgcctgacttcctcgccgctgacgcgctggccgatggccgcctgcaacaggtgctgcccacactgcccacgcaccaggggcagttctcgctgctgtggcccggcgggcgccatcccagtgcacgcctgcgggtgttcatcgactatgccgttgcgcaccttttccgcagcaccccggaaaaggggacggaggggattaagtcgtaa

SEQ ID NO: 493837 - DNA, 1518 bp, Stenotrophomonas maltophilia
atggccccggattcgatgctccctgtacctgtccgcgcgcagcagcgctgggcgctgcttgcggtctgcctggccgcgctggcgttgccgttgtccttctctgccggtgcagtcgcggtgccggcgctggcccgttccgcggcggcatcgcccaccgcgctggcctgggtgaccaacgccttcatgctcaccttcggcagtctgttgctcgctgcgggcggcttggccgatcgatatggccgtcggcggctgttcctgctgggcacggcgggcttcaccaccgccaccgccgccgtctgccttgctcgcacgctgctatggctggatctggcgcgcgggttgcagggcgttgccgcggcggcggcgctggcatccggcacggcgctgctggcacaggcctggcaggggccggcgcgtgcccgtgtcttcgccctgctgggcaccacgttcggcatggggctggcgctggggcccctgctcgcgggcctgctgctgcagacattgggatggcgcagcgtgttcgccgcgggcggtgtgctcacgttggtggccttcggcctgggggcacgcgcgttgcctgaaagtcatggcgagcgccgaccactggatatcggcggcatgctgagtttcagcctgacgctggcgacgttgaccctggcgctgctgtggctgggcgagttcggcctgcatgccgcgcgcgtgcggctggcgctgctggtgacgctgctgttgggcggggtgttcgtcttcatcgaacggcggcacccctcaccgttgctggacctctcactgttctcacaaccggcgttcctcggtgtccagctgctgccggtggcgacctgcttcggctacgtggtgctgctggtcgcgttacctctgcaactgctgggcgtgcatggccagagcgcgacgctggtgggactgcagatgctggcgctgtccgcgccgatgctggtcctgccgatgctggccgcgcgttgggcggaccgcgtaggaagtgcgcggttgtgcacgctgggtctgctggtgtgcgccgccggcctgtacctgttgtcgcggcaggcgtcgcacccgtcgcccgcgcagtgggtgccgctgctgatgctggtcggcgcaggcacggctttgccgtgggggctgatggatggactgtcggtgagcgtggtaccggtgcaacgtgccggcatggccgcaggcatattcggaaccgtgcgggtggccggcgaaggcatcgcgttggccgcagtcactgccttgcttgcgctgctgatcggccatcagctgcagggcgcgtcgccggcatcgctggtgcgtgccggtgcctatctggccacgggggcgcgggaacaggcgcaggcactgctaccgacgatgagccgcatgcagctgcagcacgccagtagtgaggcgctggcgacactgctgcgtgtactggcgctgctgaccgccgcctgtgccgccgtgttgcgcctgttgctgcggaaacgcacaggtgccttggtcggggacatggtgtag

SEQ ID NO: 493838 - DNA, 174 bp, Stenotrophomonas maltophilia
atgtggctgctcgaccatctctggcccagccgtcgaccccttcctcccccggtcgaggacgcgccacaggcaccgtcacgccggccctggctgaaacgcccggcgcgggccgggcgcagcggcatggcgccctggcagaaggtggccacgccaccgcggcgcacgcgccactag

SEQ ID NO: 493839 - DNA, 405 bp, Stenotrophomonas maltophilia
atgggcatcacttccgtggccggcgttccggtccaaccccagcaccgcgccacctgccactgcggcacggtcgagctgttgctggacctcccggacggcatcgtcgacccgcgccgctgcgactgctcgatgtgccggcgccggggtgccatcgccgccagcgtcccccgccagggcctgcaggtggtgcgcgggcagcatcacctgcagaagtaccagttcaacacccatgtggccgagcactacttctgcggggtgtgcggcatctacacccatcaccggcgccgctccaaccccgaccagtacggctacaacgtggcctgcctggagggcatcgacccgttcgcgctgggggtgatcccggtcagcgatggggtcaaccacccatcagaccgcaccggctag

SEQ ID NO: 493840 - DNA, 975 bp, Stenotrophomonas maltophilia
atggcgctggcagcgttgtgggtgaccgggctgctggcctatcagatgccggggccgggctggctggccaatggcattgcggtgctgtggctgctggttgcgctgtgggcgtcgtggcaggtcgcgcgtggccgtggccatcgtcgcctgggcatggcgttcggcgcgtcgctggcgctggccggcctgtggtggctgctgctcaccccgcgccaggaccgcgtctgggccgatgacgtggcccagcgcctgcacgtggtgtccttcgacgggcgccacgtggtgctcgacaacgtgcgtgatttcacctggcgcagcgagaccgactacgacgcgcactgggtgcgccgcgcgtacgacctggaccaactccgctcggccgatctggtgctgtcgtactggatgggcccggcgatcgcccacaccctgatctcgttcggtttcgaggatgggcgccacgtggtgttctcgctggagatccgcaaggaacgcggcgaatcgttctcggcgctgggcggcttcttccgcaaattcgagatgaccctggtggccgcggaggagaccgacatcatccgcacccgcaccaacgcgcgtggcgaggatgtctacctgtaccgcctgcacggcatggaccaggcgcaactgaagcaactgttcgccgcgtacatcgcgcaggcgcgcgaactggatgcgaagccgggcttctacaacacgctcaccagcaactgcaccaccatcgtcttcgatctggcccgccacatcgcgccgcgcctgccgctggactaccgcctgctgctgtccggctacctggccgaatacgcacaggaggtcggcgcgctcacgccgggcgtgccgtatgccgaactgcatgacaagggccgcatcacccagcgtgcgctggacctgggcagcggcgaccacttctccaccgtgatccgccagggcgtgcccggcaccgagcaggacccgcagtaa

SEQ ID NO: 493841 - DNA, 2022 bp, Stenotrophomonas maltophilia
atgacccgactcttcctgatccgctggcagcgcgcgctgccggtgttgttcgccgccttcctgctgctgggcagcagcggctgcgcgatggtgactgtcaagcaggtgaagtccagcgattcgctggtgaacaagcgcgccgatgtgctcaacaccggcaagctcagcccggccgcgcgcgagacgctcagtgcggcgggcctggatgagtcgcagtgcgagaaggacttcctggtctgccgcagcacgttgttgatgaccgatgacctcaacgtcgagcagcggctgtcggcgctgtccgaactgtgggtgaaggccgcgctggcgctgacgccgaagaagaccgccgctggcgatccgccgatgagcgatgcggcgctggatgcctggctggaagccgcgcgctatgcctatgcctacctgttctacagcggccgctcgccgtccgaccgcgccttcgaggaccggcagacgcaggtgcgcgactactacaactacgccgccgagaaggcggcggtggtgctgttcgtgcgcgcgcgtgcagcggcactggccggcgaggactatacgaagccgatctcggtcggcagctggtcgctggcctccaactaccagcagttgaacctgaagagcattccggcgcagttggtgccggccggcacggtcagcttcgtcggcctgcgcagcacctatcgccgcgatggcttcggtgccgagctggtgatggtgatggacccgcccaagctggtcgcgccggtgatcgcgggcgatgggccgaaggcggaaacagcggcggatgatgccgacgacgagcgccgtggccgccgccatcggcatgacgattcggtgccagaattcagcgagatgtcctcgatcaacgtcaccgcgctgctgcgtttcgaaggcagcagcctggaagacgtgatgcgcacgcgccgggttgaactggacgcctattcgccggaggccaccgaacgcatcaccctgcacggcgaacaggtgccgctggccggcaatttcaccgctgcctacggcctgtggctggcgcagagtggctttgcccggcagtcactgcgcaccctgttcggcatgagtgagggcatcggcgaaccgcacatctacctgatgcagccctgggacccgaaccgccgcatcatcttcatgctgcacggcctggccagcagcccggaagcctgggtgaacctggccaacgagatcatgggcgaccccgagctgcgccagcagttccaggtgtggcaggtctactacccgaccaatgcaccgatcgcgctgaaccgctacgagatcgccaacgcgttcaatgacacgctcaagcacttcgaccccaacggcagcacacgcgcatcgaaggacatggtctatatcggccacagcatgggcggcgtgctcgcgcggctgctggtgagcgactcgggtgatgtgctgtgggatgacctgctggccaactatgacctgaagggcgagcggctgaagcgggtgcaggccaagctggggccactgctgcatttcaaggcgcagccgaacgtggaacgcgcgatcttcatcgccgcgccgcaccagggcacggatatcgcaggcaacaaggtcgggcggctgatcgggcgcctggtacgcctgccgctgaccattctcggcaagttcgaggacgtgttcatggcgctggcacaggccgagcagcaggtcgacggcaccgccaagccgaagattcccaacagcatcgacaacctcaaggccagcgatccgttcgtgaaggccgccgcacagctgccgatcgaagcgggcctgaagtaccactcgatcatcgcccagcgcaagccggagctgccggtggagaagtccgatgacgggctggtgccgtactggagcgcgcatctgccgggcgcgctgtcggagaaggtgatcatttccggccacagcgtgcaggagaccccgcaggccgtgctggaagtgcgccgcatcctgcatcgggatatcgatgatgtgggggccggtacacggtaa

SEQ ID NO: 493842 - DNA, 1422 bp, Stenotrophomonas maltophilia
atgctgctaccttcgccgcccgttgacaagcgcggcctgcacctgacccgtatgaccccgaccctctctcccgccgacacccacctgccggctgacagctcgatcctgtccgcgcgctaccgcgccacgaccatcggcatggtcgcactggtcgcgctgcacgcgttcgaagcactggccgtcgcggccgcgatgcccaccgtggccgaagcactcgatggactgcgcctgtacgcgctggcctttggcggcaccctggccaccagtgtaatcggcatgaccctggccgggcgctgggccgatcgccacggccccgcgcggccactctggtacggcctgggctgcttcgtgctgggcctgctgctggccggctttgcgacgcgcatgggcatgctggtggccgggcgcctgatgcagggcctgggcgcgggcgcgatttcggtctcgctgtacgtgatggtcggccgcagctaccccgaacacctgcggccgaaggtgttcgcggcgttctccgcaggctgggtggtgccctcgatggtcggcccggcgttgagtggcctgatggtgcagcacctgggctggcgctgggtattcctggcagtgccactgctggcgataccggccgcactgctgctgcgcccggcactggcgcgcatgcaacctcccgttgcggtctgcaacgatggcgaacgcagcaacgtggtgcgctgggcctctggcgcctcactggccgcactactgctctacgtcggcggccagcaacagggcatggccgccctgctctgcatcggcgtggcgatgctggcgctgctgttctgcgtgcatcggctgctgccggccggaaccctgatcctgcgccgcggcctgcccagcgtgatcgcgttgcgcggcattgctgcagcggcgttcttcgcctgcgaggcctatctgcccctgctgctgcagcgcgaacgcgggctctcgcccagctgggcaggcgccgtgctcagcctcggtgcgctgggctggttcgccggttcatggctgcagggccaccagcagcgtggctggtcacgccagcagttgctgcgcgttggcacggtgatgatgacggtcggcatcgccgcaacgctgtcggtgctgttcaacccgatgccgctgccggtcgcgctggtcggctgggccgtgaccggcttcggcatgggcatgatctacgccagcctgtcggtgctgaccctgtcgctgtcagcaccgcatgagcagggtgccaatacctcggcgctgcagctgagcgaggcgttgtcggtgaccaccgcgctggcggcctccggtgcactgttcgccctgttcgtggacagtgcgccgcacaccggttacctgctgtgcctggccatcaccttcggcctggcggtgatggccgcagtgatcgcgcggcgggtgtag

SEQ ID NO: 493843 - DNA, 435 bp, Stenotrophomonas maltophilia
atggcatcccaggaactcagcgttggcgaggtctcccagcgcagtggcgtggccgtttccgcactgcatttctacgagcgcaaggggctgatcagcagcctgcgcacctcgggcaaccaacggcgttacagtcgggacgtgctgcgccggttggcggtgatccgcgtggcgcagcgggtgggcatgccgctggaagcagtcggccgtgccttcgaaagcctgcctgacggccgcgcaccgaccaaagcggattgggccaggttgtccgcgcgctggcgcaccgagctggaagagcgcatccacatgctgcagctgctgcgcgacgaactgaccggctgcatcggttgtggctgcctgtcgctgcagcattgccgcctggccaatcccggcgacgtcctcggcgaacgcggcgacggcccgatgcgctgggagtga

SEQ ID NO: 493844 - DNA, 603 bp, Stenotrophomonas maltophilia
atgaagatcctcctcgttggtgccagcggcaccctcggccaggcagtcgcccgccagctcggccaacagcatcagattctcgccgccggccgcagcagcggcgaactgcgcgtggacctgaccgatgacgccagcgtcgccgaactgttcgcacgtaccggcccggtcgatgcggtgatttccaccgccggcaagctgcacttcggcccgctgcagcagatgacgccggcgcagttcaacctcggcctgcaggacaaattgctgggccaggtgaggctggcactggccgcgcagcatcatctcaacagcggcggctcgatcaccctgaccagcggcatcgtcagcgcacaaccgatccgcgacggcgtcaacgccacctcggtgaatgccgcactggaaggcttcgtgcgcgcagccgcactggagctgctgccgcgcggcctgcgcatcaacgtggtcagcccgaacgtactgatcgaatcgatggccgcctacggcccctacttcccgggcttcgaggcggtaagcgcacagcgcgcggcactggccttccagcgcgcggtggaaggcatccagagcggcgagacgatcacggtctggtaa

SEQ ID NO: 493845 - DNA, 876 bp, Stenotrophomonas maltophilia
atggatacccttcgatgcatgcaggctttcgttgccgtggccgagcgtggcagcttcgccggcgccgccgaacagctgcaggtctcggcggtgatggtgggcaagtacatccagcagctggaggcgcatctgggtaccgcgctgctgcaacggaacacccgccgccagcgcctgaccgaagccggcagcgcctatctggccggctgccggcaagtgctggagcaggtgcagcaggccgaggccgatgtggccggtctgcaggtacagccgcgtggcctgctgcgggtcagtgcgccgaccacctggggcagctgcgtgctggcgccgcagctggccggcctgctgcgcgcgcagccgcagttgaacatcgaactggatctgagcaaccgccgtgtggacctgatcgaggacggcttcgacgtggcgatccgggtcgggccgttgccatcgcaggaggtggtggcgcggccgctgccgccgtatgcgatgagcctgtgcgcggcgccgtcttacctgcgcaggcgcggcacgccacgcacgccggcggacctgcaggggcatgattgcctgagccatcttgcctggcgtggtggccatggctggcagttggccaacggtgaacaggtggattgggaggcgcggctgacctgcaacgacgggttcgcgctgcgcgaagccgccgtggccggggccgggttggtgttgcagcccaccgcgctgctggccggcgagatcgcggccgggcggttgaagccgctgctgcgcgactacctgcccgaaccgcgaccgatgcatctgatctacctgccggatcgacggccgcgcccgcggctgcagtgcttcgtcgatttcgtcatgaccacattggggcaatga

SEQ ID NO: 493846 - DNA, 822 bp, Stenotrophomonas maltophilia
atggcagctgattccatcaccttcatcggcggcggcaacatggcgcgcagcctgatcgccggcctgatccgccagggcatgccggccgcgcacatccatgtggccgaaccagtggccgccctgcgcgagtcgctggctgccgacttcggcgtgcaggtgcacgacaacgcaatcgatgcggccgcgcagggcggcacctggctgctggcggtgaagccacaggtgctgcgcgaggtctgccagtcgctgcaggcactggcccaggcaagccggccactggtggtgtcgatcgccgccggcatcaccagcgcgcagctggaacgctggctgggcggcaacctgccggtggtgcgtgcaatgcccaacacgccggccctgctcggcgccggcgtgaccggcctgtatgccacgccgtcggtggatgcacagcagcgctcgcaggccgaacaggtattggccagtgccggccgtaccgtgtggatcgagcgcgaggcgctgatggattcggtcactgccgtgtccggcagcgggccggcctacgtgttcctgctggccgaagcgatggaagcggcgggcattgcccagggcctgccggccgacgccgcgcgcacgctggtggtgcagaccctgctgggcgcctcgcgcatgctcgatgaagccggcgaaagcccggccgagcttcgccgccgtgtgacctcgccgaacggcaccacccaggccgcgatcgagagcttccaggccggaggtttcgaagtgctggtggacaacgcgctgcgtgctgcgcaggtgcgcgggcaggaattgtctgcggcgaatgattga

SEQ ID NO: 493847 - DNA, 678 bp, Stenotrophomonas maltophilia
gtggccactcccttgccccagatcctgagcaacctgcatgccgccgccgaggcggccggccggcctgatccgcgcctgctggcggtttccaagacccaaccggccgaggccgtggccgcgctggccgcgcagggccagcaggccttcggcgagaactatgtgcaggaagcgctggcgaagatgcaggcgctgcagcacctggcgctggagtggcacctgatcgggcacctgcagtcgaacaaggccgaggccgtggccagccatttcgactgggtgcagagcgtggaccggcccaagctggtgacggcgctggcgcgccatcgcccggccgcgcgcggcccgctgaacgtgctgatccaggtcaacatcgacgacgaatccagcaagcacggctgtgggccggaggacgtcgaggcattggccgccgcgattgccgctgagccccgcctgcgcctgcgtggcctgatggcgattcccgcgccatggcccgaggccgagcgtcgccgcgatgcattcgtgcgcatgcgcacacttttccagtcgctggccgcccggcacgcgcaggtcgacacgctgtcgatgggcatgagcagcgactacgccgacgccatcgccgagggcgccaccctggtgcgcatcggcaccgccctgttcggcgcgcgcccgcgcccggcctga

SEQ ID NO: 493848 - DNA, 1038 bp, Stenotrophomonas maltophilia
atggatatcgccgaactgctggcgttttccgtaaagaacaaagcgtccgacctgcacctgtccgcaggcctgccgccgatgatccgcgtggacggcgacgttcgccggatcaacatcccggccctggaccacaagcaggtccatgcgctggtgtacgacatcatgtccgacaagcagcgccgcgattacgaggaattcctcgaagtggacttctccttcgagattccgtcgctggcgcgcttccgtgtgaacgcgttcaaccagaaccgtggcgccggtgcggtgttccgtaccattccgtccgaggtgctcaccctcgaggacctggcctgcccgccgctgttccgcgaggtgatccagcagccgcagggcctgatcctggtgaccggcccgaccggttcgggcaagtcgaccacgctggcggcgatgatcgactacatcaacaagaacgaatacggccacatcctcaccgtcgaggatccgatcgaattcgtgcacacctcgcagaagtgcctgatcaaccagcgcgaagtgcaccgcgatacgcatggtttcaacgaagcgctgcgctcggcactgcgcgaggacccggacatcatcctggtcggcgaacttcgcgacctggaaaccattcgcctggcgctgaccgccgcggaaaccggccacctggtgttcggcaccctgcacaccagctcggcggccaagaccatcgaccgcatcatcgacgtgttcccggccggcgaaaagccgatggtgcgttcgatgctgtccgagtcgctgcgtgcggtgatctcgcaggcgctgctgaagaaggttggcggcggtcgtaccgcagcgtgggaaatcatggtcggcaccccggccatccgcaacctgatccgcgaagacaaggtggcgcagatgtactcggccatccagaccggccagcagtacggcatgatgaccctggaccagcacctgcaggacctggtcaagcgcagcctgatcacccgcaaccaggcccgcgagtacgccaaggacaagcgcctgttcgagtaa

SEQ ID NO: 493849 - DNA, 1143 bp, Stenotrophomonas maltophilia
gtgaacagcaccgcgaccaccatcgatttcacttcgttcctcaagctgatggcgcaccagcgcgcctcggacctgttcatcacggccggcatgccgccggcgatgaaggtcaacggcaagatctcgccgatcacccagaccccgctcacgccgcagcagagccgcgacctggtcctcaacgtgatgaccccggcgcagcgcgaggaattcgagaagacgcacgaatgcaacttcgccatcggcctgtccggcgtcggccgcttccgcgtcagctgcttctaccagcgcaaccaggtcggcatggtgctgcgtcgcatcgagacgcgcattccgaccgtggaagaactgagcctgccgccgatcatcaagacgctggcgatgaccaagcgcggcatcatcctgttcgtcggcgccaccggtaccggtaaatcgacctcgctggcagcgatgatcggttaccgcaaccagaactcgaccggccacatcatcaccatcgaagacccgatcgagttcgtgcacaagcacgagggctgcatcatcacccagcgcgaagtcggcatcgataccgacagctgggaagccgcgctgaagaacaccctgcgccaggcgccggacgtgatcatgatcggcgaggtgcgtacccgcgaaggcatggatcacgccatcgcgttcgccgaaaccggccacctggtgctatgcaccctgcatgcgaacaacgccaaccaggcgatggaccgcatcgtcaacttcttcccggaagaccgccgcaaccagctgctgatggacctgtcgctgaatctcaagggcgtggtcgcgcaacagctggtgccatcgcccgatggccgctcgcgcaaggtggcgatggagatcctgctgggcacgccgctggtgcaggactacatccgcgacggcgagatccacaagctgaaggaagtgatgaaggactcggtccagctgggcatgaagaccttcgaccagagcctgttcgagctgtaccaggccggcgagatcagctacgaggacgcgctgcgctacgccgattcgcagaacgaggtgcgcctgcgcatcaagctcagccagggcggcgacgcacgtaccctgtcgcaggggctggacggcgtggagatctccgagatccgttga

SEQ ID NO: 493850 - DNA, 984 bp, Stenotrophomonas maltophilia
atgcagacacgcgaactgggccgcagtggcctgaaggtttccgccctcggcctgggctgcatgggcctgacccatgcctacggtcagccggtggagcagggccagggcatcgccctgctgcaggccgccgtcgagcgcggtgtgaccttcttcgacaccgccgaggtgtatggtccgtacaccaacgaagacctgctcggccgcgcgctggcgccctaccgcgacaggctggtgattgccaccaagttcggattcaagggcgcgcgcaccgatgacggcctggacagccgtcccgagaatatccgtgccgttgccgaagccagcctcaagcgcctgcgcaccgaccatatcgacctgttctaccagcaccgcgtcgacccgaacgtgccgatcgaggatgtggctggcaccgtgcgcgacctgatcgccgaaggcaaggtcggccacttcgggctgtccgaggcgagcgctgccaccgtgcgccgcgcgcatgcggtgcagccggttgccgccgtgcagagtgagtactcgctgtggtggcgcgaaccggagcgcgagttgttgccgacgctgcaggagctgggcatcggcttcgtgccattcagcccgcttggccgcggcttcctcaccggcacgatcaacgccgacaccaccttcgatgccaacgatttccgcaacagcgttccgcgtttcgaagtggaggcgcgccgcgccaaccaggcgctggtggatcgcatcagtacgattgccgcagcacggggcgcgacgccggcgcaggtggcgctggcctggctgctggcacaggcgccgtggatcgtgccgatcccaggcaccaccaagatccatcgcctggaagaaaacctgggcgcggccgacctgcagctggcgccggaggagctgcaacgcatcgcacaggcgctggacgaagtgtcgatcgtcggcgagcgctacaacgcgcagcgcgccgcccaggccaagggctga

SEQ ID NO: 493851 - DNA, 897 bp, Stenotrophomonas maltophilia
atgccccgcgaaaacctcaacgacctgcaggccttcgtccacgttgcccgcgagggcagcttcaccaaggcggccgcccagctgggcgtgtcccagtccgcgctcagccatgccatgcgcggcctggaacagcgcctgggcgtgcgcctgctgacccgtaccacccgcagcgtatcgaccaccgaagccggtgcccgcctgctcgacaccctgggcccacgcctggccgagatcgaggacgggctggccgcactggccgagtaccgcgaacgcccggccggcaccatccgcatcaatgccaccggccatgccgccgagtacatcgcttggccgcggctggcgccgttgttgcagcgttatccggacctgaaggtggaactgaccaccgactacggcctggccgacatcgtcgccgagcgctacgacatcggcatccgcctcggcgagcgcctggcgcgcgacatggtcgcggtgccgatcagcccgccgctgcgcatgcgcgtggtcggtgcacccagctacttccgccagcacgtggtgccgcagcatccggacgacctggccaagcacaactgcgtgaccctgcgcctgcctacgcatgggggactgatgccgtgggatttcggccaggatggcaacgaactgagtgtgcgcgttggcgggcaatggacgttcaacaccatgggcatgacccgcgccgctgcgctggccggcagcggactggcctggctgccggaagaccaggtgcagccgatgctggacgatggccgcctgcagtcggtgctggacgactggtgcccgcacttcgatggctactacgcgtactacccgtcgcgccgccacgtcaccgtggcgatgcgcacggtgcttgatgcgctgcgcgggccgctggggtga

SEQ ID NO: 493852 - DNA, 213 bp, Stenotrophomonas maltophilia
atgagcactgacaccaagccgcaaggcccggcctcgtatttcccctccatcgagaagatctacgggcagccggtggcgcactggttcgggttgctggccgggaagaagggcctgaaacacatggaactggtcagcttcctgaagagtgaacatggcttgggccatggccatgccaacgcactggtggctcaccatctggccggcaagggctga

SEQ ID NO: 493853 - DNA, 450 bp, Stenotrophomonas maltophilia
atgcaggtcacgctggaagcgatcacccccgacaactacgaagcggtgtgcgacctcgacgtcagcgatgcgcagcagggcttcgtggccagcaatacctggtcgctggtgcaggcggcgtttcatcccggctaccagacccgcgccatccaggccgatggcgagctggtcgggttcttcatgtgggtgccggagacgccgcagcggatgtcgatctggcgcttcatggtcgatcaacactggcagggccgtggcatcggtcgacgcgcgctggaactcgcgctggcgcagatccgggccacgcccggtctggccgagatcgagatctgctacaacccgcgcaatccggtggccggcgccttctacggcagcttcgggttcgtcgagaccgggatggacgacgacggagaggacatgctggccgtgctgcctgtagcggtcccgggataa

SEQ ID NO: 493854 - DNA, 756 bp, Stenotrophomonas maltophilia
atgcagatcgtgtctaataccgctccccacctgctgttcccccaccgcatgtcccttccttcccatggccccgcgccgtgcgacgacgctgacggccacctggtcaccgccggtccgctgaccccgccgcccgacagtgctggcaccaccgccgacgaaaaagcgctgcgtcactcgatcgccgaggacgtgcagggcatggtgctggccacgatggtggcctcgctgggcctggccatcttcgccaagggcgggctgatgatcggcggcatggcgggcatggccttcctgctgcactacgcgatgggctggaacttcggcctggtgttcgtgctggtcaacctgccgttctactgggtggcgctgcggcgcatgggctgggaattcaccctgaagaccttcgccgcggtcaccgcctgtggcgtgctgaccgacctgctgccgcgctggatcgacttctcgcacatcaacccgctgtattcggcgatcgtcggtggtgccttgtccggcctcggcatcctgttcttcatccgccaccgcgccagccttggcggcatcggcatcctggcggtgtacctgcagcgcacccgaggctggagcgccggcaaggtgcagatgtcctacgacgcctgcctgatggtagccgcgttcttcgtgctgtcgccatcgaaggtgctgtactcggccatcggcgcggtggtgctcagcctggtgctgatgttcaaccaccgccccggccgttacatgggcgtgtga

SEQ ID NO: 493855 - DNA, 546 bp, Stenotrophomonas maltophilia
atgagcggctactgcctcatcgccccgggccatccggtgcacgactactaccacgccaacgagtacggcttcccgcagcgtgacgagggcgaactgttcgagcggctggtgctggaaatcaaccaggccgggctgagctgggagacgatcctgaaaaagcgcgagggcttccgcgcggcctatgacggcttcgatgtcgaccgcgtggcggcctatgccgagcaggacatcgagcgcctgctatcggacgcgggcatcatccgcaaccggctgaaggtactggccgccatccacaacgcgcaggtgatccagcagctgcgggccagtcatggcagcttcgcggcgtggctggatgcgcatcacccgcgcagcaaggccgactgggtgaagctgttcaagaagaccttccgcttcaccggtggcgagatcaccggcgagttcctgatgagcctgggctacctgcccggcgcgcacgccgaggattgcccggtgcatgcgcggctgctgaagctgtcgccgccgtggttgcaggccgccgcccgctga

SEQ ID NO: 493856 - DNA, 1788 bp, Stenotrophomonas maltophilia
atgcagtcttcatcgcccctgaccctgccggcacgcggcgccatcgtcctgattgccctgctgcagggtctgatgctgtatgccgcgcaggaactgtccgatgcgtggccgttccgcgatatcggctggcgctactgctggtacgcctgggtgctggccattcccagcgcggtggcgctgagcctggtcgagctgggccagcgccgcctgtggctgcaggccgtgctcggctcggcggtggtgctggcgctggccgcctggatcggctggaacctcactggcgagaccgcgctggagtcgagcgcgctgcagtttccactgaccctgggcatcgccgtggcggtgttcgtggccctgccctggtggcagttccagctgcagcacgggcattggcgcgccagctaccccgagctgttcgagcgcgcctggcagaacggtttgaccctcgccctggcggcgctgttcaccgggctgacctggctgctgctgtggctgtgggcggcgctgttccagctgctggaggtcaccgtcttccgcgacctgttccgacaggatgccttcattgcgctggctaccggcagcctggccgggttcggcgtgctgatcgggcgcacccagcaccgcgcgatccagatcacccgccaggtgctgttcgcgatctgccgcggactgctgccgctgctctcgttcatcgccgtattgttcgtgctgagcctgccgcttaccgggctggaaccgctgtggaagacccgctcggccgccagcctgctgctggtgctgtcgctgttgctggtgacgttcaccaatgcggtctaccagcagggggacgacaccgcgccctaccccgtcgtgctgcgccgtctggttgaagccagcctgctggcgctgccggtctacgccgcactggcgctgtacgcactggggctgcgcgtggtgcagtacggctggaccgtggaccggttctgggcggtactcgtcgcagtggccgtggccggctatgccgtgggctacgcgctggcggtgctgcgccggcagcgccgctggttgcagatgctggagccggtcaaccgctggatgtgctgggcggtgctggcactggcattgctgggcaactcgccgctgctggacccggtgcggctgaccctgtccagccagctggcgcgcctgcgtgcggacccgcccgcgatcaccagcagtgacgtcaacgtgctgcgcttcgatcttggccaccgcggcgtgcgggcgctgcgcgagctgcagcgtgatccagccatcaccgccgatgccaacgcaccacaggtgatcgcggccgcgctggcacgtacctcgcgctgggatgacggccagcgcctcgacaaggggccgcaggacgtcgtcgccctgcagcgtgcgttgaagctggccaagggatccagctcgccaccggacgactggtggcaggcactggccacgcgcgcgatcgatggcgaatcctgcgcccagagcgagcgcgactgcctgatcgtgcatcgcgatctggatggcgacgggaacaccgacgtgctgctgtgcgagctgtacaccatccgtgggccggactgcgtgctgtacgcacgtggcagggacacccactggcgccgggccggttcgctgttcggcaccgccagcggccaggccgaggcgatcaaccaggcgctgcgtgatggcaaactcactcttgaaccgccgcgctggccgatgctgtccattggtgggcgccccgcagtggccatcgatcccgaacccgaatccagcgagtcttccccatga

SEQ ID NO: 493857 - DNA, 567 bp, Stenotrophomonas maltophilia
atgcctgtaacgccgacctccctcgccgatcacctcctcgtcgcgctgccgtcgctgctcgacgcgacctttgcccgcagcgtcgcgctgatctgccagcacgacgagaacggggcgatgggcgtgctggtcaaccagccttccgagtacacgctgggtgaagtgcttgcacagatggacatcaccaccggtgacggcgacctgcaggcgcgcatggtgctcaacggcggcccggtgcatcccgagcgcggcttcgtcatccatgacgacgcgcgggcgtgggattccagcctgatcgtgggtgacggcctgtacctgaccacttcgcgcgacatccttgaagcgatggcgcgtggcgaaggcccggccaatgccgtggtcaccctcgggtgtgccggttggggcgcagggcagctggaaagcgagctgtccgagaacagctggctgaccgtgccggccgatgccgagctggtgttccagctgccactggagcagcgctggcagggtgcggcctcgcgcatcggcgtggacctgttccggctgaccgactacagcggccatgtctga

SEQ ID NO: 493858 - DNA, 495 bp, Stenotrophomonas maltophilia
atgtctgagccggccacgcccgtaccggctcctgctgtcccggcgatccgccgtgacggcaccgttctgggtttcgacgtcggctcgcggcggatcggcgtggccatcggcagtgccttcgctgcgcatgcgcgcgcggtggcggtggtcgatgtgcacggcaatggcccggactggaccgcgatcgaacgcctgctcaaggaatggaagcccgacggcctggtggtcggcgacccgctgaccctggacggccaggaccaacccaaccgcaagcgcgcgcagggcttcgcccgccagctgcgggaacgtttcaaactgccggtggtgatgatcgacgagcgttccagctcggtcgaggccgcccgccgcttcgccgtcgagcgcgccgaagggcgcaagcgccgccgtgatgcggccgccctcgatgccgtggccgcggcggtgatcatcgaccgctggctgtcgtctcccgacgacgccacccccattccctga

SEQ ID NO: 493859 - DNA, 951 bp, Stenotrophomonas maltophilia
atgaccgcccagcaaatcgatgcctccggacgcctgcgccacctgctgaccctggagggcctgccgcgcgggaccctgctgcagctgcttgaccgggcaggtcagatccgcgatgccgcagtcggccgcgtcggcaacaagcgccacgtgctggccggttcggcggtgtgcacgctgttcttcgagccgtccacgcgcacccgcagctcgttccagctggccgcgcagcgcctgggcgccgatgtgctcaacttcgatgcctcgacctcgtccacccgcaagggcgaaaccgcctgcgatacgctgcgcaacctggaagcgatgggcgtgcgcggcttcgtggtgcgccacccggaggatggcgcggtagccgcactggcagaagcggcgggcgagggcaccgcactgatcaacgccggtgacggtcgcagcgcgcacccgacccagggcctgctggacatgctgaccctgcgccaggccaagggcccggatttctcgaagatgaaagtggtgatcgtcggcgacgtgaagcactcgcgcgtggcccgcaccgacctgcatgcgctgcgcacgcttggcgtgggtgagatccgcgtgtgcggcccgcagtcgttgctgccggacgatgagaccctgaagggctgcgtggtcggcgatgatttcgacgcgatgctggaaggcgtcgacgcgctgatgatgctgcgcctgcagcgcgagcgaatggaagaaggcctggtgccgtcgctggagcagtaccacgcccagtacggcctgacccgcgagcgcctggcgcgcgccggcaaggatgccgcggtgctgcacccgggcccgatcaaccgcggcgtggaagtgaccgacgacgtggccgacggcccgcagtcgtgggtgctgcgccaggtcgccaacggcgtcgccgtgcgcatggccgtgctggaaaccctgctgggctga

SEQ ID NO: 493860 - DNA, 492 bp, Stenotrophomonas maltophilia
atgcagaacacacgtctcctgctcggtcgtcgctccagcatcggcctcagctatatcctcaccaccgtcgtccatgaccgcgcgccgctcttcaccaacgccgcagcggccgccttggcagtccgcgaattccagcgactggatcaggaaggcttcacccgctcgattgcgtacgtggtcatgcccgaccacatccactggctggtcgaactacgtgcgggaacgctggaaaccgtcatgaagcgtttcaagtcgcgcacagcccagcaggcaaaccggttgctggggcgagtcgggcgcttctggcaggcctgctatcacgatcatgcgatccgctctgacgaatcgttgcaccggcatgcgatgtgcctgatgggaaatccgatcagggccggactggcgacgcggcttgggcaatatccccatgcatggtgcgaatgggagcttggggcttcgtgtgatccgctcgacaacttgggcgcggatggatag

SEQ ID NO: 493861 - DNA, 801 bp, Stenotrophomonas maltophilia
atggtccgatcgatgtcgcgctggctgccgctgctggcctttctgatgatgagcggttgcacttcgctgccggacagcgcgcgcggccgcttcgagggccgcgcagtgaaggtggacggcgagaccgcctactaccaggtgttcattccggccggcgttcaggccaccgctcccaccagactcccggtcatcctgttcctgcacggctccggcgagcgtggcggcgacggtgtcaagcagacccatgcggggctggggccgcacctgcgcaggcacgcggccgacttccccgcattggccgtcttcccccaggtgccgggccaccaggaatggagcgggcgcaacaaccgcgttgcgctggccgccctggacgccaccatcgccgagttcggtgccgatccctcacggcagtacctgaccgggatgtcgatgggcggctatgggagctggaacatcgcgctggatgaccccgggcgcttcgccgcgatcgtgcccgtgtgcggcgcggtgctggcgccgcgcgcggtgcgcccgaccctgttcgtcgagcaggtcgcccaggaaaccgatccgtatgcggccatcgcccagcgcctgagaggcacgccgatctggatcttccacggtgcgctggatgatgtggtgccaccggacgacgatcgcagactgcacgccgcattccggagcgccgctgcacgcgacgtgcgctacaccgagtacccggacggcaaccacaacgcctgggacgccacctatgccgacccggcgatgtgggcatggctgttcgcgcagaagcgctga

SEQ ID NO: 493862 - DNA, 267 bp, Stenotrophomonas maltophilia
atggccaccacgatcgaaaactatttccagcccggctggcgcgaccagcagcacacctgcccggcctgcgaatggaagggcagctcgcgtgccatggagatggagctggacgaggacgccaccgagtacgcctgcccggtctgcgagaacccgctgctggtggtgctgcatccggacatcgcgcaggtgcaggcggccgccgccgacggcaatgccgaagcgcaggagcagctggacatcattgccagtttcccgcgaccggagtga

SEQ ID NO: 493863 - DNA, 1362 bp, Stenotrophomonas maltophilia
atggctgaagctgtacgccacgacaagactgcgcgccaactgcggatgttgtccgatgcactggacagcggccggctgggcccggtacgtcggctggtcaacaccctggccccggccgagatcggcaacctgcttgaatcgctgccgccgggcaagcgcgaggtggtgtggggcctggttgatccggaagatgacggcgaggtgctggtccacgtcggcgaagacgtgcgcgagagcctgctcgcggacatggacccggacgagatcatcgccgcggtcgaagacctggacatcgacgacctggccgacctggtcgaagacctgcccgatacggtcatcgacgaggtcctcaagtcgatggaccgcgagaaccgcgagcgcctggagcaggtgctgtcctatcccgaggacagcgccggccgcctgatgaacccggacgtggtgaccgtgcgcgccgacgtcaatgtcgacgtggtgctgcgctacctgcgcctgcgcggcgaactgccggaccataccgatcacctgttcgtggtcagccggcgccatcagtacctcggccgggtgtcgctggcggcactggtgacccacgaggacaccaccccgatcaaccgcctgatcgacgacgagcagccggccattgacgtcggcgagagcgaccaggaggtcgcccgccagttctccgaccatgactggatctccgcgccggtggtggacgacaacaacatcctgatcggccgcatcaccatcgatgacgtggtcgacatcatccgtggccaggccgagcaccaggcactgggcgccgccggcctggacgaggacgaagacctgttcagcccggtctggcgcgccatgcgccgacgcttgatgtggctgtcggtgaacctgtgcaccgccttcctggcctccagcgtggtcggccacttcgaaggcaccatcgacaagctggtggcgctggccgtgctgatgccgatcgtggcgggcctgggcggcaatgccggtacccaggtgctggcgctgatggtgcgcggcctggcactgggccaggtgggcgcgtccaacgcgcgcacgctgctgtggaaggaggtgcgggtcgccttgttgaacggcgtgatgctgggttccgtgctggggctgatcgtgctggcctggttccactcacccgggctgtcggcggtgatcgccatcgcgctgacctgcaacctgctgttcgccgcactggccggcgtgctggtgccactgaccctgaaacgcttcggcttcgacccggcgctggccagcggcatcttcctgaccgccgtgaccgactcgatgggcttcttcaccttcctcggccttgccacgctggtgctgctgcactga

SEQ ID NO: 493864 - DNA, 1683 bp, Stenotrophomonas maltophilia
atgggccgggcgcgcgtgcggctgccgcatgcactggaagtggccgagcaacgcgtggccgcccaccaggtcgaggccgaactggcccgcctgcaccgtgcgctggatgccgcgcgtacggaaatgcacgaactgcgtcagcgcctgcatggcgcactgaaccaggaagtgggcgagttcctcgacctgcacgcgttgctgctggacgaccccgagctgctgtatggcctggacgaactgatccgcagcggcccgtacagtgccggctacgcgctgcgcctgcagcgtgaccgcctggccaaggtcttcgatggcatggacgatgcctacctgaagagccgcatggacgatctcgaccatgtgatcggccgcatccacgccttcctgcaacccgaacgcccgccggtgatgaagggcctggccggcgagatcctggtctgcgacaacatcgccccatccgaactggcgcagctgcaggcgcagggcgtggtcggcatcgtcaccgccgccggcagcgcgctgtcgcacagcgcgatcctggcgcgcagcctgcacctgcccctgatcgtcaatgtgccgcaactgctcagccgcgtcgccgacggcgacgtgctgatcatcgacggtgccgacggcagcatcaccgtcaacccgctggccgacaacctgcgtgactaccgcgcacgcctgaaggaacacgcgcgcgagctgcgcgagcttggccgcctgcgcagcaagcccagccgtacccgcgaccaggtcgacattgccttgctggccaatgccgaatcgctggaggacgtcacccaggcgcatgcgctgggcgcgcaggggctgggcctgtaccgcaccgaattcctgttcctgcagcgcaacgagctgccggacgaagaagaacagttccagacctaccgtgatgccgcactgggcatgagcggccggccggtgaccatccgcacgctcgacctgggtgcggacaaggctgatcgtaccggcctgaccctgagcaacgaagagaacccggcactgggcctgcgcggcgtgcgcctgtcgctggcacggcccaaggtggccgacacccagctgcgcgcgatcctgcgcgcctcggcctacggcaagctgcgcgtgctggtgccgatggtcagcacccgcgaggaactgctggcggtgcgccggcgcatgctcaagctgagcgaacagctgcgcagcgaaggccatatggtgtccgagcacgtgccgctgggcgcgatgatcgaagtcccggcggcggcattggcgctggagagcttcatcgatctggtcgatttcctgtcgatcggcaccaacgatctggtgcagtacctgctggccgccgaccgcaacaacgaggcgctgggtgagttgtattcaccgttgcacccggcggtgctgcggctgttgcagatggtgatcgagaccggcgcacgccaccgcattccggtggcggtctgtggcgagatggccggtgatgcgcggatgaccccgttgctgctggcgctgggcctgagcgagttcagcctgcatcccggtacgttgctggaggtgcgccgcgccatccgcgaagccgatctgggtgcgctgcgcgcccgtgccccgaagctgctggccgcgcgcgaccgccgcgccatcgaacgctggctggcgctggtggccgatacgccctga

SEQ ID NO: 493865 - DNA, 270 bp, Stenotrophomonas maltophilia
atgcttgaacgagaactcaccgtcagcaaccgcctgggcctgcatgcccgggccaccgccaagctggtgcagaccctggcgccgttccgctgcaacgtgaccatggccgccaagggccgtgagatcaacgccaagagcatcatgggcgtgatgctgctggccgccggccagggcactccggtcaccgtgcgcatcaacggcgaagatgaagccgccgcgatggaggcggtggtgggcctgttcgaacgccgcttcgacgaggacagctga

SEQ ID NO: 493866 - DNA, 393 bp, Stenotrophomonas maltophilia
atgacctgtggcattctcctcgtaacacatcccggggtcgggaccgccctgcttgacgtggcgacccggctcctgcggcaattgccgctgaaaaccgaagctttcgaagtaccgttcgacgcagacatggacgccctgctcccgctcgcctcggccgccctgcggcgggtcgacagtggtgagggcgtgctgatcctgaccgacctgtacggcgccagccccgccaaccttgcagggcagctggcccggctgggaaccccggttcgccgggtgtcggcgctgagcctgccgatgttgctgcgggtgatgaattatccggaacagggactggatcaactgcccgccacagccgcggcgggtacccgtaatggagcgatagtcgacgatgcttga

SEQ ID NO: 493867 - DNA, 885 bp, Stenotrophomonas maltophilia
atgagcaccgccaccccctccgccccgaccctgatcatcgtcagcggcctgtccggctcgggtaaatccgtcgccctgaagaccttcgaggatcaggactactactgctcggacaacctgccgatccacctgctgccggacttcgtgcgcagcctgctggccaaccacgacggcagcgcgccgcgccggctggcggtgggcatcgacgtgcgcggccaggccgacctgagccagctgggcgactggcggcagctggccaccgacgccggcgtggaagtgaaggtgctgttcttcgaggccagcgacgaaacggtgctcaagcgctatgccgacacccgccgccgccatccgctgagccagctgggcctgtcattgcccgaggcgatcgcccgcgagcgcgagctgaccgcgccattgcgccgcgaggccgatgcggtgatcgataccagcaacctcaacgtgcaccaactgcggcggcggatcatcaccgagttcgcgatggaccatgccaccggcctgtcgctgctgttcgaatcattcgcctacaagcgcggtgtacccgccgaggcggacttcgtgttcgatgcgcgggtgctgcccaatccacactgggatccggacctgcgtgcgctcagcggccgcgaaccgggtgtacgcgactacctggaagcgcaaccggacgtgcagcgctacctggcccagctgatggacttcctcgatacctggctgccgaaactgggtgatggcacccgcagctacgtgaccgtggcgttcggctgcaccggcggcaagcaccgctcggtgttcctggccgagcgcatggcccggcatgcccgcgagatgggctggcaggacgtggcgacgtaccaccgcgaacaggattga

SEQ ID NO: 493868 - DNA, 951 bp, Stenotrophomonas maltophilia
atgaataccagcatcaccgcccgtgaactgttcgaacagcagcgcgagcggctggggctgcgctgggccgctggcaaatccggtgagaaacgcgagctggaggccggcaacacggtctcgcggcgtccgtcgctggccggctacctcaatgcgatctatcccaacaaggtgcagatcctgggcaccgaggaactgtcctggctggacgcgctggaaccccgccagcgttgggagaccatcgagaagatcatgcagtcgcatccgctggcgctggtgctgacccgcaaccaggcgtgcccggaagacctgcgcgcggccgccgatgaatccggtacaccactgtggctgtcgcccaagcgcggccacgaactgctcaaccacctgtcctaccacctggcgcgcacgctggcgccgcgggtgatcctgcatggcgtgttcatggagatctattccatcggcgtgctgatcaccggtgaggccgggtcgggcaagagcgagctggcgctggagctgctaagccgcggccatcgcctggtggccgacgatgcgcccgaattcacccagatcgccccggacgtgctcgacggcacctgccccgaactgctgcaggacctgctggaagtgcgcggcctgggcgtgctgaatgtgcgcgagatgttcggcgacacggctgtaaagaagaacaagtaccttcggctgatcgtccacctgaccaagccgatgaccgaacccaccccgcatggctacgagcgcctgaccggcgactcgggcacccgccatgtgctggacctcgacgttccgctgatcaccctgccggtgatgcccggccgcaacctggccgtgctgaccgaagccgccacccgcctgcacatcctgcgcaccaagggcattgatccggcagcgatgttcatcgcccgccacagcaatctgctggaacggcgaacaccctga

SEQ ID NO: 493869 - DNA, 453 bp, Stenotrophomonas maltophilia
atgcccctgactgacctcctggcggccgtgcagacccagctctgcacggccaccgaccgtgacagcgtcctgcaggccgccgccgggttgctggcctgccgccaggccaacgccgaacagatctatctgaacctgtgccagcgcgaagccctgggcagcaccgcgatcggccacggcatcgccatcccccacggccgcgcgccgaccctggaccgcccccgtggcgccctgctgcgactggcgaccccggtcgatttcggcggcgacgaaccggtggacctggtgttcgcgatggccgtccccgcccactacacccaccagcacctgatgctgctgtccgagctggccgagctgttttccgcaccggacatccgccaggccctgcgcgaagccggcgatgcccgggcgctgcgcgaggcgctggacatgaccccacctgcgagtgccgcatga

SEQ ID NO: 493870 - DNA, 318 bp, Stenotrophomonas maltophilia
atgcgcatcgaaacgtttggcaaagacgtcgaagtcaccccggccctgcagtcctatgtagaggagaagctggcccggatcggaaaacacttcgaccagcactgcgaagcgcgggtgaccctcaagctgcagaagaccgaacaccacgtcgacgccagcctcaacattccggggcagaccctgcacgccgaggcgggcggccagaccatgtatgccgcgatcgacctgcttgcggacaagcttgaccgcctggtcatcaagcacaaggagaaaaaacagcagcacgcaccgctgccggtgggcgacaatggtggctga

SEQ ID NO: 493871 - DNA, 1422 bp, Stenotrophomonas maltophilia
atgaagactcggctgcagacatcgttgggacaacagctggtgctcacgccccagctgcagcaggcgatcaagctgctgcagatgtccacgaccgagctggagcttgaaatcgcccaggccgtggagagcaatccgctgctggactgggccgacagcaacgacagcagtgccgccaatgagggcagcgacagcaccgaggccgacgcgcccgccgaacgcaccgacaacggcgacgactgggcgccggccgaactcgactggagtgccgccggcagtggtggcagcttcgacgatgacgatgacaccggcagtgccgccgagcgcgtggcggaaaccgaaacgctggccgaccacctgctgtggcagctgcacctgtcgcatctttccacgcatgaccgcagcatcggcgctgcactgatcgatgcgctggacgacgatggttacctgcgcgaaccgctggccaccatcgccgaaaccctgctgccggcggtccatgccggtgaggatgaaatcctcgcggtgctgcatcgcatccagcgtttcgacccggtcggcgttgccgcgcgcacgctcggcgagtgcctgcagctgcagctggacgtgttgcctgccgacacgccggggctggcgctggcgcgacagattgccgcaggcccgctggaacggctgccgcgcagtggcgtctccgggctggcgcatgaactgaaacagccgctggacgaggtcgagacggcggtcgcgctgctgcgctcgctggacccgcgtccgggcacgcagatcgcgccgctgtcgcaggacacctatgtggtgcccgacgtggtggtgtggcggcagaacggcatctggcgcgcagcgctggcggcccatgccgggccgaaggtggtgatccaccgtggctacgaacagctgatccgccgctgtggcgaggccgacgccggctacctgcgcggccagctgcaggaggcgcgctggctgctgaagggcctgcagcagcgcggcgaaaccctgctgcgggtggtgcgcagcctgatcctgcaacaggccggcttcctcgaattcggcgagcaggcgctgcgcccgctgaccctgcgcgagatcgccgccgagctgggcctgcacgaatccacggtgtcgcgcgcgatcgcccgcaagcacgtgcgcacgccgcgcggcaccctgccgctgcgcgccttcttcgcctcgggcatcgataccgaaggcggtggcgaggcgtccagcacggccatccaggcgatgatccgccgcctgatcgacgacgagaacccgcgcaagccgctttctgacgccaagctggctgacctgctcaaatcgtcgggaattccagtagcgcgacgcaccgtggcgaagtatcgtgaagccatgaacatttccgcctcgcacgaaagggtcagaatcgcttga

SEQ ID NO: 493872 - DNA, 720 bp, Stenotrophomonas maltophilia
atgctcgtcgccaagggcctgcgcaagcgctacaagcagcgcgaagtcgtgaaggacttcgggctgaccctcgacgccggtgaagtggtgggcctgctcggccccaacggtgccggcaagaccacctgcttctacatgatcgtcggcctggtcgccgccgatgccggcagcatcgtgctcgacggcaaggacatcaccagcgatccgatgtacacccgtgccaagcagggcgtgggctacctgccgcaggagccgtcggtgttccgcaagctgacggtggccgacaacctccgcctggtactggagcttcgcgaagacctggattcggccggccgcgaacgcgaattgaacagcctgctcgacgagctgcagctgggccatgtggccgaccagctcggcgccagcctgtccggtggcgaacgtcgtcgctgcgagatcgcccgcgcacttgccgcgcagccgcgcctgatcctgctcgacgaaccttttgccggtgtcgacccgatctcggtgggtgaaatccagcgcatcgtcacccatctcaagcagcgtggcatcggcgtgctgatcaccgaccacaacgtgcgcgagaccttgggaatctgcgaccgcgcgtatatcctcgccgagggcaccgtgctggcccagggctcgccggaggcgatcctggacaacgccgacgtacgtcgcgtctaccttggggactccttcaagctgtga

SEQ ID NO: 493873 - DNA, 567 bp, Stenotrophomonas maltophilia
atgaagattccctttgcagccgtactcgcgctcggtctccttgttcccagcgctgcctttgccaagtccaccgaccgcaacgagaacatgaacatcgactccggcgcgcagtcgggcgtgctcaccggcgatggcaagaccgtgctctcgcagggcgtgaccgtcacccagggctcgctggacatccgctcgtccgaagccgagatctacctgaaggacggcgaggccgtgcgtgcggtgttcaccggcaagcaggccacgatgaagcagcagctcgacgatggcacctggatggacgcggtggctgatcgcatcgactacgacatcaagaccgagatcatcaccctgaccggcaactacaaggtcaccagcgcgcgcggcaccaatgccggccagcgcatggtctacaacacccgtagcggcgaaatgaattccggtggcgatggcagccgcgtgcgcaccgtcattccgccgaagaacaagaacgcggcggcacagccggcggccacgcccaaggcggcggcgccggccagcacgtcggccaagccggccgggagcaagaagtaa

SEQ ID NO: 493874 - DNA, 576 bp, Stenotrophomonas maltophilia
atgaacctgccgagcctgaactggcgcaccctgctcggcatcggccttctgctggcggccctgctcagcagctgggcggccctgcacaaccgcgacaagggtccggccactgccggccaggatgtcggcgtggactacgtcctgcacgacttccaggtcgtcgccctggatgagcacggcaaggaatcgaccaccctgcgcgcaccgttgctggagcgccagcgtggcgaccagaccatcaacatcgccacgccgctgttcgagatgccggacaaggatggcaagcactggaccctgcgtgccgagactggctggctcagcgccaagggcgaccagatgaagctgcgcggcaacgtcgccggcgacagcccggccgatccgggcgtggtgccgaccaccttccgcaccgaccacctggacgtgttcccgaaggagaaccgtgcccgcaccgatgcgctggtcaccatgacccgccccggcatggaacagtccggcgttggcttcgaggtggattcgaagaacaacacgtatcatttcctcagccagtccaagggccgttacacgccccgacgctga

SEQ ID NO: 493875 - DNA, 549 bp, Stenotrophomonas maltophilia
atgccctggtcccccctgcccgccttccccgcccacctgcatgccgccgcggcccgcgtccgcctggcctgcttcgacgtggacggcaccctcaccgacggtcggctgtactacgacaaggacggcaacgagagcaaggcgtacttcgtgcaggatggcctgggcctgaaactgctgcagcagcacggcatccaccccgtgctgatcaccgcgcgcaacagccagtccgcgctcaggcgcggcgccgacctcggcatcgatacccagatcgccgtgggcgacaagctggccagcgtgcaggcgctgtgtgcgcagcacggcatcggcctggagcaggtggccttcatgggcgacgacctgcctgacctggcaccgctgggcgcggtcggcctggcggtggcgccggccaacgcccacccgtggatcgccgagcgcgtgcattggcagacccgcgccgatggcggacgtggtgcagcccgtgagctgtgtgacatcctgctggccgcgcagggccatgtggacgcggtcctggcgaggttcggcgcatga

SEQ ID NO: 493876 - DNA, 1002 bp, Stenotrophomonas maltophilia
atggccgaatccctgttgcccccccgttccgtcgaccctgccggcctggtcgccagcggccgccgcgtcttcgagatcgagcggcaggcgctggatgccgtggccgaccgcctcggcgaggccttccagcaggcttgccaggcgatcctggccagccgcggccgggtggtcgccaccggcatgggcaagtccgggcacatcgcccgcaagatcgccgctacgctggcctccaccggcactcccgcgttctacgtgcatccgggcgaagccggccatggtgacctgggcatgatcaccgaggccgacgtggtgctggccctgtcctattcgggcgaatcggacgaagtgctgatgctgctgccggtgctcaagcgccagggcaacgtgctgatttccatgaccggccgcccgcagtccagcctggccaccgccgccgatatccacctggacgtcagcgtgccggccgaggcctgcccgctggcgctggcgccgacctccagcaccaccgcctcgctggcgatgggcgatgcgctggccgtggccctgctcgacgcacgcggcttcaccgccgacgatttcgcccgctcgcacccggccggcagcctcggccgccgcctgctgctgcatatcaccgacgtcatgcacaccggggaggacctgcccagcgtgggggccgacgccagcctcagcgaggcgctggtcgaaatgagccgcaagcggctgggcatgaccgccgtggtcgatgccgacggtgtgctgatcggcctgttcaccgacggtgacctgcgccgggcgctggacagcgcgctggacgtgcgcaccgcgaagatcgccgatgtgatgacccgcaacccacgtaccatcggcgccgaccagctggcggtggaggctgcccggctgatggagacccacaagatcacgggcctgatcgtggttgacgaccagggccgggcggtcggtgccctgaacattcatgacctgttgcgggcccgggtggtttaa

SEQ ID NO: 493877 - DNA, 231 bp, Stenotrophomonas maltophilia
ttggacgccgacaccatccgcaacctgatcgaaaccggcctgcccggcgcccgcgccgacgtgcagggcgacgatggcgtgcatttcgaagcgaccgtggtctgcgaggcctttgccggcaagatgccgctggcccgccaccggatggtctatgccaccctgggcgacctgatgggcggcgcgatccacgcgctggcgctgaaaaccgtgaccccggccgaagccggctga

SEQ ID NO: 493878 - DNA, 1272 bp, Stenotrophomonas maltophilia
atggccaagatcgttgtgaccggcggcgctgcgctgcacggtgaagtgagcatctccggcgccaagaacgccgtcctccccattctctgcgcgaccctgctggccgatgcgccggtggagatcaccaacgtgccgcacctgcacgatgtggtcaccacggtgaagctgctgggcgaactgggtgccaaggtcaccatcgaccagggcacgctgtcgcgcggcagtgcgatcgtggtcgacccgcgtccggtcaaccagcatgttgccccgtacgagctggtcaagaccatgcgcgcctcgatcctggtgctgggcccgctactggcccgcttcggcgcggcggaagtgtcgctgcccggcggctgcgcgatcggctcgcgtccggtcgaccagcacatcaagggcctgcaggcgctgggcgccgagatcgtggtcgagaacggcttcatcaaggccacggccaagcgcctgaagggcggccatttcaccttcgacatggtcagcgttaccggcaccgagaacgtgctgatgggcgcggtgctggccgaaggcaccaccatcctcgacaactgtgcgatggaaccggaagtgaccgatctggcgcattgcctgatcgcgctgggcgcgaagatcgaaggcctgggcactgcccgcctggtcatcgaaggcgtcgagcgcctgtccggcggccgccatgaagtgctgcccgaccgcatcgagaccggcaccttcctggtggctgcggcgatgaccggcggcaaggtcacggtcaaccgtgcgcgcccgaacaccatggacgcggtgctgtccaagctggtcgaagccggtgcgaagatcgagaccaccgacgacaccatcaccctggacatgcagggcaagcggccgaaggcggtcaacctgaccaccgcaccgtacccggcgttcccgaccgacatgcaggcgcagttcatggcgctcaactgcgtggccgacggcgtcggcgtgatcaacgaaacgatcttcgaaaaccgtttcatgcacgtcaacgagttgctgcgcctgggcgcggacatccaggtcgaaggccacaccgccatcgtgcggggcagcgagcacctgagtggcgcaccggtgatggccaccgacctgcgtgcctcggcctcgctgatcctggccggcctgatggccagcggcgagaccaccatcgaccgcatctaccaccttgaccgtggctacgagaacatcgaagagaagctgtcttcgctcggtgccaccatccggcgcgtgccatga

SEQ ID NO: 493879 - DNA, 318 bp, Stenotrophomonas maltophilia
atgatcctgcgcggcaagttcagcccgcgtcgcaaggcgctgctggcgctggtgctgatcgtgctggcgtggctgggctacgcctggtacgccaacatcgccatcacccagggcatcgagcagaaggacatggactggaatggcgatggcacggtctcgcgcgacgagatcatcgagtcgttctatgcggttgcggtgaatgacagccaggatggcaaccgccattgccgcaccttcgtctggcgcagcaccggcgagcagatccgcgtggactgccgtaccgagttcaagccggcggcggccgaagaaaagaagtaa

SEQ ID NO: 493880 - DNA, 684 bp, Stenotrophomonas maltophilia
atgagcaccctgacccgccccctcacctggatcgctgcagccgcgctgtcggtggccagcctgccggccatggccctgcagccgttcaaggccgattacctggccagctacatgggcatgcaggccaatggcagcatgacgctgagcagcgagggtgccaacaagtggcgctacacgctgcaggtgaagaaccagctggccgacctgagccagagcaccgtgttcgaagaagtgcgcggccagctgcgtccgctcagcagccaggaccgttcggcgctgctggtgaagaagcgcaacgtgcaggccaactacaactggaccagcaaccaggccacctggaccggcgacatcaagccggaccgcgctggacctatcgcactgaaatccggtgacatggacgcgctgctgatcaacctggcgatcgcccgtgacctcgccgccggcaagccgctgacctatcgcatggtcgacgaaggccgcatcaagaacatgacctaccgcgtgatcggcaaggagtcgatcaccgtgggcggcaagagctacgaagcgaccaaggtctcgcgtgccgacggcaacaaggagctgatcgcctggatcgtgccggagttcccggtgccggcgcgcatgctgcagcgggagaacgaccgcgatgccctggacctgaccatcaaggcgatgaactga

SEQ ID NO: 493881 - DNA, 660 bp, Stenotrophomonas maltophilia
atgaccgcgcccacccgcattgccgtgcttgcctccggccgcggcagcaacctgcaggccatcctcgatgccatcgctgcgggacgcctgcgcgccgaggtcgtcggcgtattttccgaccgcccggccgccgccgcgctgcagcgggtcagcgccaacctgcgctgggcgcatgcgccgaaggaattccaggaccgcgccgcctacgagcaggcactgggcgacgcactggccgcggtcgcaccggactggatcgtctgcgccggctacatgcgcatactcggcgccgccttcgtgcagcgcttcaatggccgcctggtcaacatccacccgtcactgctgccgctgcacaaggggctggacacgcatgcgcgggcactggatgcaggcgatgccgagcacggtgccagcgtgcacctggtcgtacccgagctggacgccggcgccgtgctggcccaggtgcgggtaccggtgctgcccggcgatgacgccgacaccctggccgcgcgtgtgctggcggtggagcatcccctgctgatcgccacgctgcagctgctgtgcgccggccgcctgactgaacgggagggccagccgcaactggacggtcaccccctgtttagcccgctggccctagattccgccgggaacctgaaccggtaa

SEQ ID NO: 493882 - DNA, 663 bp, Stenotrophomonas maltophilia
atgtccgcgcctgccctccccacgaccgcttcgcccagcgccttccgtttctcgcgccccaagaagctggccttcgctgccgtactggcggtattcgcggtcagctggatccagccgctgtggcccaccgagcaggcgctgcacagcacgctgaccgtgatcggcctgggcgccctgctgtgggtcgaccgccggggtggctggctgggcaacggtgccttcatcgcgatctgcggcttcatcgcgctgcactgtgtggccgcccgctggctgtactcgaacgttccctacgacgcgtggacgcaggcgctgatcggctggtcgccgaatgcggcgttcggctggcagcgcaatcatttcgaccgcctcatccacttcctgttcggcgtctgtttcacgccggcactgctgcagctggcacgtcacgcctggccggcgctgcgccgcggccaggccttcaccctggcggtgatgacggtgatgtgcgccagcctggtctacgagtggttcgaatgggccatcgcgctcgccctgtcgccggacgccgccgaggcctacaacgggcagcagggcgacatgtgggacgcccatgccgacatgctgatggccaccgtgggcagcgtgctgacctggccgctgatccgccggagtaccccgcaatga

SEQ ID NO: 493883 - DNA, 423 bp, Stenotrophomonas maltophilia
atgacgagcccgggcgcaccgccgccgctgccgcagcagaccctggcgcaccttcagctgggcagccacctgcagacgctgaaggtgctgttctacgcgctggcggttttccactggatggccgcgctggccttcctcggtttcatcggcctggttgccagctcgcgcgggctggacgatggcgcggtactggccaccgtgtacggcgtcgtttcagtgctggctgccgcgctgggcttcgtgcagctgcacaccgcgcgcctgctgtcgcgccgcaccgggctggcctggtgccagcgcgcggcctggctggcggtgctggccggcccgctgggcatggccctgaccgcctatgcctgggtgttcctgtccaagcctgacatggccgccctgttcgaccgcggcgaccatctccgcgtctga

SEQ ID NO: 493884 - DNA, 489 bp, Stenotrophomonas maltophilia
atggacgcaatgcccccgctgccccctacccccgtgccgccgccaacgacggcggtaccggcgttcagcccccaggacgccgaccacctgcgcatgctgtcaatcgcgcactacgtggtcggcggcctgatcgcgctgttctcgctgatcttcatcgtccacatcgtgctcggcgtcaccgcgctcaccggcaacctgccgatgaactccggcggccagccctcgtcgccggccgaacagcgcgtgttcggctggatgttcgtcgtgatcggctgtgtcatcgtgttcggtggcgtcaccctgggcgcgttcgtggcctacgccggccgttgcctggcccgccgccgccgctacctgctgtgcctgatcgtggccgggctggcctgtctgttcacgccgatcggtaccgtgctgggagtactcagcctgatcacgctgctgcgtccgcaggtcaaggccgcgttcgacacagcgggcacggcggcatga

SEQ ID NO: 493885 - DNA, 1128 bp, Stenotrophomonas maltophilia
atgcgccgcagcctgattctgaccctgctccttgcactgagcctgccggtggccacgatggcccagagcggcctgcgcaccgagggagatgtcgccaccgcttcgggggcctacgaggccgaagtgcccgtcaacagccaggccgaggccgatcgcaacggtgccctggcccgtgccctgagcgtggtgctgggcaagctgtccggcgaccgcaacgtgatgtcacgccccggcgtggtgcaggcgctgcgcaatgccaaggactacgtggccagctacgactacaagcaggaccagagcgtgggtgccagcggcgcaccgagcttccggaccctgctggtggcccgcttccgcgaggacgatgtcgattcgctggtctcggcgctgggcctgccgctgtggccgcagccgcgaccgaagccggtgctgtggctggccgtcgacgacggcagtggcccgcgcctggtcagcgtgcagcaggccaatgccgcccgcccgctgctgaaccgcgccatcgagcggggttacaagctgggcctgcccagcggcggtgctgccgaacaggccctggccggtgccatctggcgccaggacagcgcggccgtggcccgtgcctcctcgcgctactcgccgccgatgcagctgatcggcaagctgtaccgcgccaacggtggctggcaggcggactgggtgttcgtcgacaacggccgcgaactgaacaagtggaccagcaaggacgccaacgccatgcgcgcgatggccgccggtgccgacggtgccgccgatgcgctggtcaagcgctatgccaaggccggcgtggccgtcggccaggccggcacctaccgcctggtggtgaccggcatcaacagcgccgatgactacctgcggctggccgctggcctgcgcgaggtgccggtggtgcgcaacgtcaccccgctgcacgccacggccggccaactggagctgagcgtggagatgaccaccggcctggccggcttcaaccgcatgcttggcgacaatggcgtgctggtgccaagcgcgccgctgccggccctgccgaccccgatcgatgacaccaccggtgccccggtggccgcgccggtcagcaacgagtaccgcctgcgatga

SEQ ID NO: 493886 - DNA, 1170 bp, Stenotrophomonas maltophilia
atgatcctgagcccggaagctgaaatcgcgcagttcctgcgccggctgaagtacatcctgttcgccggcctgatcggctgggtggtgtggctgctggcgccgatcctgaccccgttcgtgctggcactggcgctggcctggctgggtgacccgctggtggaccgcatcgaggccaccggccgctcgcgcatgaccggcgtggtgctggtgttcgcagcgatggtgctggtgatcgtggcactgctgctggtgctggtgccgatgatcgagcgccagatcaccaccctgatcgcggccgcgccgcaggcgcaggcgtggctgatgcagaccggcatcccctggttcgagcacaagaccggcctggaagtgatgcagtggctggacccggaccgcctgatcgaatgggtgcgcagccattggcagcaggccggcggcttcgccaccacgttcatgggctacgtctcgcgttcgggctttgcgatggtgacctgggtggtcaacatcctgctgctgccgatcctggcgttctacttcctgcgcgactgggacaagctggtcgagcgggtggcctcggtgatcccgcgcaaccacatcggcaccatcagcgcgctggcgcgtgagtccaacgaagtgctgggggcgttcatccgcggccagttcctggtgatgctggcattgggcgtgatctacgccggtggcctgtcgctggtcggcctcaagctgggcctgctgatcggcctgattgccggcctgatcagcttcatcccgtacctgggcgcgaccaccggcgtgctgatggcggtgatcgccgcgctggtgcaggcgcagggcttcgacctgaagctgctgatcctggtcggcgtggtgttcaccgtgggccagctgctggaaagctacgtgctgaccccgcgcatcgtcggcgacaagatcggcctgcacccggtggcggtgatcttcgcggtgatggccggcggccagctgttcggcttcctcggcatgctgctggcgctgccggtagcggcggtgaccaacgtgctgctgcgctatgcccaccagcgctatcggcagagcgaactgtacgtgggcgagaagccggcgatcgtgcttgatggcgtggtcgacgcgccccatatcatcgttccggacgacaagggccccgacctgaagtga

SEQ ID NO: 493887 - DNA, 708 bp, Stenotrophomonas maltophilia
atgggtgtgccgcaactgccgctggccctgcattacccgcgggaccagcgcctggagaccttcatcggcgcgccggatggcgcgctggcgcagctgcgcgcgatcgcagttggcgccagccacgactgggtctacctggaaggtgcggcgggaaccggcaagacccaccaggcgctggcgatgtgctccagcgccgagcaggccggacggttgccgacgtacgtgccgctggccagcgccgccggccgtgtccgtgcggcgcttgatgggctggaagcgcgcgaactggtggcgctggacggcctggacgaggttgccggcaaccgcgaggatgagatcgcgctgttcgatttccacaaccgtgcgcgcgctgcgggcgtgaccgtgctgtacacggcacagaaggcgccgggcgaactgggcctggtgctgccggacctgcgctcgcggctgggccagtgcgtgcgcgtgctgctgcagccgctggatgaggaagggcgggcggccgtgctgcgcgagcgtgcactgcgacgcggcctggccatcgacgaagcggccatcgagtggctgctgtcgcacaccggccgtgagctgggtggattgatcaccctgctggactggctggaccgcgaatcgctggcggcgaagcggcggatcaccgtgccgttcctgcgccaggtgctggaagaaggccggcctcgttactga

SEQ ID NO: 493888 - DNA, 453 bp, Stenotrophomonas maltophilia
ttgaacaccgcctcccggccttggccgatctggctgcgcgcgctgcaggtgctgggcgcggtgtggaccctgcccaacaccctgatcggcctgatgggtgggttggccggcatgctcggcggcgcgacattgcgctggagcgggcgtgactgcgcgctggtgttcgaccgttggccgtgggggccgggtggggcgatcaccttgggcaatgtgatcctgcacacgggccacgatcttggcatttcctgccggacctacgcgcatcaggcggggtggggcgtggagccgctgatccggctggacgaccatgagcgtgcgcatgtctaccagtacatggtgctggggccgctgtacctgccggtgtacctgctgtgtggcggggtgagtgcgcgcaatccgttcgagcgggcggccgatcatttcgcccggttcgggcaaggctggtggccgtag

SEQ ID NO: 493889 - DNA, 204 bp, Stenotrophomonas maltophilia
atgaacaccacgcccaagacactgtcgcgttcattgaacgaccgcatgatcgccggcgtgatgggtggcattgcccatcgcttcggctggaatgccaccctcctgcgggtggtctacgtgctgctgtcgctggcctcggcggccttccccggcatcctggtctacctgatcctgtggctgctgatgccgaacgaggccgattga

SEQ ID NO: 493890 - DNA, 369 bp, Stenotrophomonas maltophilia
atgacgtaccggattttgttgattcttgcggtactgctggcagcgccccttgcccaggccgcacccggtgcggatgcacggcgggagatcgcccagttgatcgccagcctggacggctcccagtgccggttccagcgcaatggcagctggtacgacggcggcgatgcgcgcgcgcatctgcagcgcaagtacgactatctgctgaagaaggacatggtggacagcgccgagcagttcatcgaacgcgccgccagccagagcagcatgagcggcaaaccctatcgcatccagtgcccggggcagcctgaacagaccgcagccgcctggttcggtgcgcgcctgcaggcgctgcgtcaccgcacgccgtag

SEQ ID NO: 493891 - DNA, 1068 bp, Stenotrophomonas maltophilia
atgaagggaccattgggcttcaacgccgatgacctgatgcaggagagcctggccatgcagcgcaagctgatggaagggctgaagctgctgccgcaggtggaagacgtggactatggcgtgaccgcgcgcgaggaagtctggcgcgacggcaaggtggtgctgtatcgcttcgtcggtgagcaggcgccgacccggcgcacgccgctgctgatcgtctacgcgctggtcaaccggccgtacatggtcgacctgcaggccgaccgttcgctggtgcagaagctgctggcgctgggccaggacgtgtacgtgctggactggggctacccggaccggtccgaacgcttccagaccctggaggactacctgctgcgctacatcgacggagcggtcgatgcgctgcgcgtgcgcagtggtggcccggtcgacctgctcggcatctgccaaggcggcgtgttcgcactctgctacgcagcgttgcgccaacagaagctgggcaagctgatcaccatggtcaccccggtcgatttccagaccgccgacaacatgctctcgcactgggcgcggcaggtggacgtggacctgctggtcgatacgctgggcaacatcccggccgacctgatgaacgccagctacctgatgctcaagccgttccgcctgaacgtgcagaagtacgtcggcctgctcgacatcctcgatgacaaggcggcgctggaggacttcctgcgcatggagaagtggatcttcgattcgccggacctggcgggcgaggcgttccgcgatttcatcaagcagttctaccaggccaatggcctgatgaagggcacggtaaggatcggcgaggaagcagtggacctgtcgcaggtgacgctgccggtgctgaatatctacgccgagcaggatcatctggtgccgccggacgcctcgcgcgcgatgcgcgggcgcctgggcacggacgactacaccgagtccagtttccgcggtggccatatcggcatctacgtgtccgggcgcgcgcagcgcgaagtgccggccacgatcgatggttggctgaaggcgcgcgacctgtag

SEQ ID NO: 493892 - DNA, 1080 bp, Stenotrophomonas maltophilia
atgaccagctcggcccacgacaccggcagcagcgatttcgaaaccctggcccggcagtatttcggcgcctggggcgatgccctgcgccatgcgagcacgcccggcgcacccgccggtgacgatcccggcagttggcagcggttgttcgactggtggggccagctgttgcccgagcaggcgcagggcgcgccggaagatgccgtgcgccggttccgcgaacaggcgggcagctggtacggcaccatgcaggaggtcgccgcacggtttgcgggccgcgacgccagcagtgccgatgtggcccaggcctggcgcgaggcggtgcaggggcagggcgacggcatgctccagtggatgctgcagggcgcccgtggcagcacgcacgccggcgccgcggtacccgaattcgccgcctggctgcagcagttccagctgcaggcgggcccgtggctgcagagcccggcattcggccccggccgcgagcaccaggcgcgctggcaggccctgctgcgtgcgcaggaggaataccagcagcattcgcgcgcctatgtcgatcagatcaagcaggcactggacgaagcctttgcgctgttcgagcagcgcctggccgagcacgaacagcccggcagccagctgaccagcgcccgcgcgatgttcgacctgtggatcgaagttgccgaggaggcctacgccaaggtcgccatgtccgaaccgttccagcaggtgtacgcctcgctgggcaacgcgcagatgcgcctgcgcgccggcctgcagcgggaggtggaacagatgagtgaacggatcggcctgccgacccgcagcgagatggatgccgcacaccgccgcatcgccgagctggagcgcagcctgcgccgcctgcaggcgcaggtggctgtgctggccggaaccgctgaggtcgatccggtggcgcagccggcgccggcgaaggtgaagccaactgcgcgcaaggtcgcgaagaaggccgcgccggcaaagaaggcgcctgcgaagaagacatctgcaaagaagacatctgcgaagaaggccgcacctcgcgcttccgctcgggcgcgtgaccgatga

SEQ ID NO: 493893 - DNA, 615 bp, Stenotrophomonas maltophilia
atgaaacgtcacttctcgatgctgcgcgaattccagctggccgactggttcaccctggccaatgctttctgcggcaccggtgcggtctttgccgcgatgcgcttcctgcaggacggcgagcgcggctatctgctgttcggcatggcgctgatcccgctggccttcatcttcgacgccctcgacgggcgcatcgcgcgctggcgcaagtccagctccaccctgggccgcgagctggactcgctgtccgacgtgatctccttcggcgtggcgccggcggcgctggcctatgcctgcggcatgcagggtggctgggactggctggtgctgagctacttcgtctgctgcggcgtcagccgcctggcacgctacaacgtcactgccgaggcgctcgccggcgacgagggcaaggtcacgtatttcgagggcaccccgatcccgaccagcctggtgctggtgatcgtactggcgattgccgccggcaccgatgccatcggccagaacatctggttcggccagtggcagatcggcccgtggcagctgcacccgatggtgctgttgttcgccctgtccgggtcgctgatgatcagcaagaccctgcgtattcccaagccatga

SEQ ID NO: 493894 - DNA, 1362 bp, Stenotrophomonas maltophilia
atgagcccccctgtacatccgacacctccggcagcacccccgctgtggcgcacctacctgacgctgctgctgccgatgctgctgaccaatgcgttgcagctggccgcaggcacgctggacaacatctatctcggccacctgcttggcacacaggcggtggctgcggccgcggcgttcttcccggtctttttcctgctgctggccctggtgatgggcctggccacgggcgcgatggtgctgatcggccaggcctggggcgcgggccgcccgcaacaggcgcgcgcggtggccggcagcgcggtggcgctgatcctgctgttgtcggtgccggtgatggccctgggcggcggtttcgcgccacagctgctggcggcactgggcacgccggcagcgatcctcggcgagtccatcgtgtacgcgcgcgtgctgttgctggcggctccggtgttcttcctgctgtggctggccactgccgtgagccgcgcggtgggcgatgcaaagacgccgctgcaggcgctgctgctggccacggtggtcggcctgctgtgcacgccgctgctgatcctgggctgggccggcctgccgcggctggggtcggccagtgcggctgtatcggcggcgtttgcctcattgttggccctgggctggttgctgtggcgctggcagcgggtaggacatcccctggcaccagggcgcgagctggtgcgtgccatccgtttcgatggcgcgctcatccgcgcgatgctgcgcatcggcgtaccgtcttcgctgcagatgctcagcctggccattgccgagatcgtattgctgggctggatcaaccgctacggctacacggccacggccgcctacggtgcggtcaaccagttgatgagctgggtgcagctgccggccatgtcactgggcattaccgccaccatccttgcggcgcatgcgatgggcgcggggcgtacggcacggctgcccggcatcgcccgcaccggcgtgctgcttggactggcgatgctgagtgcagtggtgctgctggtgatggtgcttgcgccctggctgaccggcgtgatcctggtggctgccgaagcgcgtgaactggccacgctgcagttgcgcacggtggcatggggcgtgctggcgatgggcggcagcaccgtgctggtaggggtgatgcgcggcagtggcacggtatggcggccagcgctgctgggcatgacggcggtattgctgctggagctgccgctggcgatgtggttgcaggcgcggcatgggctggccggcgtgtggtgggcgtggccgctggggttgctggcgatgctggtgatgcaggtgatgtgtttcgcccggtggcggcgggtgcaggctgggtag

SEQ ID NO: 493895 - DNA, 618 bp, Stenotrophomonas maltophilia
atgcctgtgtcccgacttcctcccttcagctgtttcgacggccatcgcctggtcgcttccggtaccccggaagtggcagcgctggcgttgaaacagctgcgtgccgacaacgcagccggtccgctgctggtgttcgacaacgccagcgggcgaacccgcgatttcgacacgcgcggcagcgacacagagctgctggcgcgggtgaccgaagcgtttccctccgccgtggaggcggatgccgacgccactaccggagaggcgcccgcgaccccgcgtggccgtggccgccccagactgggcgtggtcgcccgcgaagtgacgctgctgccgcggcattgggcgtggttggccgaacagccgggtggggcctcggtggtgctgcgcaggctggtggaagcggccagccgtgccggtgccgacgaggaccggcagcgccgccacagcgagcgtacctatcacttcctgcaggccatcgccggtgacctgccgggcttcgaggaggccattcgggtgctgttcgcgcatgaccgcgcgggcctggaagcggcgctgcattcctggcccatggatgtgcgcgaccacgccctgcgcctggcgttcgaagacgctgacggctga

SEQ ID NO: 493896 - DNA, 489 bp, Stenotrophomonas maltophilia
atgccgtacaccccgatcgtcgccaccctgggctacgtgctgtcgcctgatcgtcgccaggtgctgatgatccatcgcaacacccgtccgggtgaccaccacctgggcaagtacaacgggctgggcggcaagatcgaagcggacgaggacgtggcagccagcatgcgtcgcgagatcgccgaggaagccggcatcgactgcacctgcatgcggctgcgcggcaccctcagctggccgggcttcggcaagcacggtgaagactggctgggcttcgtgttcgtcatcgacactttcgaaggcaccccgcacggcggcaaccatgaaggcacgctggagtgggtggacctggacaagctggacacgctgccgatgtgggagggcgaccgcaacttcctgccgctggtgttcgacaccgacccgcgcccgttccacggcgtcatgccgtacaaagacggccgcatggtcagctggtcctacagccggctgtga

SEQ ID NO: 493897 - DNA, 510 bp, Stenotrophomonas maltophilia
atggcccaagcctcgccccgcaccgaacgcattccccgcctgagccggctgagctggctcatgggcctgtacgcggagaactaccgtcatctggtgcgcctgttcgaaccggccggactggtggcgggcagctacatttcctcgatcggcgacggcctggacgtacgcctggacgtgatcgagtgccaccgctacacggtggaactgcgcctgacctacgacctggctgacccggtcaccggtgagccggatccctcggcgtatgtgcgcctttaccgtgacgcacgccaggccgagaccacccattgctacgtcggccgccgctggcaggacacgatgggcctgtacccgccgccggccgagctgatcagccaccgcatgcggatgaacaccttcctcggcaagtggctggaatacctggctgagcgcggtcacggcgtggccaccctgcgccgcgatcccgatggcgcaggcacacccgccgagcgccgcctgtcgctggtgcgctga

SEQ ID NO: 493898 - DNA, 822 bp, Stenotrophomonas maltophilia
atgtcgaccatccgtccggtgttctacgtttccgatggaaccggtatcaccgctgaaaccattgggcatagcctgctgacccagttctccgggttcagcttcattaccgaccgcatgtcgtttgtcgacgaccccgaaaaagcgcgtgaagcctgtgcccggatccaggcggcgggggagcgctaccaggtccggccgatcgtggtgaactcctgcgtggaccagagcctgagcctgatcctggccgacagcggggcgctgatgctggatgtgttcgcgccgttcatcgagccgctggagcgtgaactggccagcccgcgcctggcccgggtcggccaggcccacggcatggtcgatttcgatacctaccaccgtcgcatcaacgcgatgaacttcgccctgacccatgacgacggcatcgcggtgaactacgacgatgccgacgtgatcctggtggcggtgtcgcgcgcgggcaagacgccgacctgcatttacctggccctgcattacggggtacgcgcggccaactacccgctgaccgacgaagacttggaaagcgatcgcctgccgccgcgactgcgcaattaccggcgcaagctgttcggcctgaccatcgatccggaccggctgcagcagatccgccaggagcgccgtccgaactcgcgctacgccaacctggagacctgcaagcgcgaggtggctgcggccgagaccatgttccgcatggagcggatcccgaccctgagcaccacgcatacctcgatcgaggagatttccagcaaggtgctggccacgctggggctgcagcgcgagctgtattga

SEQ ID NO: 493899 - DNA, 2379 bp, Stenotrophomonas maltophilia
ttgaacgagaacatcctgtggttgcacgaactgcgtctggccgatctggcccgcgtaggcggcaagaattcgtcgctgggcgagatgatcggcaacctggccggtctgggcgtttcggtgccgggcggttatgccaccaccgctgaagccttcaaggacttcattgcgcacaacgatctgtccaagcgcatcttcgacaggctggccacgctggacgtcgaggacgtcaacgcgctgaccgccgccggcaaggaaatccgcagctgggtgatcgatgcgccgctgcagccgcagctggaccaggacatccgcaccgcttacgccaagctgagcgccgacaacggcggcggcgatgtggccgtggccgtgcgttcctcggccaccgccgaggatctgccggatgcctccttcgccggccagcaggaaaccttcctcaacgtcaccggtgccgacgacgtcgtgcacaaggtcaaggaagtgttcgcctcgctgtacaacgaccgcgccatcgcctaccgcgtgcaccacggcttcaagcatgaggacgtgttcctgtccgccggcgtgcagctgatggtgcgttcgggcgtcggttcgtccggcgtgctgttcaccctggacaccgagtccggcttccgcgacgtggtgttcgtcacctcttcgttcggcctgggcgaaatggtcgtgcagggcgcggtcaatcccgacgagtactacgtctacaagcccaccctgcaggccggcaagccggcgatcctgcgccgctcgctcggcagcaaggcgatccgcatggtgtattcggatgttccgggtgagcgcgtcaagatcgaagataccccggtcgaactgcgcaacaccttctcgatcagcgacgaggacgtgcaggaactgtccaagcaggcgctggtcatcgaaaagcactacggccgcccgatggacatcgagtgggccaaggacggcgtcagcggcaagctgttcatcgtgcaggcgcgcccggaaacggtgaagtcgcgcagccacgccacccagatcgagcgcttcgcgctgaccgaaaagggcggcaacgtgctggccgaaggccgcgccgtcggcgccaagatcggctcgggcgtggcccgcgtggtgaagacgctggacgacatgaaccgcgtgcagccgggcgacgtactgatcgccgacatgaccgatcccgactgggaaccggtgatgaagcgcgcttcggccatcgtcaccaaccgtggcggccgtacctgccacgccgcgatcatcgcgcgcgagctgggcgtgccggccgtggtcggttcgggcaacgccaccaaggtgatcgaagatggccagctggtcaccgtcagctgcgctgaaggtgataccggcttcatctacgaaggaaagctcggcttcgagcgcaccaccaccgatctgggcaacatgccgccggcaccgctgaagatcatgatgaacgtggccaacccggaacgtgccttcgacttcggccagctgccgaacgccggcatcggcctggcccgcctggaaatgatcatcgccagccacatcggcatccacccgaacgcgctgctggaatacgaccgccaggatgcggcaacgaagaagaagatcgacgagaagatcgccggctacggtgatccggtcagcttctacgtggaccgcctggccgaaggcatcgccacgctcaccgcctcggttgcaccgaacccggtgatcgtgcgcctgtcggacttcaagtccaacgagtacgccaacctgatcggcggcagcaactacgagccgcacgaagaaaacccgatgatcggcttccgcggcgccagccgttacgtcgacccgagcttctcggccgccttcgcgctggagtgcaaggccgtgctgcgcgtgcgcaacgaaatgggcctggacaacctgtgggtcatgattccgttcgtgcgcaccctggaagaaggccgcaaggtcgtcgaggtgctggaacagaacggcctgaagcagggcgagaacggcctgaagatcatcatgatgtgcgaagtgccgtccaacgcactgctcgccgatgagttcctggagatcttcgacggcttctcgatcggctccaacgacctgacccagctcagcctgggcctggaccgcgactcgtcgatcgtcgcgcacctgttcgacgaacggaacccggcagtgaagaagctgctgtcgatggcgatcaaggccgcacgcgccaagggcaagtacgtcggcatctgcggccagggcccgtccgatcacccggatctggccgaatggctgatgcaggaaggcatcgagtcggtgtcgctgaacccggacaccgtggtcgatacctggctgcgcctggccaagctgaaggccaacggctga

SEQ ID NO: 493900 - DNA, 894 bp, Stenotrophomonas maltophilia
atgatcgccgccgcccgacccgcccccgccgcaacgccctggttccactcgctcaactgggagcgcctgctggaaacctacggcgtaccgttgctggccgcgatcgtggtgctgctggtgggcctgtgcgtggcacggcgcctgtccaacgcgatgccgcgcgctacggctcgcatgggcgtggacccgatgctgggcagcttcctgcgcaacgtggtgtatgccgcatcgcttgtgatcgtggtggtgctggcgatcggcacgctgggcgtgcagatcaccccgctgctggccgtgctcggtaccgctggcctggccgtcggcctggcattgaaggattcgctgtccaacatcgcctcgggcgtgatgctggtgacgctgcgaccgttccgcgtgggcgatgtggtcaccgtggctggacagaccggcacggtgcgtgaagtgcgcatcttccagaccgtcatcaccggtgccgacaaccagcacaccaccattccgaacacattgatcaccgctgcaccgatcatcaacctcaccgccgaaccgacccgccgcgtcgaactggtgatcggcatcggctatgaagacaacatccagctggcgcgcgataccgcgctggcgttgatgaaggccgacccacgcgtgctgcagacaccggcaccggacgtggtggtgtatgagctgggcgcgcacgccatcaacctcggcatccgctgctacgtgaagtcggccgactggttcggtaccaaggtcacgctgctggagcagctgaagctgggctttgacaaggccggcatcaacatcccgtacccgcagcaggacatgcacctgtacctgcatggaaaggatggcggcgtgatagaggctgacgcgctggtgcgcgacaagccctga

SEQ ID NO: 493901 - DNA, 1116 bp, Stenotrophomonas maltophilia
atgttgttcactccccaccgcttgggcgccttgaccctgcccaaccgcatcgtgatgccgccgatgacccgctcgcgtgccgccgacggcaacgtcgccaccgcggacatggccgcctactacgcccaacgcgccagtgctggcctgatcgtcagcgaaggcacccagatcagcccgcagggccagggctatgcctggaccccgggcatccacagcccggaacaggtgcagggctggcgccgggtgaccgatgcggtgcacgccgctggcggccgcatctatgcccagctgtggcatgtgggccgggtctcgcatgtggccctgcagccgggtggtgccgccccggtgtcgtcgtcggcgctgctggccgaaggcgtgaaagtgtttgtcgaccctgcaggcgctggcccggaagcgggcgtaggcgagatgatccagcactcgatgccgcgcgcgctgcgcgaagacgagattccgggcatcgtcgccgactatgcacaggccacccgcaatgcactggccgccggcttcgatggcgtggagctgcacggggccaatggctacctgatcaaccagttcatcgactcgcaggccaaccggcgcaccgacggctatggcggcgcgttgcagaaccggctgcggttcctgcgcgaggtcgtgcaggcggtgacggccgtagccggtggtgaccgcgtcggtgtccgtctggcgccgctgacgacgttgcagggcgcggtggacgatacgccacaggcgacctatctggccgcggcgcacctgctgggtgagctgggcgtgggctacctgcacatcgccgaagccgactgggacgatgcaccgttgatgccggtggcgttcaagcaggcgctgcgcatggtctacccgggcacgctgatctacgccggcaagtacaccgcccaacgcgccgagcaggcactggctgaaggctgggctgacctgatcggcttcggtcgcccgttcatcgccaacccggacctgccggagcgactgcgtaccggtgcggcgctgaatccgccggatcgtgcgacattctttggcggtggcgcggcgggcttcaccgattatccgacgctggaagagagcgtcgcggcctga

SEQ ID NO: 493902 - DNA, 873 bp, Stenotrophomonas maltophilia
atgaacgagccgatcctgctcccccgcgacatcgcccatgacgcccgcgactggtccgacctgcagcgcgcggtggccctgctggaagcgccgaccctgaccgcgcgcatggccaacctggtcggcacgccgctggagttcgcggtgaaggcgctgcccagctcggtctccaaccgcatccacggtgctgtgcaggcggcgctgagcaaatcggcgcaggccgcgctgtggagcatggacaacacccccggcaagggggcgtccacccgctggcacaaactggcggcggccacctcgggcgcggtcggtggggccttcggcttcgcggccttgttcatcgagctgccggtgtcgaccaccatcatgatgcgtgcggtggccgacgtggcccgcagcgagggcttcgacctgtccgagttcagcacccgccaggcgtgcctggaggtgttcgcgttgggcggcaactcgccgcgcgatgatgccagcgagaccggctactacctggcccgcggcttcaccacggatgtgatgcgccacctgtcggccgagctggccgggcgcgtggtgaccggccgcgacctgaccctgggcgtggcgccaaaggaagctggcaagctgctggcgaagatggtggaaaaggtggcggcgcgcttcggcgtggtggttaccgagaaattcgctgcgcaggcggtgccgatcgtcggtgccgccgccggtgcaacactgaataccatgttcaccgactactaccaggacatggcgcgcggccacttcatcgtgcgtcggctggagctgaagtacggggaagatgtggtgcgcgcctgctatgaccgcgtggcgcatggcggcgtactgatcgagcccacgctgtaa

SEQ ID NO: 493903 - DNA, 573 bp, Stenotrophomonas maltophilia
atggcggacaacggcgcggccaacgagcgactgatctggatcgacctggaaatgaccgggttggataccgacaacgattcgatcatcgagatcgccaccgtggtcaccgatgcccagctcaacgtactggccgaagggccggaattcgccatccaccacccgctggaaacgctggaagcgatggacgagtggaatcgcaaccagcaccgccgctcgggcctgtggcagcgcgtggtggacagcaccaccaccctgggccaggccgaggcgcagacggtaaacttcctggcgcagtggatcccggccggcctgtcgccgatgtgcggcaactcgatctgccaggatcgccgcttcctgcaccgccagatgccgcgactggagaagtacttccactaccgcaacctggacgtgtccacggtgaaggaactggccaagcgctgggcgccgagcgtggccgccggcgtcggcaagaacagcaaccacaccgcgctgagcgacgtgcacgattcgatcgctgagctgcgccactaccgccagttcatgggcgcgctgtcggggctgccggttgcctga

SEQ ID NO: 493904 - DNA, 525 bp, Stenotrophomonas maltophilia
atgaccgacgccctgggtgtaccggtgcacgacgccgatgaacactggatgcgccatgcgctggcgctggccgagcgtgcgcagcgcgagtacgacgagatccccgttggtgcggtactggtgggcgccgatggccagctgctgggcgagggctggaacctcaacatcgcctcgcacgatcccagtgcgcatgccgagatcgtggccatgcgggccggtggcacgcggctggccaatcatcggctgctcggcagcaccctgtacgtgaccctggaaccgtgcgcgatgtgtgcgatggccatcgtgcatgcacgcgttgcccgcctggtctacggcgccagcgaccccaagaccggcgcctgcggcagcgtgttcgacctgctgggcgatgcccgccacaaccaccgggtggagatccacggtggagtgctggccaaggaggccagcatgcgcctgaccaattatttccgtgccaagcgtggcaagccgccgctgctgctggaagaccatgccggcgaggcctga

SEQ ID NO: 493905 - DNA, 360 bp, Stenotrophomonas maltophilia
atggcctatccgggcgatgtctatgccgccgattgctcggcacgcgatgcgctggcgctgatctccggcaagtgggtgatgctgctgttgccggcgctggcgcagggcccgcaacgcaatggcgcgctgctgaggaagatcgaaggcatctcgcagaaggtgttgacccagaccctgcggcagctggagcgcaacggcctggtcgagcggtgtgagcggggcagcaagccactgcatgtggaataccggctgaccgaggtcgcacgtggactggttgacacgctgtccgccctggaccgttgggccgagcacaatttcccggcgctggacgccgcccgcgagcgcttcgacgcgcgttag

SEQ ID NO: 493906 - DNA, 768 bp, Stenotrophomonas maltophilia
atgcgcgccctgatcctgcttgcccatcccgaaccccgctccttcaacgcccacctggccgcgcaggccgcggagcagctgcggcatgacgcgctggaggtggacgtggtcgacctgtatgcagagggcttcgatccgctggaagcggcccaccatcattcaagtcgcctgcagcccggccgtttcgatgcccagcgcgaacaacgccacggcgccgaacagggtcggctgcccgccgatgtgcagcgccatctgcagctgctgcaggccgcggatctggtcatcctgcagttcccgctgtggtggttcgcgccgccggcaatcctcaagggctggctggatcgcgtgctggtctacgggccgatgtacaacagccgcctgcgccacgagcacggcgcgatgcgcggcaagcgtgcgttgctgagcgtcaccaccggctcatcggcacgggcctgcgccgtcgacggccgcgagggagatacccggttgttgctgtggcccttgatgtacagcctgcgctacgtcggcttcgacgtgctggagccgcatctggtgcatggcgtgcgttccgggctggcagcggagcgcgtgcaggcacacgacgaggcattggctgcagcaacccactactaccgcgaacgcctggcgcaatggccgcggtggcccaccgtgcccttcaacgacagcggcgatttcgaggatggcgtggtgctgcgcgcggaggccactgcctacagccccttcatccgccatcgcaacaccggatga

SEQ ID NO: 493907 - DNA, 438 bp, Stenotrophomonas maltophilia
atgaccaccctccgtccctcgcgcgccgacgacggcggcgccctcgtcgacctctggcgccgcgccgtcgacgccacccacaacttcctcagcgccgacgaccgccaggccatcgatgccgaagtcgccggcttcctgccgcaggctccgatgaccgtggccgtcgacgctcaggaccgcccccttggcttcatgctgatcgacggcacgcacatggaagcgctgttcatcgatccggacgtacgcggcaccggtatcggccggcagttgctgcagcacgcgctggccctgcatccgcagctgagtaccgacgtcaacgaacagaacgcgcaggccgtcggcttctaccagcgcatgggcttcgtcgaaaccggacgttcaccgctggattcgcagggccgcccgtatcccctgatccatctccggtacaacggctga

SEQ ID NO: 493908 - DNA, 507 bp, Stenotrophomonas maltophilia
ttgaactgcacgatccgccctgaaacccgcgaagaccacgcggtcatccatgcactcaccgaggcggccttccgcgaagccccgcacagcagccacaccgagcagttcattgtggatgcgctgcgttcgcgtggagagctgagtctttcgctggtcgccgagaaggacggacaggtcgtcgggcacatcgcgctgtcgccggtgacgatcagcgatggcagcaccggctggttcggcctcgggccaatctcggtgctgccggactggcaggggcagggcatcggtgcggcgctgatgcacgcggcgctcggcgcgttgcgtgagcagaacgcgcagggctgtgtattgctgggggagcccgcctattacggacgattcgggttccgcgccgagccgggcctggtgctgccgggtgtgccgccagagtacttccaggcgctgtgcctgcggccaccgatggcgcagggagaggtgcagtactcgccggcattcgaggccacggcctga

SEQ ID NO: 493909 - DNA, 657 bp, Stenotrophomonas maltophilia
atgggtgtagcgcacctcgcacacaggggacggccgctgctggcagtgctcgccctcgtcctgctggcggcatgctcgccctacgccgatgccgagcgcgacgtcgccgcgggtggacgcggccttgccaaactcaacccggcgccgaagcaggcctatgagctggtgctgacactgaagggcgcgccaggcccgttcgcggttgttgagggcgtggcccagtatgacgccatcaactacgcagactgtggacggatcgtgcctgcaacaggcactgcaggccgcatcaccagccaggagcccatcaccctgcacaaggtcagcgagaacgagtaccgcggtacgttttacctggaccgtatgctggatgaggactactacgggcgtggcgtctgccattggacgctgacgggtgtcggtgcgatgttgcgcgccacgaccagcaaggcggatacgcgattcctgacgttcatcgacaagaagcgcatggagaacgactcgcctctgacgctttattacccgaaccttgtctatccgcgcgccgacactgtcgccaactttggcgccagtggcgaggaagctccgtcggggtacagcgaagagctgcgcaatgcgctgttctcaaccaccaccactgtgcagaagctcgtgccatga

SEQ ID NO: 493910 - DNA, 588 bp, Stenotrophomonas maltophilia
atgaaccaggaacgtgccgctgctgaagccgatgtcgcccagggtgggcgcggcctcgccaagctcaaccccagcccgcgcaaggcctatgaactggtgctgcgcctgaaggacgccccgggcgatttcgcggtggtcgaaggtgtcgcgcagtacgacgtcaccaacgaagaccagtgtggctatatcgagccggccaccggcacggctgcacggattaccagccaggaaccggtggaactgcgcaaggtcgctgatggcgagtaccggggcactgtatacatcgaccgcatgctggatgaggattactacggtcgcggtgtctgcaagtgggagttcaccggtgcaggcgcgatgctgaaggcgacgggggccgagggcgagacgcgtttcctttcatttattgaagcagcgccattcgtgaaaggcgagaccgagactcgccactatcctcgttcggactatccgcgcgtgaacgagattcctgactacggcgcaagcggccaagaagaccccaccaagttccgccctgagctgcagaattcgctgttctcggcttcacttgaagccaatgaggtccgccaatga

SEQ ID NO: 493911 - DNA, 1329 bp, Stenotrophomonas maltophilia
atgagcctcagcagccaagactatgcgggtatttccgacgacgtgtacaaggaccgtgcggtcggtcgacgcgctcccggcaaggaagagctcgtagcgatcaacgggcatgagtacaagatcctcgagcacgttgataatcgattgaacggttatcagggaacgatctaccagcgagtcgacaccaatgaaattgtcgtcgcacatcgcggcaccgaacagatcgcccgcgatgcgatcctgaccgatggtggcatggttgtcgcccgcaccaacgtccaggcaccggacgccatcgcgctgacccaacgcgccctggcctacgccaagaaggaggggcaggatctcggacagcgcccacccgaagtcaccgtcaccggccactccctcggcggcgcgctggcccagatcacctcgcaccatttcaacgtcaagggcgagaccttcaacgcctatggcgcggtcagcctcagctaccgcatcccggaaggcggcaacaccatgatcaaccatgtcatggcctccgatccggtcagcgcggcgtcgccgcacttcggccaggtgcgcatctacgcccggccaaatgaaatcagcacgcttgccgcgaacggcttcagcaatcactcgttgcgcgccctgatccccgaccggccgatcatcgccgcaggcagctcgttcggtgcgcacaagctgggcaacttcctcggtgacggctcggtgctgcaacacccggaaacgcagaagctggcaaaagacaacgccaggatgatcgaggagtaccgcgacgacgttgaatcactgcgccgtggtgtcacccgcgcggcgcggggcattccgggcggcgccgtcgatctgtacgaccacatccgcggcccgctgcagcccggtgagccggcacgccgcgaagcggagaagaacggccatcacaccagcatgctgcgcatggacgacgccaaccatgtgggcaacccactgttcaacgacgcgatccgtggcgtgcacgcgcaggacgtccgcgtcggccgggtaccagacgtaatgagcacgcaactggccggcagcctggccgccgaaatgcatgcggcgggcggcaagcgcatcgacgaagtggtcatgaatgccgatgcctcgcgcagctttgccgtgcagggccagggcggtgacccggcccaccttcgcgtatcagtggatacggcggtggcgatgaacacaccgctggaacagagcagccagcgcatcgaccagcaggccgcaggtcagcgccttgcacttgagcgcgaccagcagctggaacagcagcagaatcagacccgcagcctgcaggcctga

SEQ ID NO: 493912 - DNA, 1269 bp, Stenotrophomonas maltophilia
atgcgaatcgttcccccgaatgcccgccacgccgctgcccgctgcaatgcacccgtgcgccgcctgccgccgctctggctgctgtcacttggacttgccgcagcgtcggcacaggctcaggaggcagcggcgcccgtcgtggagacgcgccccgctgccgaggctaccgttgaggcgcctgcaggggcggcgcccgttgcagcgcccgcggcggccgacgccgttgtcgcggcgccggctcccgaagtaccggctgccgcgacaccccctgcgacaccggtggtggacacgcagccggcgccggctgcggacccggcgcctgcgcccgttccgcccgcagcggcggcgcctgtggctgcaccgcccacagtcgtcgagtcagcggtcccggcggtagcgccggcaccgcctgcattggccatcgtgccgttgccgcccgagcaggcgaccgagcgtgcgctcggtgcccgctgcccggtggatctggccgggcggctggcgagccagggcgacctgctgatcggcgcctgccagggcaccatgccggcgcatctggctgcgatgctggtcgcgctgcccgagcaggacgtccacctgccgcgcagctggcgcgagcgtgaggtgcggcagaaggcctggttcaaggcggtgccgggctacggccagcgcccggacttcatcgtgcggatgggcgacatctgggtgcgctcgttggaagggcgcgacgccgacagcacgttctacctggtgtcggcgccgttcacctgcagcgaccaggtcgccaaccgggatgagtacggcgcggagccggtccgcgtgccagcgggtgaatgccgcgaggcctatgtggcccagcgtgtgtaccaggtccgcggggatgcggcgccgagggatgtaaccaccgatgccatgccggccatgccgcagcaggcggaagctgatcgtgcgcgccagctctcgcgtgagggacggatcagcctggaccacagcaagttgcagtatggcccggtcatgcgctggttcgtgcagtatccggagtcggcgcagaagggtggtccgcgcgcctacggtgactggaaccgcgagcacatcgcgttcgtggtctggaccggcgatcgcttcgagctgcgcgacaaagtcgcgcgggcgcagtggccctgtgatccggtggcgcccggcgatcgcgcctgcggtggattcccggattccgggccggatctgttcgtgacggccggagcatcgctgccggtggcggcctccagcccctga

SEQ ID NO: 493913 - DNA, 1008 bp, Stenotrophomonas maltophilia
gtgtcgcaggatagagagtcgcagctgttgcggcaggccacggaggctggcatgacctcgtcccgggaactggccaacttcatggcgcaggccgggcacgagtcccgtggcctgagccggctcaatgagagtttcaacttcacccggggcatctcgcagatcccggtggaagcagcgtggcgcaatggcaatggcgcgcttgagagcgcccgccaggaggcgctgcgcgggcggccggagaacctggccgaactgatgtatggcgggcgcatgggcaatgacgcgcccggtgatgcactgaagtatcacggccgtggctatctgccgctggtcggcaaggagaattacgagcgtgccggcaaggcgctggacctggacctggtgaatcagccggagctggccgcgcaacccgagcacgcaggccgtattgccgtgtggcagtggcagacgcgggtgccggaagcggcgcgcgaggacgtgcgcgaagcgacgcgtgccctgaatggcgcgctcaacggcatcgaagcccgccagcagcgttttgacgtgtggcagcagaagctgacccccgatgtgatggcgcgcctggagcgtggcgaagtgggggcgcctgcccagcccacaacgggacgcgacatgtcgcaaccgggcgagccgggatacacgctgttctcgggagcgcgccagcacctgcagcagatggggccgcaaagcggtctgcgcagcgtgcaggaactggacaatgccgccggcgcactggcgctgagcgcgcagaaggcggggatgtcgcgcatcgatcatctcctggcgggtaatgacggtcgcacgctgtttgctgtacagggcgcgctaggcgatccggccatgctgcgcgcatcggtcgatcgcgaacaggcggcgcagcagccgctggcgcagagcagccagcaattggctgccaatgtcgcccagcaggacccggcggccgcgctcgcccgcgagcaggagcagcgttctcgatccctgtaa

SEQ ID NO: 493914 - DNA, 537 bp, Stenotrophomonas maltophilia
atggagaaggggagtggcacgcacatggacaatgccttggcgttcgttccgtccggcgcgaacctgctggaagccgtacgcggcgatctgaccggcaatggtttccaggaccagctgctggtgatcgaccaacctcctccggagggcttgctgcccggcgagcacggaccgaaccgggtcctgctgttgctgctgggcgatgccacgggccgctggcagctggcggcacgcaacgacaagctggtgccgtgctcaacgcgcggtggcattgccggtgaccccttcgcctacgtgacgattgaagacggcgcgttcagcgtgatcaccaacggcggcagccgcgaacgctggagcagcgtctacaccttccggtatgcacctgccgagcaggcgtgctgggtgcatggcgtgcagcgcaaggtggtggacaccgaaaccgaagcgacccacacgcgcgatttctccgcggccgagcttggccgggtgcggttcgaggatttcgatccgtccgtcgtcgccgacgtcagcttgccctga

SEQ ID NO: 493915 - DNA, 1014 bp, Stenotrophomonas maltophilia
atgccgaatcccggccgtgttgcctcgctgattggcggactgctgttcgcctcgtcggcccatgccgctgatagctgggtcatcttcaccggtggcgaaacgccgaaccgcgaggcgtgggtggtcgatgcacaatcgctcgccgaccgctcggatctggtcggttttctgcagcgtgccacgccggcagagcagaacgcgtacctgaagcagttgcgccgcagggagccggcgaagcccggtgacccagttgcgggtccggagccggtgtacgaaatccaggtcaataccgtctacgagaacgcgaccaaaccgaatcgactggtcagaaagtactgggtgaactgttcacagaacagcgtggccatcaggacgagtctgatccagtggcgcgatcggccaatggagaacgtcccaccggataagttcgaaccgcaggccgaggcgattgctccctggcaggtgcaactggtgcggtttgcctgtctagttgggcctgatcccaaggccaaggcgccagcggaaatgatgaagcgtggcttcctttccatcggtgacgtcgggcaatcgcctgtggatttcatctgggccagcctgtggaaggacggcaaacgtccagcattcacctatctgccgggcgacgctgaaatggatcgtactgtgcgtagcctggaagcgactgtggcgcgcggccagagtgaaaccagcaaagctctggatgagtcgcggcgcgcagccaaccgagtgggtcgcaacaatctcatggacctgtggatcggcaagacagagcaggaattcgtgcggacgtggggcccaccggatcgtgtggagaacggcgccgatggttcgcgcacgttgtacctgcatcgtggcgagcgtgtgcagggattgaatgcttatgggcatgtcgtcagcgacgtaaacaatcgatgcgatatcacggtgctgacgacggacggctacgtccgcgactacgccacacagggggccgcatgcgcccagcagttgcgctga

SEQ ID NO: 493916 - DNA, 1143 bp, Stenotrophomonas maltophilia
atgacgatcaggtggctggccaactttgatttctcaggcggattgcaggatctgctgggctacgctgtgcgtgtccagtcgatcggcgatttcgtcttcttcaagctgatcatggattacctgcgcgacaggatcagtgactacggcatcgacctgatggggcgcatgatgtcctgggtcggtggcattgccctggtgctgatgacgctgtgggtactgatccagggcttccggatcgtcaccggccgcagtcgcgactccatgatggtgctggtgaccaatatggcgcgcgcggcgttgattgtgagtgttgccaccagcatggcgatgttcggcagcaacctgcagaaattcctcaacgaggacgtcaaaggcctgatcacccacgtggtgaccggcaaggaccagcagccggaagaccagatcgacaagagcctggcgtggatgcaggtggcgctgtcgagcattgatggcatcaagatcctgaatgatccagggttgcaggcggacaagacccgggcgctgtggttcatcggcctgggcacgggcggcccggcggtcaccgcaggtgcgatgttgctgctctacgaggtcgcgctggcgctgttcatcggcctgggtcccttgttcattctgtgtctgttgttcgaccagaccaagcagctgttccagcgatggctgttctacggcatcggcacgatgttctcgatggcggtactggcagcgatggtatcgatcgcgctggacatggtgatccgtgtctcgaccgcgttctggtccaccgccctggtcaacaagttcctgctcgaaggcgcctccagcgacggcatgaccagccaggcgatgcagcagggcggcatgggattgatcctgacgaccttgattctgactgcgcccccaatggcggccatgttcttccagggtaccttgggtagcttcatggcatattcgcagataggtggcagtgcggcctcaactcctagtgctgatggtcggcccccgggcacttacacgcctccttcgccatcgaagagcgaaggccattcgagtcaccaggatagtggtgtcactgtaaggaactctgctccaagtacttacacgccgtctaatcagaagcaggggcagtatggcttggcggattga

SEQ ID NO: 493917 - DNA, 816 bp, Stenotrophomonas maltophilia
atgaacaataccaagcaagcttcctcgccccgccgccgcgcgccccgtcttgcagcgatgaccgtggcagccatgatggcgctcggcaccggcaatgtcagcgcctggattcccgtgcaggagaccggtaccagcctcatccagcacctgctcaatcagatcaacacctacaagaccgaggcgaccgtctacgcggccaaagcgcaggacgcggccgagtacgtcgagcagaacacccgctggatccgcacgctggagcagtatcgccaggcgctgatccaggtgcaggcggcggtgaacagcttcggcatgcccgacagcgcgccgctggtgccggtggcaccgaactatctggttgccgaaacctgcggcaaggcgctggacttcagcctggagtccgccttcaaggtgttcgtgttcaatccgcaggcggatgtgaaggagcagcagatgcagatctgcgtcaacatccggatgatgcagaaccgcaagtacaacgacgcgatcgatttcctgacccagaccgttccgcgcatcaacaactccttgacccgcatcctcaagatccgcctgaccaacaacgatcagggcaccgtgcagggtgccgacagcgaatcgctccgcaccgccaatgacattgccgcacttgcccagagctgggaagcacggatgaaatcctatgatgcctatatcgaggtcatggaggccaaccagaaggtggtggcgcaggccgcattgaagggggacccgaccaagcagctgatcagcgacatggtcaagaccaccgcactgaaggccgcgctcagcgtcaagtga

SEQ ID NO: 493918 - DNA, 2448 bp, Stenotrophomonas maltophilia
atgttcagccctgacacctccatcagtgagttcattccgttgtcgtcgcatgtcgctccgaacgtggtcaagaccacgggcggcgattacctgctgacctggcatctggaagggctgccgttcgtcggccgcgaggagtgggagctcgaacatcgccacaacacgttcaaccgcctgctgcagacgctgcgcgcgccggatttcgtcaacgtcgccttctgggtgcacgacatccgtcgtcgccgcaccctgaagggcaagagcaactacaagcagcgcttcaaccaggatgtgtccgatcagtacatgggcatgttgtcctcacagcgcatcatgcagaacgagctgtacctgaccatgatctaccgccccgtggtggcgggtaagcgcttcgtagagaagtcggcaaacgtggacaagctgcgcgccgagcaggagcaggcggtcgaaaagctgatggagctggccggcaacgtcgaggccgtcatccgggactatgcgccataccgcttgggaatgtacgaggccaagaacggcgtggtgttctcggaaacgctggagctgttcggttacctgatcaatcgcatcgacgagccggtgccggtgctgtcggcaccgatcaaggactacctgcctgtcagccgccatatgttctcggccaagaccggcgatttcgcgatcaatacccccaatggtgccaatcactacggcgccatcctgaacatcaaggagtatgccgagggcacttacccgggcatcctcaacggcctgaagtacctcgactacgagtacgtcatcacccattcgttcagcccgatggggcggcaggacgcgctgaaggtgcttgatcgcaccaagggcatgatgatctcctccggcgacaaggcggtcagccagatcgtcgagctcgaccaggccatggatcagctgtcgtccggcaacttcgtgctgggtgaataccacttcatcatggcggtctacggtgacactcaggccaagctatcgcagaacgtcgcatcgacccgcgccgagctgtccaacgccggcttcgtgtcgaccaaggaagaccttgcggtcacctcgtccttctattcgcagctgccgggcaactggcgctatcgtacccgcctggccaatgtcagctcgctgaacttcctgggcctgtcgccgctgcacaacttcgcgaccggcaagcagcacaacaacccgtggggcgactgcgtcaccacgctgcagaccaccaacggccagccgtactacttcaatttccacgcgacccatccgtcggaaaactcgctgggcgagaaggcgatcgccaataccatggtgatcggcaagtccggtaccggtaagaccgcgctgatcaacttcctgctcagccaggttcagaagtacgagccgtcaccgaccatcttcttcttcgacaaggatcgtggtgcggagatcttcgtgcgcgcctgcggtggcaactatctggccctggagaacggcgcgccgaccggtttcaacccgttccagtgcgagaacaacgaagccaacgtgcagttcctggccgacctgatcaaggtgctggccggcaagcgtgagtacagtgcgcgcgaggaagaggacatctaccgcgcggtggaaagcatgctcgatacgccgatgcacctgcgcagcatgaccaacttccagaagagcctgcccaacatgggcgacgatgggctctacgcgcgcatgcgccgctggacctcgggcaattcgctgggctgggtattcgacaatccggtcgacaccgttgatctgagcaaggccaatatcatcggcttcgactacaccgacatcatcgacaatcccgaagtgcgcgtgccggtcatcaattacctgctgcaccgcctggagtcgctgatcgatggtcgtccgctgatctacgtgatggacgaattctggaagatcctggatggcgaaggtggcctgaaggagttcgcgaagaacaagcagaagaccattcgtaagcagaatggcctgggcatcttcgcgacgcagagcccggaggacgcgctgaagagcgacatctcggcagcgctgatcgagcagactgccacgttgatcctgctgccgaacccgaacgccagcaagagcgactacatggacggcctgaaactgaccgaggccgagttcaaggtggtcactgccctggacgagcgctcgcgctgcttcctggtcaagcagggtcacgcgtccagcgtgtgccagctcaacctgcgcggcatggatgacattctgtcggtgatctcggcgtccactgacaacatcgacatcatgcatcgggtattgcagacagctgcggtacgcgcacgggtgacggtggatgagctgacgccggaacagtggcttgaagatttctacaagaatcgaaagggctcgggcaaggcggctgtcgcagcgcgcgacactgttacctga

SEQ ID NO: 493919 - DNA, 267 bp, Stenotrophomonas maltophilia
atgttcctgggcgtcccctacctgccatttttcatggtggcaggtgggttgctgctgctcagcatgtacacgaacttctggttcctgctcaccattccggtggcggtcttcatcatgcggcagatggccaagcgtgacgaaatgatcttccgcctgttgggcctgcgcctgatgttcaagctgaaagtccgcaacgtgcaggaacacgatggcatgtgggtattcaaccccaaccattaccgcgacaagccggcccgaatggattga

SEQ ID NO: 493920 - DNA, 408 bp, Stenotrophomonas maltophilia
atgaagcgatccaatctcgacctcgtccaggcccagcgcacgctgaagaccctgctgatggccacgatcttcgttggcgcactgttcgccccgcaggtgttcgcaaccggcaccgacttcggcggcaccgacaagaaggtctgcggtttcttctccaacatcaacggcctgctgaacatggcctcgatcgccgtcgtgacaattgcggtgatcttcgccggctaccagatcgccttcgcgcacaagcgcatcggtgacgtcgcgccgatcctgatcggtggcgtgctgatcggtgccgccggccagattgcgcgcatgctgctgggcgagggtagcgacggcaagtgcggtggtggcaccagcacctcctacctgatcaaccacgtgatccagtactacagtgcataa

SEQ ID NO: 493921 - DNA, 984 bp, Stenotrophomonas maltophilia
atgctgccaggactggaaatgatggcgtgcccggagatggccgtctcgatggatgtgatgcagcatgtaatcaacgtcgaatcgtcgcgcaatccctatgccatcggcgtggtgggcggtgcactggtgcgccagcccaaggccttggatgaagcgctggcgacggtacgcatgctggaagagaagggctacaacttctcgatcggactggcccaggtcaatcgctacaacctgggcaaatacgggctggattcctacgagaaggccttccagcagtgcccgaacctgcaggctggttcgcgcatcctcgccgagtgctacaagcgctccggtggtgactggggcaagtcgttcagctgctactactcgggcaatttcgagaccggcttccgtcatggctacgtgcagaagatctacgactcgatccgccgcgggcagcaggtcgccagtaatggtgtcgcaccgatcgacgtggtcagtcggggggagcgccgcgcggtgaaggtcgagcatcacccgcagctggcttcgccggcgcaggcgcgcatcgttgctcaatccaatggccccgtgtacgtgccgtcggaagatcccgcacgcgcctatgtcgtgtacccgtccaccggggcgatggcgcggggcagcctcctgaacatcgccgaccaggcactgtccaaggtggtactgggttcggtggatcggatgatgcagctgcaggcgcagccggcccaggcgggcgcttatccgcagcagcaggccggcggcatgccgcagcagctgccacagcagggccccgcacaggcgatggccatgccgcagcaattgccgggcgcggctggcgccggcaatgaggggccagtgatgctgcggccctggagcgagcgcaaccagcctgtcgccggtggcgacaattcattcaacgcaccggtgcaggctgcgccggtgcagcagattcccgcaggggatgcggccttcgtgttctga

SEQ ID NO: 493922 - DNA, 1044 bp, Stenotrophomonas maltophilia
atggacgccgaagtgtcacccctcgccctcgtctccagcgatttcctgcgctatcagtacgaggtgctgggcatcgccgagtacatgacgtctccggaagtgacggaaatctgcatcaaccgtcccggtgagctgtacctggaaacccgggcggggtggcagcgggtggacgtgccgagcctgaccttcgagcgggcccggcagttctgcacggcggtggtgaacgagagcaacaccggccagcgcatcaccgatgccgatccggtcgtgtcgctcacgttccccaccggccagcgtgcgcagttcgtgattccgccggcctgcgacgctggcaaggtgtcgatcaccatccgtctgccgtccaagcacaccaagtcgctcacgcagtatcacgaagatggattcttcaatcagatcctcgaaaccgatggcagcatcagcgagcaggatcgtgagctgctggagctgcgccattcgcgcgagtacgccgagttcttccggcgtgcggtgatgtaccgcaagaacatcgtggtatccggtgcgaccggtagcggcaagaccaccttcatgaaagcgttggtcaatcatatcccggacaacgagcgactggtcaccatcgaggacgcgcgcgaactgtttctgacccaacccaatgtcgtgcacctgctgtattccaagggtggacaaagcaccagcaatgtcagcgccaagagctgcatggaagcctgcctccgcatgaagcccgaacgcatcatcctggccgagctgcgcggtgacgaggcgttctacttcatccgtaactgcgcgtccggccacccggggtcgatcaccagctgccacgccggcagtccggaacagacctgggaccagctggcattgatggtgaaggcctcggccgaaggttcgggcctggagttcaacgtgatcaagcgactgttgatgatgacgatcgatatcgtcgtgcatatcaaggcgcatgccggctcgcgctacatcaccggcatcgacttcaatcctgggcgtgcccaggggcaggagggctga

SEQ ID NO: 493923 - DNA, 1272 bp, Stenotrophomonas maltophilia
atgagccagcagaacactcccggaaacgacccgaacaacggacgcgacgagagccagagcccgtacggcgcacagggtgccgcggacgcgccgtcgaacccgtacttcggcacgacccaggccgagcctgcgccggatctggatgcggccgcgccgcagctgcgctcggccgaagagcagcggctgaaccgaaaggcgctgctgttcctgggcggcatcgtggtgctgctggtggccatgggtttcctgctgttccgcaagggccaggatgacaaggacgctgtgcagaaggtgccggacgttgcgcgcgtgtctacgccgactctgccggacgccgtgcagacgagtccggtgccctcccaggccatgcaaccggttgatccgattccgatgacgccgccgctaccgccgccgccgctggattccaccccgctgttcgttccccagtccgattcggcgcgcgagattgaccgtggcccgactttgctggaccgccgcatcggctccgggagcggggtgggtggtggtgatggacaggatggcaacgggagcaatggcggccgcggcatggatgagtacacccgtgccatgctggcccagctgcccaacaatcaggcggcgccggcaaaggttcgccgcggcccggacgtcgaggatgtctccagcgccacctacatccagagccccgacgcgctgctggtgcgtggcacctacctgcgttgcgtgttggaaacccgaatcatcaccgatctcgccggctatacctcgtgcctgctgaccgagccggtgtactcgatcaacggtcgcaacctgctgctgccgaagggctccaagatctatggcgcctacggcggcggtccgatgggcaagcgcgtggaagtgatctgggatcgcatcaccactccgaatggcatcgacgttgcgatgtccagcccgggcgtggatcagctgggtggcgccggtcatccgggccagtacagcgcgcactggggcagccgtatcgcctcggcgctgatgatcagcctgatttccgatgccttcaagtacgcagccgccgaacacggtccggagaccaccaccatcgccaataacggcatgacggtgcagtcgccctatgagagtgctaccgcacgcacgatggagcgcctggccaacgaggcactcagcagcaaccgtcgtccgccgaccgtcaccatcaaccagggcacgatcgtgaacgtctacgtcgccaaggacgtcgacttcaccaacgtgctgcacccccgccggtaa

SEQ ID NO: 493924 - DNA, 780 bp, Stenotrophomonas maltophilia
atgagtagtcgaaatatcaggggaagcgcgctggcgctgctgtcgatgttgtcgttgctgttctcagcagcggcgatggcgcaggcggttgaccactacgagtacgagaaggaccgtatctatccggttcgcaccggcctgggcctgaccacccagatcgagttgagcccgaacgagaagatcctcgactacagcaccggcttcagcagcggctgggaactgacccgtcgcgagaacgtgttctacctcaagccgaagaacgtcgacgtcgacaccaacatgatggtgcgcaccgagacccattcctacatcttcgagctgaaggtggtggccaccgactggcgccagctggaacaggcccgtcgtgccggtgtgcagtacaagatcgccttcgtctatccgaacgacaccgtgttcggcgtcgcccaggaagcggtcgaggaagaggccaagccgttgctgagctcggaactggccaaggaccgccagtacaacttcaactactcctattcgaccagcaaggcgaagaagatggggtggctgatcccggtcaacgcctatgacgatggtcgtttcacctacctgaaactgccgaattcgccggagtacaagaccggcatcttcccggcggtgtttggtcgtgaaacagaatacggtgaagacttcgtggtcaacaccacggttgaaggcaatacgctgatcgtgcacgggacacacccgtacctggtcatccgccacggcgacttcgtcgtcggcctgcgaaggaacgtgaagaaatga

SEQ ID NO: 493925 - DNA, 1056 bp, Stenotrophomonas maltophilia
atgttccgcaagaaggatcccggcaatagtcccaaggtcgagcagtcggtcgccaaggcggtcagctacgagatcaccgtggccgacatggcgcgccgcagcgagcggcgtgcgtggtgggtcgccacaggctcgttgctgatgtcgctcgcactggcgggcggctactactacatgctgccgctgaaggaaaaggtgccgttcctggtcatggccgatgcctacacgggtacggcgaccgtcgcgcggttgagtggcacgttccagggcgagacgatcaccaccaacgaagcgatcaatcgcagcaacgttgcccagtacgtgctcgcgcgcgaatcgtatgactcggcggtgatgggcctgcgtgactgggaactggtgttcgtgatgtccaccgatccggtggcgcagtccatgcgtgtccgctatgccggcaacaatccgcagaacccgttcgtgatgtacggtcgcgagcgcgccatccgggtcaagatcctcagcatcacgccactgggggccgagccgaacggcagcttccgcggcgcttcggtgcgcatacagcgcagcctgctggacaagcgcaccggcgtctctacctacctggacaaccagctggtgacgatgcgcttcagctacaaccagaacctggcgctgtccgaacaggatcgcatcctgaacccactggcgttccaggtcaccgagtaccgcgtcgacaacgactactcgcgtggcgtgccggtgccggatgacggcgccatgcaggcgcaggcgcagcaggccgcacaggcggcgcagcaggcacagggtgtctacgatcccaacaatccggccgcggccaccatgatcgatccggccaccggccagccggtcgcggctccggtcaacggccaggtgccgggccaggcaatgccgggccagccggtacagggtcaacccatgccgggtcagccggtgcaggggcaagcaatgccggggcaggccatgcccggacagccggccatgaggccggcgcagaacaattccaccggaactgctgatggagcaagcaaccgatga

SEQ ID NO: 493926 - DNA, 558 bp, Stenotrophomonas maltophilia
gtgtgctgccagtcagtgcgtcgctccgattccggcgtgcgcgacgcagcgccggacgaccagggggccaatgctcgggactgctttttcgtacgtcaaagtgaagcccgtatgaatcaggcgtttatcgcgaaaatgtccatcgccgcagtggcggcgttgatggtggccggttgcgccaccaagtccgctcccgatttcggaggccgctggaagccggtcaaccgctttgctgcggcacccaccgagatcccgctgtactccagctacgtctaccaggcctcgccgatggatggcacgctcaaagccatgctcgagcgctgggccaaggattccggacgcacgctggattaccgcctgagctcggacttcaccctgtacggcgcggtctccagcatcgacaccaccaacgctcagcaggccgtgatcgatctgacggcggcctatgcagcgcagggcatctccgtctccatcgttggcaaccagatcgttgtgcagagcgctggctcgacgccgaccgcgtcggcacagggcgctgattcaaacagcggcacctga

SEQ ID NO: 493927 - DNA, 1680 bp, Stenotrophomonas maltophilia
gtgttgcccagtaagaagtatctgctcatcgccatcatcacgctggcgaccctgttgcttggtttcgtgttttccggctacttgaccttgctgttcctggggctggacacccagctgttcacctggaacacctactaccagtacgtccacgccatcggccaaccgcaggtcgcgcccttcgtgggcaagatcaaatgggcgggctacgtaggcttcggcctgcccctgctggtgctgctggtggccggcctggtgctgctgctgaagaaggacaagcgctcgctgcacggcgacgcgcgcttcgccaccggcgccgacctggccaagcacggcatgttcaagaagaccggccagagcatcgtggtcggcagccatggcggcaagctggtgcgcctggatggccagcagttcgtgatcctggccgcgcccacccgctcgggcaagggcgtgggcgtggtcatcccgaacctgctggagtacggcgaatcgctggtggtgctggacatcaagcaggagaacttcgacctgaccagcggctggcgcgccagccagggccaggagatctacctgttcaaccccttcgccgaggaccggcgcacgcaccgctggaacccgctcagctacgtctccgacgatccggccttccgggtgtcggacctgatgagcatcgccgcgatgctgtacccagacggggccgaggaccagaagttctgggtcagccaggcacgcaacgcgttcatggcctttaccctgtacctgttcgagaactgggacgacgagcgcagcagcggtttcccgggcggcgccggcacgcccacgctcggtgcggtgtaccgtctgtcctccggcgacggcaccgacctgaagaagtacctcaagaccctgtcggagcgaccgttcctcagtgccaatgcccgttcggcgttcgccaacatgctgtcgcaggccgatgagaccttcgcctcgatcctgggcaccttcaaggagccgctcaatccctggatcaacccggtgctggacaaggccaccagcagcaacgacttcctgctgaccgacgtccgcaagaagaagatgaccatctacatcggcatccagcccaacaagctggccgagagccggctgatcatcaacctgttcttcagccagctgatcaacctcaacaccaaggaactgcccaagtccaacccggacctgaagtaccagtgcctgctgctgatggacgaattcacctcgatcggcaaagtggagatcatcgcctcggcggtctcctacatggccggctacaacatccgcctgctgccgatcatccagagcatgtcccagctcgacgccacctacggccgggaagtctctcgcacgatcatcaccaaccacgcgctgcagatcctgtacgcgccgcgcgaacagcaggatgccaacgactactcggacatgctgggctacaccacggtgcgcaggaagaacgtcacccatgcccgcgagaagacccacaacttcaccgaggaacggcgcgcgctgatgctgccgcaggagctgaaggcgatggggccggacatggaggtgttcctgtacgaggggatacctcacccggtgaagtgcgacaagatccggtactacaaggatcgctacttcacctcgaggctgctgccgaaggtggacgttccgatgctgaacgtctaa

SEQ ID NO: 493928 - DNA, 258 bp, Stenotrophomonas maltophilia
atgcaggaattcaggcatgtgctggaaacccgtggccgctaccagctggtagcggtgtcccacgagccggtgtacgctcccggcgatgtggtcggccatgcggtcgtcgccgacgatggggatcgtctgaccgacctgatatcactggccgaagcgcgccaacgcttgctgcaactggtgcgtgaagagggcgaggagcccgggctggaaaacgagaaccacctgcggaagaaggcgtcgcgctggcgccaccgctag

SEQ ID NO: 493929 - DNA, 420 bp, Stenotrophomonas maltophilia
atggactgggtagcacttgcccgcacgctggccaccgaggcccacgcggggcagatcgacaaggccggccagccttacatcggccatgtggcgcgggtggcggctgcggtgcgcggcgacgatgacgccgaagtggtggcctggctgcatgacgtggccgaggactgcccggcgtttgccgcgcggatcgaggtatttcccgcaccgctgcgcgaggcggtgcaactgctcaaccgcgatgcagcacccgacgcggacagctactacgcgcgcattgccgcccacccgctggcactgaaagtgaagcgcgccgatctggatgacaacgccgatccgcagcggctggcgatgctcgatgcggcgacggccgcacgcctgcacggaaagtacgctcatgcccgggcggcgctgggcatctga

SEQ ID NO: 493930 - DNA, 1212 bp, Stenotrophomonas maltophilia
atgagccccacctcttccctggctgcgcggctgacgccccgccagcgcaccctgatcatcctcgccctttcactgggtggcttcgccatcggcaccagcgagttcgccagcatgggcctgatgctggagatcagccgcggcctgtcgatttccgaaacccaggtcgggcatctgatcagcgcctatgccatcggcgtggtggtcggcgccccgatcctcgccttcgtcggcgccagcttcccgcgccgcaagctgctgctggcactgatgggcttctacgcggtcggcaacctggccagcgcgctggcaccgaactacggcacgatgctggtggcgcgcttcgtcgccggcctgccgcatggcgcctacttcggcgtggcgatgctggtggccgcggcgatcagtcccgcaggccagcgcggccaggcgatgtcacgcgtgctgctgggcctgtctatcgcgatcctggtcggcaacccgctgacgacctggctgggtcagcagctgagctggcgcaccgcctttgccctggtcagcgtgctggccatcgccaccgtggcgatgatcgcgcgcttcctgctgccggacccggatgaagtacgtacctcgccgatgcgcgagctgcgcgccttcaacacgtcccaggtgtggctggcgctggcgatcggcgcggtcggcttcgccggcatgttctgcgtgttcacctacctggcaccgaccctggtgcaggtcaccggcgtggccgaatcgtggatgccgctggcggtgggcgtgttcggcatcggcgcgatcatcggcaacatcgccggtggctggctggtggacaagttccacttcaaggccgccgccgtggtgctgctgtggtcgatcgtgatgctgctgctgtatccgctggccgcacagtcggtgtggaccatcggcccgatgatcatcactgtcggcaccatgggcgcactggcggcggtgctgcagacccgcctgatggacgtggccggtgaggcgcagacgctggcggcggcctccaaccacgccgctttcaatactgccaacgcactcggcccgtggctgggcggcatggcaatcagcgccggcttcagcccggccagtaccggctatgtcggcgcggctaccgcgatcggcggcctgctgctgtggtgcgtggcggtgatgctggacaagaagcgcagcaccgccgtcgtcggcagccactga

SEQ ID NO: 493931 - DNA, 480 bp, Stenotrophomonas maltophilia
atgaagatcggtgagctggcccgcctcacgggcctcgcggcgtcgcgcattcgcttctatgaagacgcggggctgctggtggtgcagcgccaggccaatggctaccgtgactatccggaacaggcggtgctgttgctggagttgatcacgggcgcgcagcgtgcaggcttcagcctggaagagatccgcgccctgctgccaccggacatgggccagtggcagcatgaggcgttgatcacgatgctgcagcagaaggtggctgacatcgaagcgttgcagctgcggctggcagagagccgggcgcatctgctggccctgatcgaggacatccaggcgcggccggacggcatcgactgtgcagccaattcgcggcgggtgctggaccgtgtgaagcgcggtgagctggcgcggccgaccctggtggccggcgatacagcgttgctgcgaccagatcgccgtcgccgcagaggcagcgactga

SEQ ID NO: 493932 - DNA, 1239 bp, Stenotrophomonas maltophilia
atgtcgctgttctcgcccctggcactaccctccggtgccatcatccgcaaccgcattgccaaggccgcgatggaggaaaacatggccgacgccgaccacgcgccgtccgctgcgctgctgcagctctaccagcgttgggccgatggcggcgcaggactgatcatcaccggcaacgtgatggtcgatggccgcgccatgaccggccccggcggcgtggtgctggaagacgaccgccaccttgaccgcttcatcgcctgggccgaaacggcacgctcacggggcgcgcagatgtggatgcagatcaaccatcccgggaggcagatgccggccgcactcggccaaccggcactcgcgccgtcagccgtcgccctggagatgggcgcgctgtccaggcagttcgcaccgccgcgggcgatgaccgaggcggacatcgaagaggtgatcgcccgcttcatccgcagcgccgagctggccgagcgcgccgggttcagtggcgtgcagatccatgccgcgcacggttacctgctcagccagttcctgtcgccgctgtccaaccgccgcgacgaccgctggggcggcagcctgcacaaccgtgcgcgcctgctgctggagatcgtgcagggggtgcgcgccaccgtgtcgcccacgttcgcggtggccgtgaagctcaattccgccgatttccagcgcggtggcttctcgcccgaggatgcgcgcgcagtggtggaaatgctggcgccgctcggcgtggacctggtcgaactgtccggtggcagctacgaagcaccggccatgaccggtgccgcacgcgaccagcgcagcctggcccgcgaggcctacttccttgagttcgcgcgtgagatcgccacggtggcaaccatgccgctgatggtcaccggtggcatccgccgtcgcgccgtggccgatcaggtacttgacagcggtgtggccatggtcggcgtcgcaaccgcgctggcgatcgagccggatctgccacaccgctggcagcagggccgcgacccggtgccgacactgcgcaccatcgactggcgcaacaaaccgttggccgccagcgcacacatggccgcagtgaagtaccagttggcgcggctgagcaggctccggcccacggcgccgggtgtttcgcccgtctgggcactgctgctggcacaggcggccgcaaagtgccggacccgccgctaccggcgctggatcggtgcacgcgcaggaggatactga

SEQ ID NO: 493933 - DNA, 477 bp, Stenotrophomonas maltophilia
gtggcagcaggaccaaccaggaaccacgaaaagctgctcgatgacctgctctcactgggccgcaactgggcgctggccattgccatcgcgggtgccggagctgcggtccattacagcgagtcggtctacgaagcaggcatctggcgcgacctgctgcccacgctctgcttcctggtcgccatcgtctggatcgtgctcagcatcatccgcttcgacctgaccatccagcagcacttcgagcggaaattgtcacgctggctcagccgtctgctgtatgtcgtgctgcttggcaccggcatcactgccgtgttcttcgtcaccgaactggcggagaacaatcacatcgcgcggatgtgcgactcggtggccaatgaacccggcagccgcatccacaggtcggccgagtgccagcgcctgtaccagcaccgcgcggcgtaccggcagcgcctggaatcggccgagggtgagttcgactga

SEQ ID NO: 493934 - DNA, 270 bp, Stenotrophomonas maltophilia
atgcacccccatcgcgcacctgcccgccatgatgccatcgccttgcaggccggcatgctgggcagcgtgttgggcgtggcgctgttcaaggccatcgcactgtctgcgttggcgacgggttcgatgatgggtatcgggctatgggtgatggcctgcgcgctgctggcagcgtgggcgctcgcagcctatctggcctgcctggcactgagccgacgcgtgttcgtgctgatgctggtgctgtgcacggtactggtgatctgcatcgcctga

SEQ ID NO: 493935 - DNA, 246 bp, Stenotrophomonas maltophilia
atgaacctgcagcccccgctccgcgcgaccctcattgccatcgccctcgcatcgctcagcgcctgcgccacctatgacgacagcaacatgcatcaagcctgccaggagtcgccgcacctgaaggacctgccgcccgaggtcgctgcccgcgagagccgctgcaacaagggcatggaagtgtggtcgagcgagcgcaagggcagtgacaagccgctggacctgagcggaaagaagaacaatccctga

SEQ ID NO: 493936 - DNA, 249 bp, Stenotrophomonas maltophilia
atgccggacactgcccaccctgtcattcgcgcgttcgaggccgtgttcgatctatcaggcagcgtgcagcgcatcactgcgctcacggtcacctgccggcattgctcgtcgaccagctctgccagcgaagacaacctggtgcaacttccgggcggggcgttgttccgttgtgacgggtgcggctgccatcaaccggtcagccacgcccgcctgtcggactggcaaccggcgtcgttgctgggtatctga

SEQ ID NO: 493937 - DNA, 1749 bp, Stenotrophomonas maltophilia
atgcgctcggctatgctgcgccacctccctgcgccaatggcggccatgcatccttttcccctgccagtctctgcacctgatcagctcgcctaccgactgctgcaggacagtgactgggcccgctcggccactgccgcaagcgcacccgccgaacttcgcaccttgctggcgatgatcctggattcgccggaacccctgtggcttgcctggggcaaggaagacaaggcgttcttcttcaatgatgcctatctgccgatgctgggggaaaagctgcacggcgcgatgggcaaccgtctggaggatgtctgggcggacgtatggccggacgtggtgcatgccgtcgacgacgcctttgccggcaccagccgcagcttcaagaacctgccattgatgatggatcgcgacggcacgctgcgcgaaactttctggacgttttcctattcaccgctgcgcgtcggctgcggcagtgtcgccggtatcctgtgcgtggtcagcgagcagaccgaacgggtgatcgagcgcgacctgcacagccgccaggtcgcggcgatcaccgagcaggcgcgggaggcccatctggaactggtgcgcgcccgcgagcagctgcgccagtcgcagaagctggaggcgatcggccagctcaccggcggtgtggcccacgacttcaacaacctgctgcaggtcatcaccggttcggtggacatgctcctgcacacgtggccgtcagacgacacccggcgccgctacatccaggccattgccacagcctcggaccgcgccaccaagctgaccgcgcaactgcttgcgttctcgcgtcgccagagcctgtcgccggaggtcttcgatctctgcgagagcgtgcacgcgctttcggacatcatcaccacggtactgggtgcacgcatccaggtgtcgttgacgttgcccggcacgccgttgccggtgctgctggaccggacccagctggacactgcattgatcaacatcgcggtcaacgcgcgcgatgcgatcgagggacacggcagggtgaccatcgaggtggagcaggtaaccgcggtgccttcggtgcgcttcgccgcgccgatgaagggcgacttcgccgcgatcagcgtgaccgacaccggagcaggcatcgaccccgccgtcgtcgaccgcatcttcgagcccttcttcaccaccaagagcgtcggcgccggaaccggcctcggcctcagccaggtgttcggcttcgtcaagcagtcggaaggcgaggtggacgtgcagagccaggcgggcgccggtacccgcttcaccctgtacctgccgctggcgcaggcgagagaaatgacggaacggccggcgacgctaccggggctgcagcatggtcacggtgtctgcgtgctggttgtggaagacaacgtcgatgtggccgaatttgccgtcggcgccctgcgcgagctcgattacaacgtggtacttgcgcacaatgcggacgaggccctggcggagctcgaacgggatgcctcccgcttcgatgtagtgttcagcgacgtagtgatgcctggcatgaacggcctggatctggcccgtaccatccgcagccgcctgcctgggcttccagtgatccttaccagcggctacagcgaactgctggcccgggaccctggccatggcttcaccctgctgcgcaagccttactcattgaagcagctggcctcggtgatgaccgaagccgggcgctgcgcgcaggccgtggtagcgtcgccctag

SEQ ID NO: 493938 - DNA, 1524 bp, Stenotrophomonas maltophilia
atgctgtacgacgtcgtcatcgccggggccggcccggtcggcctgttcctgtcgtgcgagctggcccaggccggctgttcggtcctgttgctggagcaggcagcgtcgcccgagacgcccttgaaacgcctgccctttggcttgcgcggcttgaatgcgcccaccctggaggccctggatcgacgtggcctgctggatgcggttgccgccagtcaggtgctgaagccggacaacggcgcaccgccgcccggcaccgcccattggctggcgcaaccgcggccactgggcggccacttcgccggcattccttttgcgctggacaacgtggacagtgcgcgctggcgccatcgcctgccgacgccggtgcccacccagatggcggtcgagctgcagtcgctggaggcggtgctggccgagcgtgcggtgtcgctgggtgtacagatcgagcgtggctgcacggtgcaggcggtgcacgcacgcgaagcacagatggtggtccagaccggtcgcgggctgatgcggggccgctggctggtcggttgcgatggcgcccgcagcacggtacgcaagcaatcggggttcgtgttcgcagggacggcgccggagttcaccgggcacacgctgcaggtcgaactggcagacccgtcggtgctcgtcccggggcgtcagttcaccgaacacggcatgtgcaatttcaatccgccgggcatgctggcgctggccgatttcgacggtggcgccggccatcgcacgccgctggaccggcacaccgcccaggcgctgctgcggcgtgtgtccgggcgagaggcaacgatcacggcgttgcatctggccaccacatggaccgatgccgcgcgccaggccacggcctatcgcagcggccgcgtgctgttggccggtgatgccgcgcacatgcattcgccgttgggcgggcaggggctgaacctcggcatcggcgatgcgatgaacctggggtggaagctggccgcggtggtgcgaggtgatgtggcagagtcgctgttggacagctatcaggctgagcgccatccgatcggcgcccaggtgctcgactggtcacgtgcgcaggtggcgttgatgcggccaggccccgggtcgcgcgcgctggcggcggtcatcgccgacctggccgcgacccgcgacggtgccacctatctcgccgagcggctgtggggtgtggcaccgccaccggtgctcgacggcagccatccgcgggttggccgaagcgcaccggacgtccaactggctgatgaccgtcggatgggagagctgctgcgtgcagggcagggcgtgctgctggggctcgataccggcgattcgctcggtccgatcattgagcgctggcagcggtcggtcacctgcgtgatgtctacggcgcgcgacacgctgggactgggcgccgtgctggtccgccccgacggtatcgtcgcctgggcctgcgatgctggcggtgacacgtcggggctggagccttcgctggaacgctggttcggttcgctgcggtga

SEQ ID NO: 493939 - DNA, 645 bp, Stenotrophomonas maltophilia
atgatcccgccccggggccgccgcgagcagcgcaagaccgagacccgacagaccatttcggacgtcgccaccgaactgatcatccgccgcggcttcgaagccgtgtccatgtccgagattgccaatgcggcgggggtctcgcgcaagacggtcttcaattatttcgccagcaaggaagacctggtgttcgaccgcgatgaggaggcccggaccctgcttcgcgaaggcatggcggcgcgccgtggcatggccccgctggccgccttccaatcgctggtgcgggagctgctggacagcggccatccgctgttacggatcaactccggtgcagcggccttctgggcaaccgtggccgacagtccggtgctggtggcgcacgcgcgacggctgcaggcacagctggccgacgacctggcccagctgatggccgacgcggccggtcggcccgcgcaggacgcggaggcacgcctgggcgcagccatgctgctggcgtcgatggtggccgcctatgagagtggactggccagccagcagaggggcgaggatccgcgccaagcgatgctgcagctgatcgtgcgcggtggcaccggcgtgctggtgggcttggccggcaccccatataccgacccgggcctgcgtccatag

SEQ ID NO: 493940 - DNA, 2142 bp, Stenotrophomonas maltophilia
atgccgcttccaaccccgctcaagcacgccctctgcctggcgctgcccctttccctggctacgcctgcactggcctccgaggcctccgctgacaccctgaaggacctggacaaggtcgaagtccgcggccgcgcgcagaccctgtaccgtgccaacgatgcggccgtcggcacccgcaccgataccccgttggaactggtgccgcagtcgatccaggtcgtgccgcgcgagctgatcgacgaccaggccgcgcgccaggtcaccgatctgtaccgcagcatcagcggcatcagcttcttcagctatgccggcgtcaccctgcgcgggttccgccaggagaacgttctctacgacggcctgcgtggtgatccctatgcgggcttctcggtgccgcaactgttcaatatcgaacgcgtggaagtactgaaaggtccggccggtgcgatgtacggcggtggtgatgcgggcggtgtcatcaactatgtaacgcgcaagcccaaggcgcgcgccgaacgccgcatcgagctgcaggcaggcgacaaggacttccgcgccggatcgatcgaaggcaccggccccttgaatgccagcggcagcattcgctatcgcgccggcctgtatgccgacagcgagcagggcgtgcgctggaatgccgacagcgaaagcgtgatcggcgatgcctcgctggccttcgatgtcggccagaccggcgaactggtgctgcagttcaccgacatcacccagaacctgggcggcaaccgcctgcgcggcgtgccggtgaacgatgccggcagcttcctgaccgaccgccgctggaaccacaacgaggccagtgacttcctcgacatgcgcgccaaggtcgcactggcgcagtatcgcttcgcaccgcgcgacaacctggacgtggaccttgctgcgcgctggttcagcaacaacgagcaccagatgtaccacgagccgatggggctgattgatcgtgaccgcgacggcgtggccgagtggatgacgcgccagctgcgcaaccagatccgtgacaacactgccttcaccgccagcggcaatgccgtatggcggatcaacaccggccgtatcgaacacaaggtgctgttcggcgccgacgtgtaccagctcgacgccgacttcaccgcgcagaccgccaacagcgccgacctggcacgcggcgccggcccggtgcggggcattgacctgttcaacccggtctatggcgcgagcacctggcatgactacaacctggccgctctgccctggcgcagcaccgccacccgcagcaagcgctacggcggatatctgcaggatgagctggcactgggcgcgcgctggcatgtgctggccgggctgcgctgggatggcttcaaggatcaggaccgcatgggtggcggcagcgtggatggcaacgatctcagctggcgcctgggcagtacctttaccgtccgggacggcgtgaacctgtacgccaacatcgccagcggcttcgtgccgcagagtgccaccaaccagaacccggcggccggcggaccgttcgacgcggagcgcagcaggcaatgggaagtcggtctgaagtccctgctggccgaccgtgtgaccctgaacatggcggcctaccgcatcgaccgcagcaacatcgtgcaggccaccggcgaggtgatcggcggggtaaaccaactcgctgcactgggcctggtacgcagcacgggcatggaactggacctgctggccgacgtgaccgagcgctgggtggtgaacctgacctacgcctacaacgacgcacgggtgaaggatgccggaccgaacggcatcaccaatgcctccggcgaccgcttcgccaatgcgccacgcaacaagctcggcgtgtggacgcgctacgacctgccgtcgatcaactcggccatcggcttcggcgccgaccatgtgggcgagcgtgtcagcctggatgggcaggcggtcaaggcatacacggtattcgacatgagctggaagaccacgtggaagcagtggcagttccaggccaacgtcaagaacctgttcgacaaggtgtacgcggccagcggcttcatcgagcgcaacgggcatttcccgggcgagccgcggcgggtgtatgtgcaggcggcttacagcttctga

SEQ ID NO: 493941 - DNA, 567 bp, Stenotrophomonas maltophilia
atgaagaagttcctgttcgcggcgatcatcgccgtgtcgctggcgggttgtaccaccaatccgccgctcaatttctcggtcccgaacgtcggggtcagcagcaagaagattgatggcgaactgaagtcgctgacggtcacgctggcacgtccggatgaggccaagggcaagattcccgcgcaggcccagcacgaagtgccgcagatgtggcagaacgcgctgaccgaagcgctcaataagatggcggtgttccgcgacgatgcaccggtgaagttgagcctgtcggtgaagattctggcgatcgacattcccagcttcggtgcatcaatgaccaccaagacgatcgcccgctacgagctgatcgatcgtgcaaccggcagcatcgtctacacccaggatgtcagcgcatccggcgaagttccgttcaactatgccttcgcaggggtaatccgtgcccgcgagtcgatcagccgctcagcacagaacaacatcgcccagttcctgcaggcgctggaaaccgtggacattaccaagccgatgttcccgaacaagcaggaagcgccatga

SEQ ID NO: 493942 - DNA, 471 bp, Stenotrophomonas maltophilia
atgaagcgcctgctggtggctgcatccgttgctgcgatgctgacggcctgcgcgccaaatgtgcgtacggacagttattccatcggttcagtgggacaggtcaatcgaactgtcggcggtacggtcatcagcgtccgcgcggtcagtattgacggttcacagggcggtggtgccgttgccggcgctgcggctggcggtggggccggctccaccatcggtggcagcgaccagggggcggccatcggtgccattggcggcctcgtggtcggagctattgccggtgcagcctccgaacgcgcactctcgcaggccaagggcctggaatatgttgtgcagacggagaacggcaacctgatgacggttgtgcagggccccgatccggtgttcaccaccggcatgcgggtcctggtgctgtatggatcgccctcgcgcatcattgccgatccgcgacaagcgaagacagcgccgtaa

SEQ ID NO: 493943 - DNA, 282 bp, Stenotrophomonas maltophilia
atgaagttgttcgtcccgctgttgctggttgccgccttgagtggctgcaccactgccaaaatgaccgtcacccccgatggccgccgtggtgtttccatcgactgcagcggttccagttcctggagtggctgctacgaaaaggccgggcagatgtgcccaggcggctatgtggtcttcagcaaggatggcgatgaaggaaatgccatcgcggtgggcaacaggaacggcttcacctctacccagatggccacccgctcgatgctggtgtcctgctcgcactga

SEQ ID NO: 493944 - DNA, 675 bp, Stenotrophomonas maltophilia
atgcacatcctgctgatcgaagacgaagccgaactggctgccaccctgaagtctgccctgcagcgggagcgctacgtcgtggacctggccagcaccctggcactggcccgccaagcagcactttccggatcacacgacctggtgctgctggaccgcaccctgcccgatggtgacgggctggggctcattcccgtgctgcgcgggcgcaatccgggggtgccgatcatcgtgctcagcgcactgggacagttgccggaccgcatcgccggcctggatgagggcgccgacgactacctggccaagcccttcgcgctggaagaactgttcgcgcggatccgcgcggccgggcgccggccgagcggcatgcaggtggagccggtgagcatcggccggctgctgttcgaccccacctcgggcgaagccagcgtgggcggacagcgactggagcttccgcgccgcgagatccgcgtgctggcggccctcgcccgccggctgggccgcaccgtgcttcgcgaatccatcgagatggcggtgtacggcttcgacgacggcatccattccaacacgctggactcgcatgtctcacgcctgcggcgcaagctggccgacgcggatgcgggggtggaaatccatgccatccgcggtgtcggctatctgatgcgggaaacgaagtaa

SEQ ID NO: 493945 - DNA, 1350 bp, Stenotrophomonas maltophilia
atggcgcttcgtccctcactgaagcgcccgctgatcgtcaaaaccctgatctaccagctgctcgcactgctggtggccttcttcgcattgctgatggtgctggtgcgtgtcgacagcggcggctactacaccatccagaccttcgccccggtggcggcagaggccgttcgtcgggacagcaagggcgagctgtatgtggaacgcacgccggcgctggacgagctgctgaagatcgtccccggcgcgtggttcatcgccgaggatgagcagggccaacatgtgacattcggccacgttccgcccgcctacgcctcgctggtcggcgccctcgacggcattccctatggcgacctgcgcggacgcggccgcaacgacggcctggccgtggtgatacgccagcacagcggtccggccggcaagctgaccatcatggcccatggcgaaaccgattcgctgacctggcagatggcgctggccgcacacatcatcaccctgccgatcttcctgctgctgggcctggccaccatcatcctgaccccgatcatcgtgcgccgcgccctggctggcgtggagcgcatcgcgcaggaagcccgcaacatctctgccagccgtcgcggcatccgtctgacagagaccgccgtaccggtagagatcgcccccctcgtgaccgcggtgaacgaagcgctggaccgactggacgaagggcacgaacggcagcgccgcttcatcgccgccgccgcccatgagctgcgtacaccgatcgccatcctgcgggtgaagatcgatgccaccgacgattccacctcacgcagcctggcggtggaagtcgctcggctggcaacgcttgccgagcagctcctggacctgcaccgcatggaagccgatggaccgaaggactccctcaacctggcccgcgtggccaagcgggtcgtcgccgatctggcccccctgctgatccagtccgacaagacggtcgccgtggcagtggaaccgaacttcccggtgctgggcgagtccggtgccatcgaacgggtgctctccaacctggtactgaatgccgccgagcacggtggacgtcatatcatcgtgcgcgtgcagggcagctgccttgaggtggaagacgatggacccggcattccggtcgaccagcgcgaacgcgtgttcgagcccttccaacgcctgcggccccggcagacaggcgccggattgggattgaacctggtgcggcaggtgatcgaccgccacggcggccacgtcacgattctggatgcgcccggtggtggcgccctgatccgcgtcgagttccccgtgcatccaggcgtcaccagcgcattggcgccggagtactga

SEQ ID NO: 493946 - DNA, 450 bp, Stenotrophomonas maltophilia
atgattcccgaacgcgagcgggccggcgtgctgatccgcctgttcgccgcgctgttcctgctgctccccggccttgcgctggtggcttccgcgtatcggcacgcgcatgcaacggccactgccgtgctggtgttcgtcgccgtgcatgccgcactgcacatgctggtcgtgtggcgaggggctgcactgcgcccggctcccccgctgctgcgggccctggatacgcatgcagccaccgtgatgcttgctgccacgttgatgatcatcgcgatcatcgccgccaccgcaacgctgccgattgcggtctgcgccgtgctgctggtcggcgcattgtgccacctttcgaccttgcccacgccggcgcaacgcctccgccacgtgctgttggcgctcggtagcatgatccagttcatcgcgatggcactgctcacgcagggcattgcccactga

SEQ ID NO: 493947 - DNA, 1191 bp, Stenotrophomonas maltophilia
atgagcgccacaccgcgcagccgccgccgtgtgctgatcattgctgccgcactcctctgcacaacgttggcactcttcgcttggctccggcccgtaccaccaccgaagctgcaggtggcaccggtaacccggggcaacattgaacaggtcgttgaagccaccggaacactgaagccctcgcggctggtgagcgtgggcgcgcaggtatccggccgcatcgaggccctgcatgtgaagctgggcgacaaggtgaaggccggcgatccgattgccgatatcgattcgcgcacccagcgcaacgcattgctgagtgcgcaggcagcacagcgcaccgcgcgcgccaaccgcgatgcgctggccaccgacctgcgccagttcgagctgacattgcatcgacagcagcagctggtgacctcgcagttggtggcacgcgccgacgtcgatgcggccaaggccaaggtcgatgccacccgggaacagatcgccgcgctggagggtgagatcgtgcagcggcagaccgacgtggatatcgcacagaccaacctcgagtacacccgtatcaccgcccccaccgacggcaccgtgctggccgtggtggcgcgccaggggcagaccgtgaacgcggtacagagcgcaccgaccatcgtgatgctgggcaaccaggacgtgatgacggtctacgcggaaatctccgaggcggatgttgtgcacacgtccgttggtcaggaagcgtacttcaccattcttggcgacgcgggacgtcgctacaggagcacgctgcgcgacatcgccccggctccggaatcgatcacccaggaagacgcctccgcccttgcttcacccgcgaccggcggtggcagccgcaccgccatgtactacaacgggcagttcgacgtcgccaacgccgatggccgcctgcgcagctacatgaccgcgcaggtgcgcatcgtgctgggtcgcgccgacaacgtactgacgctgccctccgctgcgctcggtgcacgcgcggccgatggcagctacagcgtacaggtgcgtggcgcggacgggcacgcccatgcgcgccgcatcaccatcgggctggacgaccagatccaggtggaggtacgcagcggcctgaaagagggcgaacaggtggtgctggcgcaggcccgggacgaagccgctaccgcacacgcgccgtcgaaatga

SEQ ID NO: 493948 - DNA, 1965 bp, Stenotrophomonas maltophilia
atgagcacatccaccaccgcccctttgctgcgcgtacgcggcatccgccgcgagttcgcggccggcgaacagaccctggtcgtgctcgatggcgtggacctggacatccacgcaggcgaactggtggccatcgtgggccagtccggctcgggcaagtccacgttgatgaacatcctcggctgcctcgatcgcccttccgccggtgcataccagatcgccggacgcgaaaccgctcagatgtcgcccgatgaactggccgaactacgccgcgagcacttcggcttcatcttccagcgctatcacctgctgaccgacctgaccgcattgggcaatgtagaagtgccagcgatctatgccggcatggcgggggccacccgccgcgcccgcgcggccgagctgttggcgcggctgggcctgagcgaacgtatgcagcatctgcctggcgagctgtcaggtggccagcagcagcgtgtttcgattgcgcgcgcactgatgaacggcggcgcggtgatcttcgccgatgagccgacgggtgcactggacacccactccggcagggaggtgatgaagatcctgggcgagctgcatgccgagggccacaccgtggtgctggtgacgcacgacatggccatggccgaacatgctcatcgcatcatcgagatccgcgatggccggattgtcgatgatcgcgccacgggcaaggtctctgccgcggatgggtcagcggcggccccgccgcagcgcggcggtggcagcggctggcaggcggtgcgtgaccgctttacggaggcgttacgcatggccctgcgcgcaatgaacgcgcaccgcatgcgcaccttcctgaccatgctcggcatcatcatcggcattgcgtcggtcgtctccgtggtcgcgctgggtaccggcgcgcgccaggccatcctgtccaacatttcctcgctgggcaccaacaccatcgagatctatcccgggtccggcttcggcgacctgcactcggcgcgggtggaaacgctcacccccggcgacagcgtggccctggccgggcagccgttcgtggacagcgctacacccggcgtggccaccaccggcaccgcgctgcgcggcaaccgctcggccagcgtgcaggtgcagggcgtcagcgagcagtacttccgcgtgcatggcctgaagctgggcgaaggtgccttcttcggcccggccgccgtggccggctaccagcaggtagtggtgatcgatgccaatacccgcgcccgcttcttcgctgcggtggacaatcccatcggccagaccctgctgctgggcaacgtgccggtgcgcgtggtgggcgtggtgaagaaggacgccggcgcggtcggcgatgcctcgctgctgcgggtgtggctgccctacaccaccaccatggcgcgcatgctcgggcagagccacgtttccagcatcaccgtgcgtgtctccgatgccatcagcatggaggcggccgagcgcgccatcggacgattgctggcacgccgccatggcagcaccgatttctacatgagcaacaacgcgcagatccgccagtccatcgaacagaccaccggcatcctgaccatgatgatcagctccatcgccgccatcgcgctggtagtgggcggaatcggagtgatgaacatcatgctggtgtcggtgaccgagcgaacacgcgagatcggcgtgcgcatggcggtgggcgcgcggcgcagcgacatcctgcaacagttcctgatcgaatcggtcctggtctgcctgctcggtggcgtgctcggcatcggcgtggccctggcattgggggcagggttggcgctggccaacgtgggtttcagcctggtgttctccgccaattcgatcctggccgccttcgcctgttccagcctgatcggtattggcttcggcttcctgccagcacgccgcgccgcgcagctggacccggtcgaagcactggttcgatag

SEQ ID NO: 493949 - DNA, 399 bp, Stenotrophomonas maltophilia
atgtctctgaaaccaggaagaaccgcactgctgctggcagcggctgcacaactgatgctgctgttgccctactccggcgacgcccatgcgcaacgcggtaaccgctacaacccgcagtgggaccaggactaccgtgaccgcgatcgtgatgcatgggagcgtcgtgaacgcgagcgtgagcgtgaccgggaacgtgagcgccgccacgatgccaagaccaccggtgtggtggtgggcgtggtgggcgcagccgtcgtggccggtgtgattgccgcagccgccaagcgcgaacgcgagacccgcgaacgcgccgactactgcattcgccgctacggcaattatgaccgccgcaacgatacctatcgcggcgccgacggctacacctatccctgccgctga

SEQ ID NO: 493950 - DNA, 378 bp, Stenotrophomonas maltophilia
atgaagaagaccgctctgttgatcgcattgtgcgccgctccgctggcctcccaggccgcgccggctgacccgaagcaggcctacatcgattccacgttcacagcgatggacaccaacaaggatgggcgtgtcgacaaggccgaatacaccagattccagcaggggcgcttcagcaagcaggccgattcgatcgacgccgcgttcagtgccatggacacgaacaaggatggcaggatcagcaaggatgaagccacgttggtgccggagattgcgaagtactttgcgggcctggacaccgatggtgatggctatctgtcgctgaaggagatgcagcaggccatggtggccgcgcagacggcagacgccccggcgaggtag

SEQ ID NO: 493951 - DNA, 1323 bp, Stenotrophomonas maltophilia
atgagcggcctgacccagaaggacatcagaatcctcatcgattatgcagatgccggtaatcgtgagctgtactggaactacctgtcgcaactgccgggttcggacggctacggtacgctggcgctaggtgtggtacgtaatgacagtttgcctggacgcgtggccaatgcctacgcgcaaagccatgccagatctcagaatgacgaaggttcgcgctttccaaatgccgagctgagcgagcgccagtgggaagcattcgggcggacactgctgcgggaagatctggagcttcgacaggcgtggatgggaaacggacgtgcggatctcgcgctgaatctgcctggcgctgacgtcatgctggctcatgaccgcgctttcgagcagcacagactggaccccaattgctggactcctcgagtgctcctgcaagccgcctcggacaagagcggccccgcgaagctggagcagatctggaccaacatgctcaacaacgactacgccggcggcccgcgcgtaggcaacaccagtgtcgatgccatcagccagatgggatggacgaaaggcggccagtacttgacccggttgagcgtgctggaagctacccaggcattggaaggacgctcggcggtcgatccgaacgtcatcggtggcaacagctactacgcgatgtacttcgaagcggacaggaagtgggccagtgtcagcgcgggtggcggccatatgtcgatgcgggagatcactgaccccgcccgcatcgctgaactcaacgacgcgcgggacgttcgtctggaacggcaggaaaaacgtacccagttccacccggacgacccgtaccggaccatcacccgcagcccgctgaccgcagccgtggacgacgtgccggatcccgcgcaggtagcgacccgtctggccgacattggacccggccaccgtgagtacgcattgatgcagcaggtgcgcgaaggcgtggccgcgatcgatgccggcgccgggcgtacccacgacgagaacagcgagcgcctggtggcgagcgtgatggccttggcgcgccacaaccagctcgaacgcgccgaccatgtgctgctgagcgcgcagactgccgatcacccggccggccgcaacgtgttcgtggtgcagggcgagttgaatgatccggcgcatctgcgggcctccatgcccacggaccgggcggtgcagacgccggtcgagcagtcactgcaggccctgcaggcagtcggtgcggatcgtgaacaggcacacgcgcagcgccagcaggaggtcgatgcgcaggcgcgcgacatcccggcgatacggatgggctag

SEQ ID NO: 493952 - DNA, 756 bp, Stenotrophomonas maltophilia
atgtccggcgcaccccagaccggccgcacgatcaacggccacacctataccgatgcgcccgtggacgtgaagctcgggccgaacactttccgcattccggccaactacctggacagccagatcgcaccgtggcccggcgagggcgtgacgctggtcatcgagtggccggacatgaagccgacgccgccgggtgcccgggccaatccgcgtacgaatgatttccggaaggagattgctgttcgtatcaactacatcgatcgcattccaattgagacttcgctttcaaggctttcctcaaatgaagccatcacggaggagggttctgtggaaagggaggatcccagggaccgtctcgatcaacgcgttgcacagccggagaccttgggcctgacgccctatgcaatcgatgaagcgaagatggtgttgtacgcgaagaagtacgaggcccggtatgggaagccgcctgtccgcaatccggcattcgagcgcgactggtatgttgcacgggacggtgctgggggactgacaagcttcatcaagtgcgatagcgcaacgttcctgggggacggagtgcgcctgacgcaggatgaggtcattgatctggacgatcctgtggctgccggatgcgttcactactttgtcgatatctctgacagcctatccatctccctgcattacaagagagctttcttgaaagactggaaacgcatggaagatgctgttcgcgatgttcttgctgcagcacggacgcgctaa

SEQ ID NO: 493953 - DNA, 408 bp, Stenotrophomonas maltophilia
atgcccgaacgtcttcccgaccatccccgcctgcacgcgctgctgggtgccgctgtacttgatcttcccgctgccttggccgaaacgctggaggacgcgctccgcgaatcagccgagttcgtcaccccatcggcattctttgcacaactgaaaggccacggcaggaacctgcgcgctgatggcgaggcctggagtgaaatgtgcctgagccccggccgcgccttcgacatggccctggcgacccgcagcgtttcgggcatcacggcgttgaccgcggtgctgcatgccacgcatgtggcacgggagaacgacgatcctgcctgctgtccctccgccgccgtggtcgaaggtctgttcaacgcctgccaggcgctgtcgctgcaggtggaacgctgcctggtgccgtga

SEQ ID NO: 493954 - DNA, 456 bp, Stenotrophomonas maltophilia
atggaattcacttcctggcgcaacattcttgttgccgctggcgtggcggtcgcactttccgtggccgcctacaacgaccatcaccgtcatgccctcactgacggtgccgaagggcgcgatgcagtgggcctcgtcaccgaggtgcattgggatgagaaaaggggcagaaagagcaacttcgtcctgaatgtcgagttcgaaaccgaagacggccaatcacgcgtcgagaagatcgcggtctccaacgaccttggcaatcggatgcgtgccaccgacgaggcggaagagattgatatccgctacaacgccgaggatccatcggtggctgtggctgtggccgcgggcgaagcggacaactccctgctgttgttgtggctggcaatcgcctccgcgctggtcaccctggcactgctggccacccgggtggtgcagggccggaaagcgcagccggcctga

SEQ ID NO: 493955 - DNA, 354 bp, Stenotrophomonas maltophilia
atgcgtagcaagcgttgggatggcaagagcggttgcgcggtggaagtcacgctgtcggtgatcggcggcgtgtggaagccgatcattttgtttcacctgatgaccggcaagcggcgtttcatggaattgacgcgacgggtgcccaatgccacccagtccatgctcaccagccagctgcgtgaactggaagccgatggcgtggtgatccgccacgtgtacccggaagtgccgccgaaagtggaatacgagctgtccgagttcgggcgcacgctggtaccggtgctgctggccatgcgcgagtggggcgagacctatcgcggccatggaagcacggaaggcgattgccagagttga

SEQ ID NO: 493956 - DNA, 990 bp, Stenotrophomonas maltophilia
atgagtttcaaggcactgctgacccgcaagacgaacgacggcgtatccacggaactggtcgatttcaatgaagccgacctggtggacggcgacctcctggtacaggtcgagtactccacgctcaactacaaggatgcgcttgccctcaccggcaagagtccggtcatccggacgttcccgctcattcccggcatcgatctggcaggcgtggtgctggaatccagcacgcccgacttcaagccaggcgaccgcgttgtgctcaatggctgggacctgagcatgggccaccacggcggcctggcacagcgcgcccgcgtacgcggcgaatggctcaaccggattcccggcaacctgagcacccgcgacgccatggccatcggcaccgctggctatactgcgatgctgtgcgtgctcgccctggaacatgccggcgtgacgcccgagaagggcgatgtgctggtgaccggcgccaacggtggcgtcggctcgatcgcggtggcgatcctgtcgaagctgggctatcgcgtggtggccgccaccggacgcccggagcatgctgagtatctgcacaacctgggtgcggccgagatcatcgatcgtgcgcagctttcggagccgcgcgagcggccggtgagtgccgagcgatgggccggtgtggtggatgtggccggcggcccaacgctggtcaatgccatcgccgaaacgaagtaccgcggtgccgtggccgcctgtggcctggcccagagcgatgcactgcacggctcggtgctgcccttcatcctgcgcaacgtgacccttgcgggtgtggattcggtgaatgccccacaagaggttcgccagcgcgcctgggatcggctcgcgaccgacctggacccgcagaagctggaaagcaccgtgcagcagatcggcctcgccgaggtgctggatgtccatgagcagatcatccccggcaaggtgcgtggccgcattgtcgtggatgtgaacgcctga

SEQ ID NO: 493957 - DNA, 2754 bp, Stenotrophomonas maltophilia
atggaatggcgcccctcgggctggggccagcgtgtgacccgctcgccggactggcagttgcggctggatggcgaacagctcgcgcttttgatcgacggcaggcaataccaccagcatgtggcgaacgaacacagcgtgcgggtcgttcgcggcgtgctctggtcccgggtcgaactgacgaccgagcgcggtgaagcactgtccgtggatgggctgcccaacagccagggctcccggcttgcggcggcgctgcagcaggtgcgctttgcgcgcaccacacggggacgcaaggccctgtttgacacgatcctggagcagatccaggcgtggctggccgaagcagacgcgcttaccgaccgaggcaccaccggacgccgctggatcacccacgaacagcagcaggcgttgctggccgaccgccccgccctgcccctgccgcccgccgagctggagcagctgttcctcgacgaggaggtgcacgacgacctgcacgcgcccggccaccgcatggcgctggacgccctgcacgactggcagctggattggcccgccgtctgggccgaggccaacgcgaccatggcagagcgcgagcgggtgctggccaaggacttcctggaccgggtcgagagcaagcccctgaccgaggaacaagcccgcgccgtcatctgcttcgacaaccgggtgcaggtcgtggccgcggccggctctggcaagacctccacaatggtcgccaaggccgcgtatgccatcgaccgcggctttgtcgaacccgaacggatcgtgatgctcgccttcaacaaggacgccgcccaggagctgaaggagcgcgcgcagcgatgcttcgaccggctcggcatgggcgacaccgtggtggaagcccggactttccacgccctgggcctgtccatcatcgccaaagccacagggcgcaagccggatatcccggaatgggcggtcgacgcgacgctgggcttcaacaagctggccgaactggtggacgacctgaaggaccactcgacccatttccgcacccagtgggacatgttccgcctggtgttcgggcgcgacctgccgccgttcggtgccgacatgatggccgatggttacgaccgcgatggcacgccctacatccgcaccctgaagggtgagcgggtgaagagcctggaggagtgcgtcatcgccgactggctgttctacaacggcgtggcgtacgactacgagcggcgctacgaattcgataccgcgacagacacccatcgccagtatcgcccggacttctactatccggacgcccagctgtatcacgagcactttgcgctggatgccgatggccagccgccgaagcactttgccaactacagcgaagggatgcactggaagcgccagcagcatgtggcgcgcggcaccgctctggtcgagacgacgtcgtttggcctgcgcagtggacaggccctgcagcatcttgccgagcggcttggcgcgtctgatgtcgagctcgacccgaacccggaccgcgagctgcctgatcaaggcgccaagccgatgccggacgcagacctgattggcctgatgcgcaccttcattgcccatgccaagagcaactgcctgacactggacgatatggcggcgcgcctgcggcagatgcccgaggatcagttcaaggaacgctaccggcgcttcctggagatcgccgggccggttttccgggcctgggacaacgcactggctgacgagcgcagcatcgatttcgaggacatgctcaacatggcggccgggctgctggaacagggccactatgaatcgccctacgaactggtgatggccgacgaattccaggacgcatcgcgcgcccgcgcgcgcctctgccgtgcgctggtcagccaaccgggccgccatctgtttgcggtgggcgatgactggcaatcgatcaatcgcttcgctggcgccgacgttgcggtgatgactggattccgcgaatggatgggccatggccaggtgctgaaactggagcagacgttccgctgcccacaggcactgtgtgatgtttccagccgcttcatcagccgcaaccccgcgcagatcgccaaaaacgttcgctctgctgcgccggcaatgcgcccggtgctgcaggcgttccagatgaaccggcgcgaggaggtgcaggatggcgttcgccagtaccttgcgaagctgcaccagcaactgttgtcaggtgcggtgccgcagggccgcaccgggcgcgtgacggtctttgttctggggcggtatcgcgcggatcgcggtgcgatgccttcggattggaagacggccttcggcagcacgatggacgtcgagttccttaccgcacatcgatcgaaggggcgcgaggcggactacgtgatcctgccgggcatgatcaaccgcagcttcccgagcctgcgcgcggatgacccggtgctttcgctggcaatgccggacggcgatacctatccgctgagcgaagaacggcgcctgttctatgtcgcgctgacgcgtgcgcgacggtcggtcgcgatgttcaccctgcagggcaagcactcgccattcctggatgagctggtgaaggacggggcagtggaagtaaccgcgatttcaggcgcggccatccacgatgagcgctgcccggtgtgcagggtgggcgtattcgtggaccggaatgggccacatggggctttccggtcgtgctcgagttacccgttgtgccacaacaagccaacaggtgggcgtcggggctga

SEQ ID NO: 493958 - DNA, 1173 bp, Stenotrophomonas maltophilia
atgctcacagcagtggcagtcaaaaacgcaggccctggcagacacagtgacggcggcaacctatatctgtacgtcaagaagaacagcggccgtaagacttgggtcttccgctaccgagaccggctcacggggaaagcgaaagacttgggtctaggctcggccagagatgtaagcctcgcgcaagcgaggcagcgcgcccagcagctccgaaccgacctcgcagcaggtatagaccccctccgcgccaagagagatgccttggcagcagcgcggcgtggcttggccagacaattgactttcggagagtgtgcacgacgctgcattgagactcatgagcacgaatggcgaaacgccaagcacaaggctcaatggacgtcgaccctcagtacatactgcgccggcattgaggacattccggtgtcggacattagtgtggagcacatccgcgacgtgctggagcgcatatggctcacaaagactgaaacggccaccagggtgagagcgcgcattgaacgagtgctggattgggcgaaagccaacaactttcgccaaggcgagaaccctgccgcgtggcgaggaaatctacggagcctgctcccctctcccgcaaaggttaaaaaggtcgtgcacagagctgcgttgaactacaacgaagtgccagctttgatgcgggagctggcaccaagggcggacttctctgcatcctgcttgcggctccagattcttacagcaacccgaccaggcgaggcatcagcggcccgatgggccgaattcaatctggacaaccgaacttggttgattccgggggcacgcacgaaaactggaagggaccacaccgtccccttgtcgacccaagcagttgctctactgacccaccttccgacgtccggggacaatttcctgtttcctggaaagccaggcaagcccatcacgactgcggcgcccttgaaacttctgaagtcgctacggccggggcagacttgtcatggattccgaagctccttccgagactgggctgcggaggtctcccatcacagccgagaggccgcagagctagcgctcggccatgtcgtcaaatccaagaccgaggcggcctatttccgctcggaaatgctcaagaagcgaatcccactgatgcaagactgggcggactactgccacgccgagccgtag

SEQ ID NO: 493959 - DNA, 834 bp, Stenotrophomonas maltophilia
atgctgacccggctcgccatagtggcttcccttgcaattgttccactgccctcggtggcacaagggcttcttaccgttaccggtcagtgggagtaccgcgacgcatcccgaatggaaacggacgaaggactcaacgtctgctttcagttggatgccgcctcagtggcacggaatccgcagttgcagcaattgggaggtgccttgtgcctttcgaacccctcggacgcggccaagcttcttggagtcgtaccgtccgggcagaagccaggatgcaagtacgtagcaaagggaacggcaagcgttgtactagccaatgtcaagttgcagcccgaagatgagatgtatgacgagcgcatagaagctcgcctcatgcaggtgcgggtgaatcgtgtgacatccccacttggcagtgactgtgaccgccgcagcacctcgcagggattcgcctctatcaacgaggccatcgctgcactaggaactcatccaggctatgtaggtgtgtcggcgtcagatttcgtgcgtatagatgccagcaatggctacgctgagcttgatgcgagcacgcagatgtggttgccgcgaggtgcctcaaacatgctggtgacgtactacgaaggcaattccggtttgcatgagctgggcgtctatcggtatgaagggggccggtggcacaacgcaagtagtgatgtgctgcctgggtacaccgagagcgccaagcacttcaaagggaccaacttctacttggatagcagcaacggaaggccggtactgagaagccttccggggagggaggcatggacttacgcaaatggtcgctttgcgcggcagaagtag

SEQ ID NO: 493960 - DNA, 999 bp, Stenotrophomonas maltophilia
atgggcgagactgtcaacacggcaaagatggcggagaagctctgcgatgaattgtttgccgagttcttgtggaaaaaggttggcccaaccaacgtcaactggagctgcgcaacacctgaagcgcacaatgtagaaacacacccatcagatgtcgtctacttctacgatgaaccctattctgtgcgccgcacgtatctacagtgcgacctgaagagctacgcaaagggaagcataacgtcgaccgctattagaggcgcgattgagagccttgcaaagcaggtatcgtgcgctgagaagagcgaagagtggaggaaatactacgcacatgaccacgtgacctacacggtcacaggcctcctcatcgtctacaaccatgatggggagtatgactctaatttcagcagcaatttagagcttgttaaatcaagcgaaatccagattcctttggactcgaagattgtcgtactcggcccgaaggaagttttctggctggacaacattcgctacgatattcggcagatgcgcggctccgcaggaaccgacaagcttcctgcagcagagcattgcaacttctatttccctcagcttgccagtcgagcaaacgttcagcctgatagcgccgttgccgcgaccctcgaaatgcttacttcaccgtgggtaatccttgaacacaaggcacccaaagaaggccccggcatggtcgtcttctataaaaggaagggagagaccaccgatgagttcatgtatctcttggactatctccgacagcacggggcgttcgatgacgaccgccggatacgcataaaatcattcgacgctgacaaagcaatcaacgccaacttccagaaagcttctcagcgctatgtggaggagatgaccaatggcgctgaagacagcaacgaactaggaagccgcatcacttccatagaattgtcaaacatccctcaagtcaaatcaacattttccaatgttgaaataggaatggaatatgaggcgtag

SEQ ID NO: 493961 - DNA, 1128 bp, Stenotrophomonas maltophilia
atgaggcgtaggattgaaattcttagcgcaacagaccgtgaaattcacgacctacttgtctccagcaagcagcgcattaccctacccgtattgcgcgagctagcaagagacaggggaatcttctactccgcgaatgagacaagagagcagattgctgataagctatcaatcctgccccatgactattttgatattgttgacataatcgaacgtcgacaaccatcaaatcgcggcgaaaagaccaccacgatgacgcttgacgtcgctgtgaccacggacgacctgaagactgtcctcggctcttacaaagacgagaagaacggctcagagtccgtcaagttcaatattgcgggcgccgatgctgcggttctggagattgactacgaagagtttgacttctccaagacgcgcttggcgcagcgccagccgaaagacgcgcgcattgaactaagaatctctgatggcaaactggctgtcagaatgcccgccaacgagaaggcacgccatgtaatcggacagctgcaggaaaagctgggccaaatcaagaagaaggatgtggaggcaactcagattgaggtaaccacgttatcgcctgaacttcgcacgagattcttcacgacactgatagcgaagctccctggatacacatacagaaccgtatcgaacgttcgagtatcaccaggagtcaaggcagatgaagatgaagagcttctacttgaagaggacgatgaaggagcgcagtctgaaattctgtcattcgtacgaagtgtcgcaatgtctggcgaaaacttggctgtctctcctgaatacaagagtctgctggatagcgggtacttcgtaacttctattacctggcatacagaacatcgctctccaccgtaccaccttatgcgctttgaagccggcttcgagaatggcgcagatggcactggcttccgttacgccgttaaatatgcaccacgcacgaaggccgggcactacgctaccagtttccgaacgctcgacaccctggaaagggaacagcacctccaggcattggaagtattcgctcgcgaaacactgaatgcacttgtgaaggaagctgccctttcgagcgcttcaccgaccgaggcgggagaggccccttag

SEQ ID NO: 493962 - DNA, 690 bp, Stenotrophomonas maltophilia
atgagcaaggtaaaatggctttcggcggatttggacgtatcggctcggcagctagcaagactactccaacaagcgcagttcactaaggattccgaggaaggatttgtagttgacagagcgcgacgaaactctattgaagcccgctatgttcaacgagtcaacgtaacggaggtcatagtcgacccattcggaaacgaagcagagttctcctccgttaagtattccgaacagcatttttttattgctgatgacctaccttgcatagagcttcgacagggagtccggcatttgcatgcctgtctggcactgctaagccaaactaccgactttagaatagccgtgaaacccgtgaaggtcgacgtcaatcattggcttgaggtcttcgcagcctccacaagcatgccgtttactgttgacgccttccaagttggaagcatcgcattttcggatggagcgagcgcgagagcgttggttaaggcaggaagaggcgacgcacagaccgcactgaagtccttgacgtcagccagaccgtacgtcatcgaaaaggtccgcgttaagcatcaacgcgttgaccatagagggactgtcgtgctcgcgtcatccggcacggcatccacaacaggcttctctatcgaagaagacactcacgtgctggaggccttacggaactcgttatcagtgtctatttga

SEQ ID NO: 493963 - DNA, 321 bp, Stenotrophomonas maltophilia
atggcaagacccggtgggaatccaaatctgaaggcagtccgcaacagcgacacggcagctgccacgcgacagttgcagctcaacgcagacaagcatgcaaagaccgtctatgaagcactgcttgctgcaatgaaggacggggcaatagacagtgccgacgatgggcacgacaaggcaagctggcgcgcgtggctgaatgccaacggcgtgcacacgctaagaaaacgcccctggacgaagaagtctttcaaccggatgcttgcacggttgaggcagcggaacttgctaggaggcagcgaaagcgcccccgactcagaatag

SEQ ID NO: 493964 - DNA, 1074 bp, Stenotrophomonas maltophilia
atggcccatctcgatctggccaacctgcgcacctgcctgctggacgacacccagctggccgctgtggccctgcaccgcaccttcgccgggcacctgccggtcagcagcgggcacgtggtggtctgcgatccgctggtccaggccgaggcgcctgcgctggccgactacaccgccccgctgggccggcatccggtcgagatcatcgtgcacagcggccgcccggcgttggccgtggtctggttcaagccacgcgaagctctcaccgcgaccgccctgcactggcagatggcgcgctggaccacgcaggacctgaccggcctggatgaggacagcttcatcggctacccggtcgacgccggcatcggttgtttcatggacaccgacacccagcaggcgctgctggccctgatcgaacaggccgatggcgacgaagagagtgaatggtcggatgcactgatcgaccacgatggcctggatgaaggcgccgagtaccgcccctggggcgaggactcgccgcacggcctggtggtgttcaccagcggctggggcgacggtgtctatcccagctactgggcgctggatacgtccggcattccggtcgccctggtcaccgatttcctgtgcatccagggcggcgatgggcgcgacgagcgcgagattgccgaccaggcctatcgcgacaacctgccagctgcggaagccgaggcgctggcgcggctggtggctgcagtagaacgagacgacgcggaggcattgcaaaccctgttggaggatgcgccgcagcgcgccaacctgatcgaaccgggctgtggcggcaccgccctgtacgaggcgatccgcctggatcgtccgcaggcattgcgggtgctgttgcagtgcggcgcattgccggcaatgcccgaacccctgcacatgagcatggtgaccagctatctggactatgcgcgattcctgaagaagccgcgcagcgcggagctgatggcggtgctggaagcgcccgtcgttgcagccggaccgccaccggccgcaccgcgacgccgtagtttctgggaccggctgttcggccggaactga

SEQ ID NO: 493965 - DNA, 993 bp, Stenotrophomonas maltophilia
atgcatgacctgaatgacctgtactacttcgcgatggtggtcgaccacggcggattcgccgccgccgagcgcgctttgggcatccccaagtcgcgactgagccgccgcatcagccagctggaaaccgacctgggcgtgcgcctgctgcagcgctccacgcgccgtttcgcggtcaccgatgtcggcaccagcgtgcaccgacatgcgcagacgatgctggccgaagcgcaggccgcacgcgaagtagtggaccgcctcagcgcggaaccgcgcggcgtggtgcgcgccagcgtgccggtgtcactggcgcagatgcagctgcccaagctgctgcccaagttccttgagcagtatccgaaggtgcggttgcagctgaacatcagcaaccgccgcgtggacatcatcaacgaaggctacgacgtggccctgcgcgtgcgttcgcgcctggacgacgacggcagcctggtgatgcgcagcttcggccaggtgcaggaactgctggtggccagcccgaagtacctggaccgcgccggtcgccccaaggacccggaagagctgacccagcacgtgaccctcagcatcagcgaagacgaagcccgccagcgctgggaactgcatggcccggaaggcgaagtgcgccgggtcgacctgcagccgcgcgtggccggctttgacttcccgctgctgcagagcatggtgaaggacggttttggcatcaccatgctgccggaaaccgtgtgcgccgacgccgtgcgtaatggcgagctggaagtggtactgccggactggtcgctgccgcagggcgtgtgccacgccgtgttcgcctcgcgccgcggcctgctgccggcggtgcgcgtgttcatcgacttcctggccgagcacctgccgccgcagctggaggcctcgcgcctggattgcggtggcgcctgtgaaaaggccaaggagcggatcaaggccagtgcactgggtgcgctggcggtggatgccggctga

SEQ ID NO: 493966 - DNA, 588 bp, Stenotrophomonas maltophilia
atgaagcttctgcatctcgacgccagcgtgcttggcgacaactccgtctcgcgccagctgtcggccgccgtggtcgcccgcctcgccagccagatcgatggcctgcaggtcgattatcgcgatcttgacgccaatccggtaccgcacctgcgcagcagctcgctggccaagaccgacgccgctgaagcgaccgatgctgaacaggtgatgcagcagttcctggaggccgacatcgtggtgatcggcgcgccgatgtacaacttcagcatcccgtccacgctgaaggcctggatcgaccgcgtggccgtggccggccgcaccttcaagtacaccgagaacggcccggtgggcctggccggtggcaagcgggtgatcattgccagcagccgcggcggcatctacaccgactcgccggccgacttccaggagccgttcctgcgccaggtgttcgccttcatgggcatcaacgaagtcgagttcgtgcgcgccgagggcatcgcctactcgccgcagcaccgtgaagacgccatcgccggtgcgctggcggcgctgccgtcgcacgacgtggccgaagccgtcgcggcgtaa

SEQ ID NO: 493967 - DNA, 363 bp, Stenotrophomonas maltophilia
atgaactacatcgtgacggctgcgcaccgcagcgaatttccgcacccgatcatcctgcgccgcggccaggcgctggtggtgggcgaacgttatgaaggcccggagggctgggacgactggttcctctgcgaggccgaggggcagcagcccggattcgtgccggcgccggtgatcggccgcgatgcgcagggtggcgcgtttgccacgcaggattactgcgcgcgcgaactggatgtggaccccgggcagacgctgcgcgggatgcgcacgctcaatggctgggcatggtgcgtgccggagaacggcgaaccgggatgggtgccgctggagaagctgcgggccataaaggagagccgagcatag

SEQ ID NO: 493968 - DNA, 1281 bp, Stenotrophomonas maltophilia
atgcttgatccagccctgctccgccaccagcccgccgacctcgccgaacgcctgcgcaccagccgcggcttcgagctcgacgtgtctgccctggagtccctggaggcggatcgcaagcgcatccaggtgcggacccaggagctgcagagcctgcgcaacagccgttccaaggccatcggccaggccaaggccaagggcgaggacgtctcggccatcatggccgaggtcgctgccttcgccgacgagctgaaggcttcggaagtggcgctggacgagctgcgcgagaagatcgaagcgatctcgatgggcattccgaacctgccggccgacgacgtgccggccggtgccgacgagaacgacaacgtcgagcaggcgcgctggggtaccccgcgccagttcgatttcaaggtgctcgaccacgtcgaactgggcgcccgcaacggctggctggacggcgagaccgcggccaagctgtccggttcgcgcttcaccgtgctgcgtggcccgatcgcgcgcctgcaccgcgccctggcccagttcatggtcgacctgcacaccggcgagcacggctacgaggagaccaacgtgccgctgctggtcaacgccgactcgctgcgcggcaccagccagctgccgaagttcgaagacgacctgttcaagaccgccgtgggcgactccacgcgttacctgatcccgacctcggaagtgccgctgaccaacatcgtgcgcgatgagatcgtcgacgccgagcgcctgccgctgcgcatgaccgcccactcgatgtgcttccgtgccgaggccggcagtggtggccgcgacgtgcgcggcatgatccgtcagcatcagttcgagaaggtcgagctggtctcgatcagccgcccggaagacagcgacgccgaacaccagcgcatgacccgctgcgccgaagtggtgctggaaaagctgggcctgccctaccgcaaggtgctgctgtgcaccggcgacatgggcttctcggcggtgaagacctatgacctggaagtctggctgccgtcgcaggagacctaccgtgagatctcctcgtgctcgaactgtggtgacttccaggcccgccgcatgcaggcgcgctggcgcaacccggccaccggcaagccggagctggcgcacacgctgaacggctcgggtgtggccgttggccgcgcgatgatcgcggtgatggagaactaccagaacgccgacggcagcatcaccgtgccggaggccctgcgcccgtacatgggtggcctggaaaccattggctga

SEQ ID NO: 493969 - DNA, 636 bp, Stenotrophomonas maltophilia
atgtctgcaccccgctcgtcgtccgccaagtcgttcactgtgcatatcccgcgcaacgccctgaagatcgccggcatcgccttcggcgtgggcgtgctgttgttcgtgctggtctggttgaccggccgcgacaaggaattcttccgtgccgatccggccgcgcagacaccgcaggagaccgcgcaggtggaaccgctgccggaaccgctggccgccgccgcaggctccagtgacatgcccgatgccaagccggccccggtagaggacgccccgaagctggtcgaaaccgcaccgccgccgccggcgcccatcgctgaaccggccccggccacgccgacccctgcgccagccgccaccggcaacagccagccgatgccgattgccggccagtcgccgccgccggcctacccggccgcggccctgcgcgcgggcgagaccggcagcgtggtggtgcgcgtggacgtggatgccaccggctacccgaacaatgccacggtcatccagcgcagcggctcacgcgagctcgaccgtgccgccaccgacgccgtgcgccgctggcgcttcaccccggcgcagagcaacggccaggccgtaccgggcagcattgaagtgccgttcgacttcaagacccagtaa

SEQ ID NO: 493970 - DNA, 573 bp, Stenotrophomonas maltophilia
atgaccgccaccacccacgaagaccttcattcgccgcagctgcagcaggacgccagcgaacagcacaagcccacgtcgccctggatgtggatcgcgctgatcgtggcgatgtttgccgccgcgctgctctggctgcgtcactcgaatcaggaagacgtggcgccggcaccggtcggcgagcgcatgctgcccgcccccgagcaggcgccggtggccgacgcgcaggagccggcggcccgccaggccgcaccggtcggcaaccagcgcaaagccgcccctgcggtacgcaatcgcgaggcgcgcccgctggcaggcaacatcaagccgacctaccccgccgccgcgctgcgtaatggcgtacagggcagcgtgatcgccagcctgaatgtcgatagccgcggccaggtgaccaatgccgcgattgtttcgcgcagcggcgaacgcagccgtgacctggatcgcgcggtgctgagcgccgtgcagaactggaagttccagccggcgatgcatgaaggtcgtgcagtggccagtgtggtgcgggtcccggtggatttccgtaccgaacagcgttga

SEQ ID NO: 493971 - DNA, 1308 bp, Stenotrophomonas maltophilia
atgagcaacgcgcaacactggatcgcccgcaagggccagccgctgcagggcagcctgaccattcccggcgacaagtcggtctcgcaccgctcggtgatgttcgccgcgctggccgatggcacttcgcatatcgaaggcttcctggaaggcgaggacacccgcgccaccgcgcgcatcttcagccagctgggtgtgcgcatcgaaacccccagcccgtcgcagcgcatcgtgcatggcgtcggtatcgacggcctgaaagcaccggaggcaccgctggactgcggcaatgccggcaccggcatgcgcctgctggccggcctgctggcgggccaggcgttcgactgcacgctgatcggcgatgagtcgctgtccggccgcccgatgcgccgtgtcaccggcccgctgtcgcagatgggcgcaaggatcgatacccaggacgacggcacgccgccgctgcacgtgcatggcggccagacgctgcatggcatcgacttcgcctcgccggtggccagcgcacagatcaagtcggccgtgctgctggccggcctgtacgcgcagggcgaaacccgcgtggtggaaccccacccgacccgcgactacaccgaacgcatgctgtccgcgttcggcgtggacatcgaattctcgccgggcaaggcgcgcctgcggggcggccagcgcctgcgcgccacggacatcgtagtgccggccgatttttcctcggcggcgttctacctggtcgccgccagcatcattcccggctccgagctgcgcctgaagcaggtcggcctgaacccgcgtcgcaccggcctgctgcacgcgctgcgcctgatgggggcggatatcaccgaagagaatccggccgagcagggcggtgagccggtggccgatctggtggtgcgctacgctccgctgaagggcgcgcgtattcccgaagcactggtgccggacatgatcgacgagttcccggcgctgttcgtggccgccgccgccgccgaaggccagaccgtggtgagcggtgctgccgaactgcgggtgaaggaatccgatcgtcttgcggcgatggccactggcctgcgcgcgctgggcatgcaggtgaacgagaccgaggatggcgccaccctgcatggcggggctcggctggggagtggcaccatcgaaagccacggcgaccatcgcatcgccatggcattcgccattgccggccagatcagcgacggcgaagtgcgcatcaacgacatcgccaacgtcgccacgtccttcccggacttcgatggcctggcgcgcagcgccggcttcaacctggcctga

SEQ ID NO: 493972 - DNA, 1200 bp, Stenotrophomonas maltophilia
atggcaagcagcaaatccagcaagaaggcgccgaagaaggccgaaccggccaaggacagcgcgcccagcaaggcgaagggcaaggccaaggccgcctcgaacccggcacccaccctggcaccgctggcgctggccgatgtgcgctcgaagatcgaccagatcgaccgtgacatccagagcctgatcgccgagcgcgcgcgcttcgcccaccaggtcggcaaggccaagggcaagctggccgccgctgtcgactactaccgccccgagcgcgaagcgcaggtgctgcgcatggtggtggaccgcaatgaaggcccgctcagcgacgagctgctggtgcatgtctatcgcgagatcatgtcggcctgcctggcccagcaggagccgctgaagatcggctacctcggcccggaaggcaccttcagccagcaggccgtgctcaagcacttcggccgctccgcgctgggcctgccgatggccagcatcgaggaagtgttccaggaagtggaagcgggcaacgccgatttcggcgtggtgccggtggagaattcgggacagggcaccatccagatcaccctggacatgttcctgacctccaacctgaagatctgtggcgaagtggaactgcgcgtgcagcagttcctgatgtcgcgcagcggccgcatcgaggacatcgagcgcatctacgcgcatccgcagtcgttcatgcagacctcggcgtggctgcgcgccaacctgccgaaggccgagaagattccggtgtcgagcaatgccgagggtgcgcgtcgcgcgcgcaacgccgacgacgcagcggccatcggcggcgagagtgccggccacgtgtacgggctgaagaaggtggtcaccaagccgatccagaatgatgccgacaacaccacccgcttcctggtggtgggccgcaacatcttcccgacctccggtcacgaccgcacctcggtgctggtgttcatccatgacaagcccggtgcgctgttcgatgtgctcagcccgttcgcccgccacggcatcagcatgaaccgcatcgagtcgcggccgtcgcaccacggcaagtgggaatacggcttcttcatcgacctggccggccacatcgacgacgcgccgatgcaggcggcgctggccgaactggaagcgcactcggcgcagatcaaggtgctgggctcctacccggtggccgtgccctga

SEQ ID NO: 493973 - DNA, 1086 bp, Stenotrophomonas maltophilia
atgacgcgcgcgttcaacttcagtgccggccctgcgaccttgccggaatcggtcctgcgccaggcgcaggcggaaatgctggactggcacggtagtggtgcctcgatcgtggaaatgagccatcgcggcgcggaattcatgtccgtggccgccgaggccgaggccgacctgcgccgcctgctcgatatccccgacgactacgcggtgctgttcctgtccggtggtgccaccacccagcaggcgctcatcccgctcaacttcgccagccccggccagcgcgccgactacgtggtcagtggccattggggaaagactgcggtcaagcaggccggcgtctacgtcgacgtcaacattgccgccagcagcgagcccgacggctaccgcacgctgccgccccgcgccgactggcagctctcgcccgacgccgcctatgtgcacatcaccgccaacgagaccatccacggcgtcgagttccgtgatgtgccggataccggcgatgtgccgctggtggcggacttcagctcgtccatcgccagcgagccgctggatgtacgccgctacggtgtgatctatgccggcgcgcagaagaacctgggcccggtcggcatcgcagtgatgatcgtccgccgcgatctgctcgagcgcactggccagccgcgcgcggacatcttcgattaccgctcgcatgtcgcccgcgattcgatgctcaacaccccgccgacctggaactggtacctggccggcctggtgttcaagtggatgctggccgaaggcggcgtggccgaattcgccaggcgcaatgccgccaaggcggcactggtgtacggcgccatcgatggctccggcggcttctaccgcaacgaggtcgcgcatgcggcacgctcgcggatgaacatcccgttcttcctgcccgatgccgggcttgatgcccgcttcgtcgccgaagcgaaggctgccggcctgctggcgctgaagggacacaaggtggtcgggggcatccgtgcctcgctgtacaacgccatgccgctggccggggccgaggcgctggtcgccttcatggccgatttccagcagcgtcacggctga

SEQ ID NO: 493974 - DNA, 807 bp, Stenotrophomonas maltophilia
gtgcagaacctgctagttcacttcagtcagcaacaacagcccgaccagcccctgcggcccggggtgcagcgcatcgtgcgccaggccaacggcagcgtgcggctcggtgatgccggccacggcgccctgctgctggcccagttctgcatggacgatcgcggcctctggctgcaggtcggcaatggcatccgcggcatccacgtcaatggtcgaccggtgcgccggatggccctgctgcgcgcgggcgatgcggtatacgtggatggcgtggagatggtgctgcagggcgaagtcgagagcctgctgcaggcgcctgcgccgaagaacgaggatggcagcgacgagcagcaacgactgctgcgcggtgtcggtggcctgcaccatggccgcagtttcaccctgtcgcgggcccgcctgatcggccgcggcaacgaggccgacatcgccattgatgacccggccttcgccgaacagcatgcccgcgtggaagtgcacggcgagcgcgtgctgctgcgcgacctcggcagcgccgacggtacccgggtcaacggcgtggccgtgcgccactgctggctgcaggccggcgaccaggtcgtgttcgatggccagcaccggttcgtgctggaagtgccgcacgatccgcgccggcggccgctgcccgccgaggacgacgccagccacgaggccgagcaggcgccggtgctgccggccgcgccgcgcagggtccggcgctggccgtggctgctggtgagtgcgctgctgctggccgcactgctcagcctgctgctctggttcggcgcgcgctga

SEQ ID NO: 493975 - DNA, 276 bp, Stenotrophomonas maltophilia
atgtccaccatcgatgtccgccacgcccacgccctgcccgacgcacaggcgcgcgccgcgatcgaacaggtcgctgccaagctgtccgagcgcttcggcctgaagtcgtcctggaccgccgacgtcctgaacttctccggcagcggtgtggacggtgcgatcgaactgcagccgggcgccgtgcgcgtgaccgccaagctcggtttcctgctgtcggcgatgaagggcatggtcgaaggcgagatccagcgcgtgctgaaggaaaagctgggctga

SEQ ID NO: 493976 - DNA, 492 bp, Stenotrophomonas maltophilia
atgaaccactacgagaacgacgaccgccgcaacgacgacgcctctttcggtgaccaggccgagcgcttctcgcgcaagctcagcgattcggcgcaacaggtctggctggccgggctgggtgcgctggggcgcgcgcaggccgagggcagccgcttcttcgacggcctggtgaaggaaggcgaagcctgggaagcccgccgccgtgaacgcagcggcgaacagggcccgggctggcgtgacaacgtcgaaacctcactggacgaggcccgcgagaaggcctccggcacctggaacaaagtcgagaaggcctttgatgaccaggtacagggcgtgctcaagcgcctgcatgtacccactgccgacgaggtgaccgcgctggaagcccgcatcgatgccctgcacgcgcgcctggccaggctggaaaaccgggcagcttcgggtgcagatgcccccgccccgggcagccatcaatcgccggacagcattccctga

SEQ ID NO: 493977 - DNA, 1017 bp, Stenotrophomonas maltophilia
atgctcccctggatcctggccctgctgtcggccctgcttacctgttccctggccgttgtctatctgtggtggatcaagcggcggcagaaggagatgcaactcggcctgcaggccctggcaggcatgcactggcgcgaattttcggtactcgtcaagcgcatgctgcgcgagcagcgtggcctgcgcgagctggtcgatccggccgaagatgcccgcgagccgagcagcgacttcctgctcagcgatggccccaatcaatggctggtgtcgtgcaagcacggcctggcctaccgcatcggcaccgccgcagtgaacgaactgggtgcggccgcgcgcctggccggcgccaaggggggcgtactgctgaccgaaggccgtatcgaacgcgacggccgtggcgccgccgagaagcaggcggttgaagtgctggacgggccgcgcctgtggccgttgctgcagccctacctgcccggcgacatcgaagcgcgcgtgcgcgccagcgcccggcacgaagcgctgcgccgcattgccattgccgcactgggttcggccacgctggggctgcttgtcggcctgggtctgcagggcctgcatgtggaagaggcccctccggtcgctgcggcgccggtggtggcaacgccttcggccgcgccttcggccgcaccttcagccgcacccgccccgatcgaagcagtccctgcggccgcccccgctcccacgcctgccgtcgcccccgcgaccgacgcgcgcagcaatcccgaccccgatgccgccacgctggagcgcttccaggccgatctggcccgcgccctggccggcaagcccggcatcgccagcggtgtctggctgacccggcagacactggcgatcaaccgcaccggcgaactggacgcggtgtggccgctggtctgcgaggaagtgctgcactaccccgcgctgcgcaacgtgcgcatccagctcaatgcccgccccggcgtggatgagccggtgcgctggcggcagtgcgctacgtattga

SEQ ID NO: 493978 - DNA, 393 bp, Stenotrophomonas maltophilia
atgcgatatccagtcttgatcgaggcgggcgatgagcgcaccgcgtggggtgtggtcgttccagatctgccggggtgcttctcagcggccgacacgcttgatgatgcgctcagtgcggcggaagaggcggcgctcgcctggattgatgtggccctggatgaggggcgctcaattccgacaccttccgcgccgcagaagatcgccgcggaggcatccaaggacatctgttggattcttgcgtacatctgcattgatccggctctgctggacgacaccatcgagcgggtcaatatcagcctgccacgccggatcctggcgaggctggatgcgcaggccagagcggcgggtgaatcgcgctccagttacatcgcccatctcgcggcattgggctga

SEQ ID NO: 493979 - DNA, 729 bp, Stenotrophomonas maltophilia
gtgaaggccagcaagtccgccacgctcaaccagcgtatccgcagcgatctggaaagccgcatcctcagtggagagtgggcgccgggcttccggattccgtacgagcacgagttgatggagcagtacggatgctcgcggatgacagtgaacaaggtgctgaccgcactggccgagagcggcatgatcgagcgccgccgtcgtgccggttccttcgtggcgcggcagccgccgcacctggagcaggtggcgctggagattcccgacatcgcgatggaagtcggctcgcgcggccatcagtacgcctatcgactgctgcagcgcgatctgcgcctggccgatgccggcaatgccggcgaagtcgagctggccggcagcgaaatgctgctggcgatgcgctgcctgcacctggccgatggccgcccgctggcactggagcaccgcctgatcagcccggtgggcgtgcccgaggtgttggaggtcgacttcagcaccaccgccccgggcagctggctgctgcagaacgtgtcctggacccgcgcccagcatcgcatcagtgcctggggcgcggatactgccaccgccaggctgctggatgtgaagcccggtaccgcctgcctggtgatcgaacgcctgacctggcgtggcgaacagccgatcacccgcgtgcgccaggtgttcctgggggatgcctgggacttggtggcgcgcttcgcgccgggcgcgcgatag

SEQ ID NO: 493980 - DNA, 1371 bp, Stenotrophomonas maltophilia
atgtccgattcgcgttccccgcacagtttccatgccgcccacgccctgctggccgagggttgggtccgcgatgtccgcctgcaggtgcaggacggtcgcatcgcggccatcagcacggggcagggcgcgcagtcgggcgacacccgcgtcggcatcctggtgccgggcctgcccaacctgcacagccatgctttccagcgcggcatggccgggctgaccgagatcggcggcggcgacggtgacagcttctggagctggcgcgagctgatgtaccgtttcctggcccacctgcgcccagacgcggtgcaggccattgccgcccaggcctatatggaaatgctggaaagtggcttcacccgcgtcggtgaattccattacctgcaccacgacgccgagggccacgcctatgccaaccgcgccgagatgagtgcgcggattgccgccgccgccgaccagaccggcatcggcctgaccctgctgccggtgttctatgcgcatgccgatttcggcggggcggcgccgaatccagcgcagcggcgcctgatccacgacgtggacgccttctcgcagctgctggaggccgcaaagccggccttggccgcgctgcccgacgcggtgctcggcatcgcaccgcacagcctgcgtgcggtcaccggcgaggaactgagtgcgttgctgccgctgaccgacggcccggtgcacatccatatcgccgagcaggtgcgcgaagtggaggcctgcctggcctggagcggccagcgcccggtgcagtggctgtacaaccatgcgccggtggatgcgcgctggtgcctggtgcatgccacccacatcaccgatgacgagcgcgcggccatcgtcgccagccaggccgtggccggcctgtgcccgatcaccgaggccaacctgggcgacggcctgttcccgatgcaggcgttcgcgcgcgagggcggacgcttcggcgtcggctccgattccaatgtgctgatcgacgcggccgaagaactgcgcctgctcgagtacggccagcggcttaccctgcgcgggcgcaacgtgctggcgccggatgccacccgcagcagcggtcgtttcctgtttgaaggtgcactgcacggtggcgcacaggcgctgggcgtggccgccggcctgcaggtcggcgccagtgccgacctggttgaactggacgccgcacacccggcgctgcaggcgcgacaggatgacgcatggcttgacagctgggtgttcgccgcacgtaatggcgcgctgcgatcggtctggcgccatggccgccagtgcgtggccgagggccgccacctgcagcgcgaggcgatcaccagcgccttcgctgccgccctgcgcggcgtgctgggctga

SEQ ID NO: 493981 - DNA, 1224 bp, Stenotrophomonas maltophilia
atgcacgtcgataccctctggtccaacgtccacctgatcacccttgatggcgaagggctgggtgtcatccgcgatggcgtcctggcctgcgccgacggccgcatcgtccacgtcggcgcggccggcagcgacgcccacctgcagccgaccacccgcatcgatggcgaaggccgctggatctcgcccggcctgatcgactgccacacccacctggtctacgccggcaaccgcgccaatgaattcgagcagcgcctgcagggcgtcagttatgccgagatcgcccgtgccggcggcggcatcgtctccaccgtgcgcgccacccgtgctgccaccccggaacagctggccagcgaaagccggccgcgcctgctggcgatgcgtgccgaaggcgtgaccacgatcgagatcaagtccggctacggcctgaccctgcccgacgaacgcaagcagctgcaggtcgcacgcgcgctgggcgaggaatgccgggtcaacgtggtgaccaccttcctcggcgcacacgcggttccgccaggccgcgaagcacaggaatacaccgacgaggtgtgcaacgtgatgattccggccatcgccgccgaaggcctggccgaagcggtggatgtgttctgcgagaacatcgccttctcgccggcgcaggcgcgccaggtctttgaagcggcgcgcgccaacgggctgtcggtgaagatccacgccgagcagctgagcaaccagcatggcgccgaactggcggcccgcttcggggcactgtcggccgaccatatcgaacatctggacgatgccggcatcgccgcgatggccgctgccggtaccgtcgccgtgctgctgcccggtgccttctatttcacccgcgataccaccctgccgccgatcgccgcgctgcgtgcggccggcgtaccgctggcgctggccaccgacagcaacccgggcacttcgccgctgaccagcccactgctggcgatgaacatgggcgccaccctgttccgcctgaccgtggacgagtgcatcgccggcttcacccgtgaagcggcgcgcgcactgggccatggcgagcgcatcggccgcctggcggtgggcatggactgcgacctggcgatctgggacatcgatgcccccgccgacctggtctatcgcattggattcaacccgctgcacgcgcgcgtggtgcgcggacagcccgacctgcctgcctcctggagcaacacatga

SEQ ID NO: 493982 - DNA, 1542 bp, Stenotrophomonas maltophilia
atgagcaacaccctggttcttcgccccggccatgtcactctcgcccagtggcggcaggtctatcgcggtgcgccgctcgcactggacccggccgcgctgccggtggtgcgcgccagtgcggcggcggtggccgccatcgtcgccaagggcgcgccggtgtatggcatcaataccggcttcggcaagctggccagcgtgcgcatcgagcgcgaagacctggccaccctgcagcggaacatcgtgctctcgcatgccgccggcgtgggcgagccgatgccggccagcgtggtgcgcctgatgatggcgctgaagctggtcagcctggcgcagggtgcgtcaggcattcgcgaggagaccctgctgctgctggaagcgatgctggtcaagggcgtgctgccggtcgtgcccgcacagggctcggtgggtgcctcgggtgacctggcgccgctctcgcacctggccagcgtgatgctgggcgtaggcgaagccttcatcggtgacgagcgcctaccggcagccgacgcactggcacgtgccggcctgcagccgatcgaactgggcgcgaaggaaggcctggcgctgctcaacggcacccagttctccaccgcctatgcgttggccggcctgttcgagatcgaaaccgtgttccaggccgcactggtgaccggcgcgctgtcggtggaagctgccaagggttccgacacgcccttcgacccgcgcatccacgcgatccgcggccagcgcgggcagatcgccaccgccgccactctgcgcgcgctgatgcagggctcggacatccgcgaatcacaccgtgacaacgacgtgcgcgtgcaggatccctactgcctgcgctgccagccgcaggtgatgggcgcggcgctggacatcctgcgccaggccgctaccacgctggaaatcgaagccaacggcgtgtccgacaatccgctggtgttcaccgacaccggcgaagcgctgtccggtggcaacttccacgccgagccggtggccttcgctgccgacatgctggccatggccgtgtgcgagatcggttcgatcagcgagcgccgcctggcgatgctggtggacccggcactgtctggcctgccggcgttcctgaccccgcgtcccggtttgaattccggtttcatgattccgcaggtgaccgccgccgcgctggtctcggaaaacaagcagcgcgcctacccggccagtgttgattcgatcccgacctcggccaaccaggaagaccatgtgtcgatggccgcccatggcgcgcgccggctgatgcagatggccgagaacgcggccaacgtgatcggcatcgagctgctggccgctgcgcagggctgtgacttccacgccccgctgcgctccagcgccgcgctggaaaccgtgcgcgccaccctgcgtgcgcaggtgccgacgctggaagaagaccgctacttccatccggacatggtgaccgccacgaatctggtgcgcagtggcgcgctggcgcaggacctgaccgacctgctgccaaccgtggaaccgcaggcatga

SEQ ID NO: 493983 - DNA, 855 bp, Stenotrophomonas maltophilia
atgaatacccatcccgaatggctgacggtgcacgaaggcgacgcccccctcatcgtcagctttccgcatacgggcagcgagctgccgcacgacctgatcggcgactaccactcaccgtggctggcccgccgcgacgcagactggtgggtacacgaactgtacgacttcgtgcgtggcatgggcgcgaccacggtgcgctcggcgatctcgcgttcggtaatcgacctcaaccgcgatcccagcggcgtctccctgtacccgggccagaacaccaccggcctgtgcccgctgaccaccttcgacaaccagccgctgtacctcgccgggcgcgaaccagacgaagcggaaatcgcccgtcgccgcgacacgtatttcctgccttaccacgatgcgctggcggcgcagatcacgcgcctgcgcgcacaccacggtaccgtggtggtgtacgacgcgcactcgatccgctcacacatcccgcacctgttcgaaggcgagctgccgcagttcaacctgggtaccgccggcccgtccggtgcaccggacacctcctgcgacaacgccttgagcgatgtggtggagaacctgctggcgctcagtggcatgagccaggtgcgcaacggccgcttcaagggcggctggatcacccgccactacagcaacatcccgggcggcgtgcacagcctgcagatggaacttgcctgccgcggctacatgcacgagccgctgcccgaccaggtggacgaacacagctggcccaccccgctcgaccccgcccacgccgcaccgctgcgccacaccctggcgcaggtgctcaacgcctgccttgaattcgctacgaaccggagcgccgcatga

SEQ ID NO: 493984 - DNA, 1668 bp, Stenotrophomonas maltophilia
atgacccgcaacgacccgtcccgcaccattgccgcgccgaccggcaccacgctcaacgccaaaagctggctgaccgaagcgccgctgcgcatgctgatgaacaacctgcacccggacgtggccgagcgcccgcaggaactggtggtgtacggcggcatcggccgcgccgcgcgcgactgggaaagcttcgatgccatcgtcgagacgctcaagcgcctggacgacgaccagaccctgctggtgcagtcgggcaagccggtaggcgtgttccgcacccacgccgacgcgccgcgcgtgctgatcgccaattccaacctggtgccgcgctgggccaactgggaccacttcaacgagctggataagaagggcctggccatgtacggccagatgaccgccggcagctggatctacatcggcgcgcagggcatcgtgcagggcacctacgagactttcgtggaaatggggcgccagcatttcggcggcgacctgaccggcaagtggctgttcaccggtggcctcggcggcatgggtggtgcacagccgctggctgccgtgatggccggcgcctcctgcctggccgtcgagtgccgcaagagcagcatcgacatgcgcctgcgcaccggctacctcgacacttggaccgataatctggacgaagcgctgcgcctgatcgacgagtcgtgcaaggccggcacgccgaagtcggtgggcctgctcggcaatgtggctgacgtgctggccgaactgctcaagcgtggcgtgaagccggacctgctgaccgaccagacctccgcgcacgacccggtgaacggctacctgccgcagggctggacggtcgaacagtgggatgagaagcgcgcttccgcccccaaggaagtggagaaggccgcgcgtgcatcgatggccaaccacatccgcgccatgctcggcttccatgcgctgggcgtgcccaccgtggattacggcaacaacctgcggcagatggcgctggaagaaggtgtgtccaatgccttcgatttcccgggtttcgtgccggcctatatccgtccactgttctgccgcggcatcggcccgttccgctgggcggcactgagcggtgatccggaagacatcgccaagaccgatgcaaaggtgaaggaactgattccggacaacccgcacctgcaccgctggctggacatggccgccgagaagatcaagttccagggcctgccggcacgcatctgctgggtcggcctgggtgatcgtgatcgactcggcctggccttcaatgaaatggtggccaacggcgaactgaaggcaccggtggtgatcggtcgcgaccatctggacagtggcagcgtcgcctcgccgaaccgcgaaaccgaagcgatggccgacggctccgatgcggtgtccgactggccgctgctgaacgccctgctcaacaccgccagcggcgcgacgtgggtgtcgctgcaccacggtggcggcgtgggcatgggcttctcgcagcacgccggtatggtgattgtgtgtgatggcaccgaagcggcggcgaagcggattggccgcgtgctgtggaacgacccggccactggcgtgatgcgccatgccgatgcggggtatgaagtagcgatcgactgcgcgaaggaaaagggactggatctgccggggatcctcggctga

SEQ ID NO: 493985 - DNA, 1437 bp, Stenotrophomonas maltophilia
atgtaccgcacgctcgctgccgcattgctctgcacgctgtttgcgatcccgcccgcttcggcgcgtgacgtccccaccactctctccactcagctagacgcccaactgcagagcaaccgcgagcgctacggcattgccggccaggcggtactggtcgcacacaacggccaggtgctctaccagggcgccagcggtgaacgtgatcccgctgcccatgcccctgccaccgtcgagaccatcttcgccgcgcagtcgatggccaagctgctgaccagcacgctggtgatgcaactggtcgatcagggcaaggtggatctggatgcgccggccagtcgctatgttccggacctgccgaccacatggcaggcgatccgcctgcgtgatttcctcaaccacagctccggcatcggcgagtactacgaccgggtggataaccgctgggtcagcaagggctaccccggtgtagcgcctgaccttggcgcggcactgaaggtggccggtgcggcaccgatgcagttcgccaccggcagtcgcgtgcagtacacccaggccaactacctggtgctgaccgccttgctggaagcgcattaccgcacgccctacccggccatcgcgcgcgaacgcatcctgcagccattgaagatggcgagcacctcatggggcgtcaccagcgtgccagccacgcgcgcggccgtgccttacatcggtaaggatggtcaactacagccggccgatgaagacccttggccggactacggctggggccatgctgatctgcagaccaccataggcgacatgaaccgtttcctgcaggcgctggcgaccggcaagctggtgcgcacggcgaccctggaaaaactctggcagccgcggaagctgagcggtggcggcagcaatttcttctccaccggttgggataccacccgcagcgatggctacacccaggtcggtcatgatggcggcacccgcgttcgtgcgcggttggcctacaagggcacgctggccaacggttactgggtgttcgtgtacctgaccaatggcagcgcccgcaatgtctggtccagcacgctggtggagagcacgatggcggaggttgcgcccggggagtttccgcatgcggtgttgtccgagcggctgatcggctatgcgctggatgacagcaccgatgcgaaaccgcagatgcgtagctggctgcgcgacagcaatggcgttcccaccggcgaactggaacgtgcgatcaacagtgatggctatgccatccgcgaaagcctcggtgcacgcaaggcgctgaaggtgttcgcgctgaacaccgagctgtatccgcagtccgccaacacgtgggacagcctggccgagtgccacgctgcattgggggagagggaagcggctgatcggctgtacgcgaaggccaagaagctggcgaagccctcgccataa

SEQ ID NO: 493986 - DNA, 2109 bp, Stenotrophomonas maltophilia
atgtcgcttccgtcgtaccgccctcacccgtcgctgctgttcctggctgtttccctcgccctggcttccaccgccgccgccgccccacaggccaccacgctggacgccgtacaggtcaccgccgccggtgccaacgcgcaggcgcgcgaagcgctgaagcgcgtgccgggcgccagtaacgtcatcgacgtggccaaggccgacagccgcctatccaccagtgcggatgtgctggcctatcagccgggtatcagcgcgcagtcgccgggcaacgaaggcaccaggatctcgatccgtggctcgggcatcaatcgtggcccgggcgcgcacgcctcgggcattgcggtgtcgatcgacggcctgccactgaccggcccgggcggcacgccctacgagctgctggaaccactgtggctgtcgcgcgtggaagtgctgcgcggcgccaacggcttcgagcgcggtgcgttggcgctgggtggtgccatcgactacgtcagccgcagcggtcgtgattcggcgggcgtgcagctgcactacgaagccggcagccgtggctaccagaagcgcggcatcagctggggcggcgtcagtggtgatgtcgactacttcctggcctacaccgataccgaattcgacggttaccagcgtcatgcgcgcggcgacggcaagggcgcgatggccaacatcggctggcagatcacgcccgacctgcagacgcgtttcttcgtgcgctaccgcgaaaccaatcatgaaacgcccggtcgcctgacccgcgatcagatccgtaacgatccgcgtgccgcgaatgcggccaacctggccatcgatgcgcgtcgcccgcagccgggcagcacctgggtgggcaacgtcaccacgctgcagatcgatgaagattcctcgttgcaggccgggctggtctatcacacgtacccgatggacttgaacgagagcctgtaccggcagcagctggactacgccaacctcaacgccacgctggactaccgccgccgccaccggctgttcggcctggacagcgaaaccacggtcggcctgcgcatcacccacgatctggacgccgatgtgcgcgagtcgctgcgctttgccagcaacggctatgccgccggcacgcgcacgcgtgatttccggcaccacggcaccgacagcacgctgcacgtcggcaataccctcaccttcaatgaccgcctgcggatgcagaccgggctggcactgatcaacacccgtcgcgatgtgcaggtgacctggccgagcagcggcggccgcctgcgcgaccacgactgggaccatgcgccgcgactgggcttcacctggcagcacagcgcccagacccagtggttcggcaacctcagccgctcggtggaggcgccgcacccgtggtcgatgatctggggctcgaaccagtacttcgggccaggcaatggcccgtctaccggccgccagcgcgcgccggtgccgatgcagaaccagaccgccaccacgctggaactgggcgcgcgcggtgacgcggcgctgggccgctgggaactgaccggctactacgcgcacgtgaaccacgaactgctgagcgttgaactgcaaccggtgccgaacctgttcatcgccgagaacaacgccagccccaccgttcaccgcggcatcgaggccggattggacagcacgctgtggcaggctgcaccgggccggctgtcgcttcgccaggcctataccttcagcgatttccgctaccgccacgacgcgcgtttcggcagcaaccgcctgcccggcctgccgcgccacgcctaccaggccgagctgcgcttcgatcatgcatccggcctgtacgctgcgctcaataccgaatacgcctcgcgcatcgccgtcgactacgccaacagctactgggccgacagccatgtgatcttcggcagccgcatcggctacgacgcacccggtggccgctggcaggcctgggtggagatgcgcaacatcggcaaccgccactacgccgctacggtcacgccgggttacgacgacgccggcaaggatgtcgcgcgctcgaccccgggcgaaggtcgtggcgtctatgcgggcatgcgctggcgctttgactga

SEQ ID NO: 493987 - DNA, 519 bp, Stenotrophomonas maltophilia
atggatgtcgctgcacgcaggaacaggacgttgtttcgttggatcatggtgacgctgctggcggcgttgttgccgtttgcagcactggcgcagcccgcagccgggcaggccgatggtgccgaagccgccaccgccgcggaagaggcgcagtgccgcgcctgtacctatgagcgcattggaaccaaggtcgatatcggcctggtggcactggtgtcgctgctggtggtgggcctgctgaccgcggcgtcgcgggaatggggcactacctcgcagcgctggacctgccgcacgctggccctgctgctggtgggtgtcggtgtggcgttgctgtggtgggctggcagcgtcgtctacctgggctacaacccgtggcaggaaatggccgcccccgccgatggctcgctcacctcgacactgctcagtacctcgccgaagtggttggcggcactggtgctgatcggcttggcgccttccatctggaagcgcagcgagcgcctgccggcctggcgtatcggctga

SEQ ID NO: 493988 - DNA, 324 bp, Stenotrophomonas maltophilia
atgctctacggcatgcacgtctcccagctcacccgctccaccgccctcgtgatgttcgttccaatgattggcctcgccggttggggttcgtggtttggtagccgctgcatcagcgatggctgcctcggcgtcctggtggcatggcttgccgccgtggccacctttgcggtgcaggcgttgctggtgctcccgacgcatgcctgggccctcaagcggcagggatcccccgcctcccgcagctacctgcgttggttgggcgcgtcggccatcgctgccttcctgcccatcgtgctcggctggggctatctgatgatcttccgatga

SEQ ID NO: 493989 - DNA, 576 bp, Stenotrophomonas maltophilia
gtgagcccgcgtccctctgatgcgccacaacgcgtgattgatgctgcggcacagatgctggcgcgcgtgggtctcaatgccaccagcatccgtgaggtgaccaagctggccgaggcaccgctgggctccacctatcaccactttcccggcggcaagcaagagttgctggcgcgcgccacccacatggctggcgacaaggtagaaacgctgctggtggagctgctgaagggtggggcggtgcagggcctgcagcagttcctggcgatgtggcgtgagcgcttgctgcgttccgggttccgcgcgggctgtccggtgctggccgcggcagtggaagagccggtggaggccgtgcccagccaggcacgcgttgccgctgccgaagtgttcgcgcgctggcaggggcatctcgccgcagccttcattgccgacggccacgaacagtcggctgcgaacgggctggccagcctggtgattgccagcgtggaaggcgcagtggcgatgtgccgcgcactgcaggacatcgccccgttcgaccaggtgaccgcgcagttgctgaaggcggccgcgcgtccttga

SEQ ID NO: 493990 - DNA, 546 bp, Stenotrophomonas maltophilia
atgaatctctggttccgcctgctccacctgctgctgtgcagcctgttccggccgaagctggaggccccgttcggggtctcgcgcctgcagttccgggtgctgcccaacgatctggacagcaacctgcacatgaccaacggtcgctactggaacatcttcgacctgggccggctggacctgatcctgcgcatgggcctgggccgggtggcgctgcgcgagaagtgggcgcccatcgtaggcgccggcaccatccagttccgtcgcgagctgaagccgttccagcgcttcaccctggaaacgcgcctggtgggctgggtcggctcgcgcggcatcatggagcagcgcgtgctgatcgggcccgagcagaagatcgccacgcgcgcgctgctggtcaccggcatctacgaccggcgtgcgcggcagttcctgggcatgccgaagatgatggaagcgatcggcgtggtcgccccgccgtcgccgccgctcagtgcggccgccgaagcgttgctggccgccgatgcggcgttgaagcaggacgacgcctga

SEQ ID NO: 493991 - DNA, 678 bp, Stenotrophomonas maltophilia
atggccttgctgctggccgccgtgccggcgttcagtgcagacacggcggtgccttcgccgctgacgcgtgaaccggtgggcggcgtttcgttggccgaatggaccgcccgctggtggcgctgggccgacgcccagggcggggcgccctatctcgacccggatggccgtgtgtgtgatctgggccaggaaggcccggtctggaacctggccggcaccaatggccgtttccggccacatcgcgaatgcgtggtgccggctggcaagtacctgttgctgccgatcatcaacatggcgcactaccaggtggatgaggctgtgtcctgcaaggagctgcaggcgggggcggcggtcaacaacgattacctgatcagcgcggtggtgctgctggacggccagccactgggcgacatgcgcaggcatcgggtccgcagcgaaggctgcttccgcatggatgccgacgacgaacactctcggctggccgccgccgacggctactgggtaatgctcaagccgttgccgccgggccggcataccctcagcgtgggtgccaactacggcgtgccggatggcggcgcatacagccgcatgcggcagtccttcgagtacgtgctgcacgtgggagggcgcacccaggtcgtgtcgcgcgaaccgcacgcggtgccggtggcggccccctga

SEQ ID NO: 493992 - DNA, 783 bp, Stenotrophomonas maltophilia
atgcgttccttgtccgctggcctggccgcggttgccctcggtagcgcgatgagcgtccatgggatggcggccgacgtgcccgccgtcaacccgttgttggtggaacctgtcgagcgactgcgcccggacgaggtgcgcttcatgcagcagcgcctggccgattggccggaactgcagcgttaccgcgatgccaacgcgcgactgcctgccgccgtaccggggcaaccacgcgtggtgctcttcggtgactcgatcaccgaaggctggggcggggagggcagcgcgacgttctttcccggcaagggttggttcaatcgcgggatcagcggccagaccacggcgcagatgctggtgcgtttcccgcaggacgtgctggcactcaagccgcaggtggtggtgatcctggctggcaccaacgacatcgccggcaacaccggcccgtccacgcaggcgatgatcgaagacaacctgcacgcgatggtggacctggctcgtgcacatggcattgccgtggtgctggcatcggtgctgccggtcagcgattacccgtggttgccgggcacggcacctgcgcccaaggtgcgcgcattgaacgcggcattgaagcgctatgccgatgcgaagcagctggtctatctggactactacacgccgatggccaatgccgccggagggctggatccgcagctggccgacgacggcgtgcatcccacggcgaagggctatgcggtgatggcgccgttggccgaggcggcggtcaagcgcgcaatggcgctggagtag

SEQ ID NO: 493993 - DNA, 966 bp, Stenotrophomonas maltophilia
atgtccagtttcctgcgttgcctgcttgccctggcctgtgccggggcggtcggcgtggcgtcggcgggaaccccgccggggccgcagatcctcaccaccgatgccagccgcttctacgcgctctacgacagcaccggcggcaagcccagcatcgcccagctggccggttacctggccgaaggcagtccgggcctgggtgaactggcgaaggcgcgccgggtcacgcccgagcgtatggccgaggccattgccagccagcccggggtgtatgcgcagggacgcggttgccttgcagagctgccggcggtgaagcagcgcctggtgcaggtgttcggcaacctgcaggcgatctatccgcaggccgcgtttccgccggtgaccatcgcggtcggccgcggccgaccggtcgggttgacctccaagagcggggtgatcatcggcctggaagcgctgtgcgcagccgatttcatgaatcccaatgtgcaggaccgcttcgtgcacgtgatcgcgcacgagtacgtgcacatccagcagaccggcctgaccgacgtcgagccgggcgacccgcatgcgacggtgctgcgtgtttcactgggcgaaggcatcgccgagttcatcggcgagctgatttccggcaatgtcggcaacggtcgccacgcggcctggacccgtggccgggaagtgcatatcgaaagcgccttcgcactggatgtggacagcaccgatctgtcgccgtggctgtacaactacaagcccggttcgcaggaaccctatgatctgggctactgggtgggctatcgcatcgccaaggcctattacctgcaggccaaggacaagcgtgacgcggtgcgtgcgctgatccagcaggacaacccgaaggcgatcctggccgccagtggctggacgccaggcatgtggatgccggccaaggtgaccggcgtggcggcgcggtcggcggcacgctga

SEQ ID NO: 493994 - DNA, 984 bp, Stenotrophomonas maltophilia
atgatgatcgttcccgcgtactgggccgaagcccgcctgcaggcccgtttccgtggccggccgatggtcgtgcgccgcttcggctggtccgacgaggggcctgcccaagcccaggcccacgccgacgcacgtgcccatgaagccctcaacgccatcatcgccgggcaggtgctgccgcgtcgtgaagtgcgcagcaactacggtgtggagggcgtgccgatccgcgagcagatcgtgcagcgcgatggcgatgtcatcatcacccgcaacagctatggcgcgctgtgcctcaacagccccgacgtgctgttcgccgacatcgaccatgcgcagccaccggctggatgcgtgataccggccatcgtcgcggcgctcgtgctgcttgccggcgccgtcatcggcaccgtgctctggcattggctggtgggcctggtactgggcgtggcggcagtgctgctggtcaacgcggcactgctgatgcggcggaagcagcgcctggccgctgccggcggtgctgaagggcttgcgctgaagcgcgtggacgccttcagcgaacagcatcccgattggcatctgcgcgtctaccgcaccccggcggggctgcgcgtgctggcgatgcatgccacgttctcacccgaggacgagcagctccagtcattcttcaaggcactgggcaccgacaccctgtacgcgcgcatgtgccggctgcagcattgcttccgtgcgcgactgacaccgaagccgtggcgcgtcggcctgcgttatcgcatcaggccgccggtggccgcgtggtcagccgaacaggccaacaacccggaccggttggcctggattgccgactatgaaaagaagagtgccggattcgccgcctgcgcctacctgcgcagcttcggtgataccacccgggtgcatgccaaggccgagcatgtgcgtgacctgcatgaccggctgtcacgcgcgcaggatcgcctaccgctggcgtga

SEQ ID NO: 493995 - DNA, 321 bp, Stenotrophomonas maltophilia
atgaaagccattcttcttgctgcaacgttgtcgttggccctggtttcaacggcccatgcccagtcgtttcctgctgagctgacgcaattgggcatcgtcgccggcatgccctatgccaaggccaagcgcctgctggatgcggcaggttggcgggcgagtccggcacagggcgcccccgagtcacttgagggctttccggaagtcggatgccagaagggcggaaagcagtgcgcgacaaccttcgagaagggcgggcagcagatcgcggtgcagctgggcactaccttggcagggcagccgttcgtgcagggcgctgattga

SEQ ID NO: 493996 - DNA, 768 bp, Stenotrophomonas maltophilia
atgaagatttggttgttgggactgacagcggtgtgcgcatcgtctgcggcgatggcggcacagccacagatgagcgtcgatgtgagatacgactggtacggctggggctcggtatcagagcactgggtgatccggcgcgatgcctatggcctgaccacccgcgtgcaggtggtggagacgcccgacggcaaggcgcgattgccggagctgctgccgtttggcgccatggcggcgctcgacaccgcgctgcagaccgccccgctgaccagggcggccgcggtgcagcggatcgcttcgcggctggatcgcgccgaaatactgtccctggacccggggctgcacagcttggacacggatgcctgttcgttcgcacagcagcgcgcgtgggcgcgcaaggcgctgtccggacggagcctgcagtcgcgtgtcgaccggcatttctccgggctctggaccgatgatgtgccgatgatgacggttgtcgtgagccggccggggcgtccggatgtggtgctggtgtcgacctcacagaaggtaatgatgctgccctggaaacgcctgccctcggtggtcttcgagcagcaggacctggacaacgcgcaggagcagtggcacccggaactgagcgaagcggtgattgccctgctgccggaaggggaagactcacgcaggcgtttccagactcgctggttgcatgaccggctgcgcagggatctcgcgatggagtcgctggactgtggcgccaggggcagggattccgccatgtga

SEQ ID NO: 493997 - DNA, 2463 bp, Stenotrophomonas maltophilia
atgctgatccgtcgaacctctctggcggcggctgttgccgttgccaccgtcggcctgttggccgctggcccggccttggccgactacgccaagccgccggaacacctgctcaaggtgctgaaggcaccgccaccgccggcgccgaacgtggccccgggcggccagcgcctgctgctgaccaccgcgcagacctacccctcgatcagccgcgtggcccagccctacctgaagctggccggcgtgcggctggagccgaagaaccgcagccgccatgacacgccgggtggctacggcattccggcctgcgtggccgacttcaccctggtcgacatcggcagtggcaaggagaccaaggtcaacctgccgcagggctgcgccaccggcgcgctgtggtcggccgatggcagccacttcgccttccagaatgcggtcgataccagcgtgcagctgtgggtgggcgatgcgtccaccggccaggtgaagcaggtgccgaacgtgcagttgaaccccatcttcggcaacaccgtgcagtggctgggcggcagccagaacctgctggtgaagctggtcccggccaaccagggcccggcgccgtccaacggtggcgtgccgaccggcccggatgcgcaggagtcgctgggcagcagtggcgagagcagcacctatgaggcccgcgacacgctgaccagcgtgcacgacgaaaagctgttcgcttactacggtgcctcgcagttggccgtggtagataccgccgcaggcagcgtgcgcccggtcgggcagccggcactgttcaacgaagtcagcgccgcgcccgatggcgtgcacgtgctgactgaatcgatcaaggcaccgtattcgcacgcggtgacctaccagcgtttcgccaacgacgtggccgtgctggatatcagcagtggccgcagcacgccgatcgccagcctgccgctggccgaccgcgtgccggtgcacggcgtgccggaaggcccgcgcggtttcgactggcgcgccaccgatccggctaccctggtctacgccgaagcgctggacaagggcgactggaaggtcaacgtgccgcatcgcgatcgcgtgctgatgctgaaggcgccgttcaacggcaagccgaccgaaatcacccgcaccgcgcagcgcttcgaaggcttcgcgtggaccgccgatccggccgtggccttccagtacgagaacgacgagaatcgtcactggatgcagacccgcatcgtcgatgtggaccagccgaagaaggaaggccgcctgctgtgggacatgtccagcgatgagctgtacggcaaccctggcaatctggtcttcacccgcctgccgaatggcgcgcaggtggtgcgccgtgagggcaaccatgtgttcctcagcggccgcggtgcctcgccgcagggcgaccgtccgttcctcgaccgcctcgacctggccacgttgaagagcgagcgcctgttccgcagcagtgcagacgcctacgaacagttcctcggtttcagcaacacgccgggccgctacctgacatggcatcagtcggtgatcgatccgccgaatgccttcgtccgccagcagggtgaggcggtggctgatgcgaaggccggcgaggcgcagttcgcgtccaccgcgaccgcactgaccaagctggtcgacccgacaccggaagtgcgccagatcaagaagcagctggtgacctacaagcgcgccgacggcgtggacctgtcgttcaccctgtacacgccgccgggctacaaggaaggccagcgcgtgccggcgatcctgtacgcctatccggccgacttcgccaacgccgcgcaggcggggcaggtgtccggttcgcagcagaccttcacccgcctgcagccgtaccgcctgatgctgctggccggctacgcgatcatcgacaacgcctcgttcccgatcgtgggcgatccgaagaacgcctacgacacctacctggagcagctggaagccgacgccaaggcggcggtggacaaggccgtggacatgggcgtggttgaccgcaaccgcatcggcgtgaccggccacagccacggtggcctgatgaccgccaacctgatcgcgcacaccaagctgttcaaggccggtgtggcgaccagcggttcgtacaacaagacctttaccccgttcggcttccagaacgagcgtcgctcggtgtggcaggcgcaggacgtgtacctgaaggcctcgccgttcttctatgccgacaagatcaagctgccgctgctgctggtccacggcgaggacgacgccaacccgggcaccgagccgttccagtcgcgcaagctgtaccaggcgatccgcggcaacggcggcatcacccggctggtgatgctgccgaacgagccgcactggtacaccgcgctggaatcgaacgaacagttggtggcggaaatgctgaactggttcgatacctacgtgaagaacgccaagtga

SEQ ID NO: 493998 - DNA, 330 bp, Stenotrophomonas maltophilia
atgaacgacgaattcaatgccatgctgcccccactggacgatgccaaggccgaggaaatgatcggcaaggtcgtgctggtgggtgtcacccgctatggtggcgacggccaagtgcagggtctggagcagtacgcgggcaccgtgctgcgcatcagcgccgacgaaggcgtggtgctggccgacgaagacgatggtcatgagcgctacctgccgcccatgctcgaccagtaccagcgggccgagccaggcgaataccgcatgcggaacagtggcatgatcgtggtcgaccccgattacctgaccgcctgggacctgcacgcccagcagtga

SEQ ID NO: 493999 - DNA, 777 bp, Stenotrophomonas maltophilia
atgcgcaccgtacatgccctccgctacatcaccccgttacgggaaggcggctccctgcccgccgtggtcgagaccgacgacgacggcatggccgtgctgaaattccgtggagccggccaaggcccgaaggcgttgatcgccgagctgatcgccggcgagatggcacgcacgctgggcctgccgattccggaaatcctgttcgtcgaactggaccgcgagttcgcccgcaccgagcccgacccggaaatccaggagctgatccgcgccagcgagggcctgaacctgggcctggactatctgcccggtgcaatcaattacgacccggccgcgatgccggtggatgccgagctggcctcgcgcatcgtctggttcgatgcattcaccagcaacgtcgatcgcaccacccgcaaccccaacctgatggtatggcatcgcaagctgtacctgatcgaccacggtgcggccatgtacttccaccacgactgggccagcgccggcgatgcctgcgagaagccgttcgtgctgatccgcgaccacgtgctgctgtcgttcgccagccgcattgccgaggtggacgcagaactggctgcgtgcctgaccgatgccgaaatcgagcgcatcgttggcctggtgccggacagctggctggtggacgaaccggcgttcgacagcccacaggcctatcgccagggctatatcgactatctcaagcaccgcctgaaagtgcgtgcagtgttcgtgcaggaggccatccgtgcccacgctgcacacgtatga

SEQ ID NO: 494000 - DNA, 393 bp, Stenotrophomonas maltophilia
gtgcccacgctgcacacgtatgactatgcggtcatccgcgtcgtgccgcgggtggaacgcgaggaattcatcaacgtcggggtgatcgtctcctgcccgggcgcgcgccatctggaggcggccatcgaaatcgatcctgagcgcctgcgtgccttcgcgccggcgctggaccaggacgcgctgcagccatggctggatgcaatcgtggccatctgccgtggcgacgccagcgccggacccatcgcaaagctgcccgcgcgcgcccgctttcatttcctcaccgccaagcgcagctcggttgtgcagatgtcgagcacgcatgtcggccgcactgcggacccggcgggtgtggtggaacacttgatgacgaagatggtgcgggtaccggaatga

SEQ ID NO: 494001 - DNA, 1431 bp, Stenotrophomonas maltophilia
atgaaggctgttggccgcctgctgctctgcaaagtactggcctgttcggtgctgatgacgccttgggctgttccggcagtgggcgccccctccagcgtgcgtgcacatccgcgtgcgcaggacgccatcggtgactggcttgcggccttcaatgcgggcagcctcgaggggttgcaggcattcgccgatagatacgcgaagaagcaaggcagtggtcccaaggactatctcgaattccgcgaaagcacaggccccttgcgcgtactcgaatcaaccgagagtgcgcccggccaagcgaagctgctggtgatgggccagatgaacgaacgcgcgatgtgggtgaccgccgtcatggacccggccaatccgtcgcacctgatgcagttccagatcgagggcactgaaacgccggacaagcacaagccggcacgggttgcattgcctgccctgatggccgacgtcacagcaaagctggaggcgctgcgggcacaggacgcgctgtcgggcgcgttgcaggtggcacagaatgggaaggtgctgctggactggcgcggtggtgatgccgatcgcagcactggaattgcagtgggcgtggagacgcagttccgccttgcgtcctccaacaagatgttcaccgccgtggccatcctgcagctggtgcaggatggcaggctcagtctcgatgacacgatcggcaagcacttgccggactatccgaacaaggctgtcgccagcagcgtgaccgtgcgcgagttgctgtcacacaccagtggcctgggggacttctttggcgatggtttcgaacagtattccgcgtccctgaagacgctggatgactacgtgcagcggttcgccagggatgcgccgcagttcacgcccggcagccaggacagctactccaactatggcttcatcgtattgggacgcatcatcgaggcggtatcggggcagtcgtactacgcatatgtggaggagcacatcctgcacccggtgggcatgaccggcaccggcttcgagccggaaacagcgagcgttccaaagcgtgccgtcgcttacacgaagcacgatgggcaatgggtccgtgaaacgaagtcgctgccctggcgcggcatgtcggccggtggtggctacagcacagtggccgatatggtgaaattcgccgaggcactgcaaggcgggaagctggtttcacctgcattgctgcagcaggccaccacggcgcagaaccacaagggctggtatggctttggtttcgtggttcagggcgagggcagggagcatcagtacggccacgaaggcggtgcgcccggatcgaacagtgccatcgtggtgctgccggcgcagggctacgtgatcgttggcctggccaatgtcgatccggatgcgatcggtaatgtggtcaactacatcgcgcgaaggttgccactgtga

SEQ ID NO: 494002 - DNA, 906 bp, Stenotrophomonas maltophilia
atggacctgatcgctcccctgcggaccttcgtcaaagtggccgaggtcggctccttcgccgctgccgccgacgcgctggacctgtcgccgcagctggtcggcaaacacgtgcagtcgctggaacaacacctgggcgtgcgcctgctcaaccgcaccacgcgcaagcagagcctgaccgacttcggccaggcctatctggcccgtgcgcgggtgatcctggaggaggtggaaggcgccgagcagctggccgaagtggcgcgcgggcggccgatggggcgcctgcgcgtcagcgcaccggtcaccttcggcgtgcatgcactgggaccggcggtggtggcctacctgcagcagtacccggacgtgcaggttgatctgaacctgtccaacagcctggtggacatcgtcgaggacggctttgatcttgtgttccgcaccggtgatctggccgacagtgggctggtggcgcgacggctggggccgtatccgctggtgctgtgtgcatcgccggcgtacctcgcatcgcgcccggccattgtccatccggccgatctgagtcggcacgagtgcctgggcttcgcccattcgatcatccgcacgcgctggagtttccgcgatgctgacggcagcgtgctgagcgtgccggtgtccagccgcttcatggtcaaccaggccgagccgttgttgaccgcggcagtcggtgggctggggttgatcctgcagccccatgaaatgcttgccgccgcgctggcgcgtggtgaactggtggaagtgctgccggactacgtgccggtgtcgacgtggatcaacctggtgtacccgcgcgaccgccagctgacgcccaagctgcgcagtttcctggacttctgcgtggcacgcttcagcgagcagacgatggcacggcgatag

SEQ ID NO: 494003 - DNA, 990 bp, Stenotrophomonas maltophilia
atgagccaggttgtccgcatccacgaatatggcagcgccgatgtgctgcgcatcgacgacatcgatgttcccgcccccgccgccgacgaggtccagatccgggtcaaggccatcggcctgaaccgtgccgaggtgatgttccgcaacggcgcctatctgcaggaggcgcagttccccagccggctgggctatgaagcggccggcatggtcgaggcggtcggcagtgcggtgagcggattcgctgctggcgatgcggtgagcgtggtgccgccgctggacatcgcccgctggggcacctacggcgagctggccaacgtgccggcgcgactgctggtcaagcacccgcaggcgctgggcttcgaaacggcggctgcggtgtggatgcagtacgtcaccgcctggggcgcactgttggagcaggcgcagctggccgccggggattccgtcatcatcaccgctgccagcagcagcgtcggcctggccgcgatccagatcgccaatgcagtgggtgccacgccgattgcggtcacccgtggcccgggcaagcgccaggccttgctcgatgccggtgccgcccatgtcatcgccacccaggaacaggacctggcagccgaagtggcgcgcatcaccggcggtgccggcgcccgcgtggtgttcgacccgatcggtggcccgcagttcgtgccgctgaccgaggcaatggcccgtggcggcatcctgctggaatacggcgcgctgagcagcgaacccactccgttcccgttgttcaacgtgctgggcaagtcgctgacgctgaagggctacctgtactcggaaatcgtctccgacgatgccgcgctggcacgtgccaaggcgttcatcgtcgacggcctggacaagggcacgctggcgccgaagatcgcgaaggtgttccccttcgcgcagatccaggacgcccaccgctacctggaatcgaacgaacagatcggcaaagtggtggtgacgctgtaa

SEQ ID NO: 494004 - DNA, 1632 bp, Stenotrophomonas maltophilia
atgagcgaaggctatggaaaaggtgggtcgggcttcggcctgacccgggaccagtcggtcgagatgatcgtgcgtacctgcatcgacaacggcgttaccgaccatcggcagattgcctatgtgctggccacggcgcagcacgaatcgcgtgatttcgccgcgcccgaggaagactggggcaggaagcaggcggtggacctgcgctacttcggcggcgaggagtatttcggccggggctttgcccacctcacccacgtcaacaactacgagcggctgggcgaggcgctggggatgggccgcgagctggtcgagcatccggaacgggctgcccgggcagacatcgccaccaaggtgctggtggtggggatgcgcgacggcctgttcggtgcgcggctgtccgacaacgtcaacgccagccatgccgactaccggcaggcgcgggcctcggtcaatggcggtgagctgaacaacggcagtccctatccagacgccatcgccacacgggccactgaatgggaatcccaggttgccggcctggtccagcgtgtgcagcaaccaggcttccagatgccgatgccgaccccccaggcgcccgccggggcgatggacctgcaccggggtgacgccaaccagcacgtgctggaagcgcagcagtacctgcagcgcttggacatccgcaacaacgccaatgccgcgatcaagcccgacggtgatttcggcgcctccaccgagcaggccgtgcgccgcttccagaccgagcggggtatcagcccggccaatggccgcatcgacgatgcgctgctggaacgcatgcgcagcgacacgctggcggtcgatccggacttcaggcgccggacggtgactgacctgaccggcccgctggccgacggcaacctgggccccggtgagaagggcgagccggtgttcgaaatgcgccggcagctggaggcgttggggtacctgaccgaaccgaacccacgtgccgagcgcgatgcgcgcacgtttgatgccggcatgcaggcggccatgcgcaacttccagcaggactatggcctgccgctgcgccccggcggcgtcatcgacgcggatgcgcgccggcagttgaacgatgccgccgtcgctcgcgagcatgcgccgaccaccgagttcgaccgcgcggagaactggccgccgcagcgtccgccctatacgcgggcggagttccagccggagcaggtgcaggcgcggcagcaggcagcggcgaatgcaccggtcgctggtccggccgcgccggagcccgcaccgcagcccaatggcatggaatcgctgtcgcccagggacgccgcgctgttcgagcgcatccgccagggggtacctggcaccatcggcgacgagcacgtcatgcaggcagtgctggagtccaagcgcaacggcatcgatgatgccgcgcgcgtcgaccgggtgatgatggccggagatcgcctgtgggttgccgggttgattcccggtgagcgcgccagtgtggatacggcacagcccgcgcgctcgatggaggaaacggtgaatgatctggccggtgacgaccggcagcgcgagcaccagctcaccctcgaaagccgccagcatgagaaccgcgggccttcaatggcctga

SEQ ID NO: 494005 - DNA, 1089 bp, Stenotrophomonas maltophilia
atgctgaactccgaacgcctgccggggcgtgccacccggctgctggcaggactgcttctgcttggcccttgcctgtgggcaagcgcgcaggcgtcgccccagcccgccgcacgcaaggtgcccagcggtgccgaactgatcgcaggcgatgcgcgctctctgagccccgcccatgcgccttgcatggcggccgcaggcaccgcgctggacgcccgtcgccgttgtgccgacgctgaactcaaggtgcacgacgatgcactcaatgccgcctacagcgcggcgcgctccacactgaccgcccgtgatcagcaggtgctgcgcgatctgcagcggcaatggctgcgccagcgcgacaaccggtgcccggaaggcagcacggccgttgcccagctggattcacagcagtgccgcacgcacatgaccctgctgcgtgcccgccagttgcagggcggcggtgcggcggcgctggtggcggaagccaaggcggccccggcgccggcgcaggccgctgtgcatgccgccgatgccgcgcccgacaagcagggcaggatcgtcctgcggcccggcgagggcaggctcacaccggcactgcaggtggtcttccaggtgaccgattgcagcggcaccgacagcgtgacgacctgccaggtgcgaagcatgggcgtgacccgtggtgggcgcaacgtggtggtcacggacgtgcagccgcgcctgacccgcgccggcaccggtgcccagggtgcgaccgccgtgctgctgaccgtttcggatttcaatggtgatggcgtgccggacctgcaggtgtggcaggacaacagcggtgtctacaacgttccggtgcatgcgttctacctgttcgatgccaagcgcaaccgctatgtgcgtgccaaggcgttggaagcggccatcggtgggcgcgacatcgaccatatcgacaatgggcggttcgtgcttcgcgcgaaggtcagcccgtgcgagcgcgaggacaaggtcatccagctgcgcggaaccggcacgcgcacgctgctgcagcgccgctatgacacctgcaggggcgaggcccctaccgaatcggacctgctgaagtag

SEQ ID NO: 494006 - DNA, 2727 bp, Stenotrophomonas maltophilia
atggcagaaaccgccaaggaaatcatccaggtcaacctggaagacgagatgcgcaagagctacctcgattacgccatgagcgtgatcgtgggccgcgcgctgccggatgcgcgcgacggcctcaagccggtgcatcgccgcgtgctgtacgcgatgaacgaactcaacgcgcacagcaacaagccctacttcaagtcggcgcgtatcgtcggtgacgtcatcggtaagtaccacccgcatggcgatcagtcggtgtacgacacgctggtgcgcttggcacagccgttctcgctgcgctacatgctggtcgacggccagggtaacttcggttcgatcgacggcgactccgctgcagcaatgcgatacaccgaggcgcgcatgtcgcgcctggcgcatgagctgatggcggacatcgacaaggaaaccgtcgatttccagcccaactacgatgagaaggaactggagccgacggtcatgccgacccggttcccgaacctgctggtcaatggttcggctggcatcgcggtgggcatggcgaccaatattccgccgcacaacctgagcgaatcgatcaacgcctgcatcgcgctgatcgacaacccggacatcgatgtcgacggcctgatggaatacatcccgggcccggatttcccgactgccggcatcatcaacggcactgccggcatcgtcgccggctaccgcaccggccgtggccgcgtgcgcatccgtgccaaggccgatatcgaagtggccgacaacggccgcgaatcgatcatcgtcactgaaattccttaccaggtgaacaaggcgcgtctgatcgagaagatcgccgagctggtcaaggaaaagaagatcgaaggcatcagcgagctgcgcgatgagtccgacaaggacggcatgcgcatctacatcgagatcaagcgcggtgaatctgccgaggttgtgctgaacaacctgtaccagcagacgcagatggaatcggtgttcggcatcaacatggtggcgctggtcgatggccgcccgcagttgatgaacctcaagcagatgctggaggcgttcgtccgccaccgtcgcgaagtggtcacccgccgcaccgtgttcgagctgcgcaaggcgcgcgcccgtgcccacgtgctggaaggcctgaccgttgcgttggccaacatcgacgagatgatcgaactgatcaagacctcgccgaacccgaacgaagcccgcgagcgcatgctggcccgcgtgtgggagccgggcctggtcggtgcgatgctgggtgcggccggtgccgaggcctcccgtccggaagacctgcccaagggcgtgggcctgatcgagggcggctaccagctgaccgagatccaggccacgcagatcctggagatgcggctgcaccgcctgaccgggctggagcaggaccgcctgaccgacgagtacaagcagctgctggaagtgatcgccgggctgatccacatcctggaagatcccgaccgcctgctgcaggtgatccgcgaggagctggtcaacgtcaaggccgaattcggcgacgaacgtcgtaccgaaatccgccacagcgaagaggacctggacatcctcgacctgatcgcgccggaagacgtggtggttaccgtgtcgcatgccggttacgtgaagcggcagccggtgagcgtgtaccgcgcacagcgccgtggtggccgtggccgcagcgcggcggcgaccaaggaagaggatttcatcgaacagctgtggctggtcaacacgcacgacacgctgctgaccttcaccagttcgggcaaggtgttctggctgccggtctaccagctgcccgaagccggttccaacgcccgcggccgtccgatcatcaactggatcccgctggagccgggcgaacgcgtgcaggccgtgctgccggtgcgcgagtacgccgatggccagttcgtgttcttcgccaccaagaacggtacggtcaagaagaccccgctgagcgagttcgccttccgcctcgcccgcggcaagatcgcgatcaacctggacgagggcgatgcgctggtcggtgtcggcctgaccgatggcgagcgtgacatcctgctgttcgcctccaacggcaagaccgtgcgcttcggtgaggacaaggtccgctcgatgggccgtaccgccaccggcgtgcgcggcatcaagatgccgccgggcgaggaagtggtcagcctgatcgtggccgagagtgccggtggcattgaggacgagaacgaggacgacaacggtgccgaggaagccgtcgccacgggcgatgcggtgatcgacggcgccgatgacgccagcgttcagtacatccttaccgccaccgagaacggctacggcaagcgcaccccgctgccggactacccgcgcaagggccgtggtacgcagggcgtgatcggcatccagaccaccgagcgcaacggcaagctggtcgccgcagtgctgatgggctccagcgacgaagtcctgctgatctccgatggtggcaccctggtgcgtacgcgtggctcggaaatcagccgcgtcggccgcaacacccagggcgtgaccctgatccgcctgtccaaggacgagaagctgcaggcggtggagcgcatggatgcctcgatcgacgaggacgaggatgaggtggcagtgcctgcctctgccccggccgcgaccacgaccgatggcgccccggcggcttccagcagcgaggacgccgcacaggagtga

SEQ ID NO: 494007 - DNA, 1065 bp, Stenotrophomonas maltophilia
atgaacactgcctctgacatcgactacgcccgttacgaccacatccgcccgatcctgtggaccggcgatgccctgcaactgctggaccagcgcaagctgccgttcgtggtcgagcacgtggtctgccatgacagcgacgaggttgccagcgcgatccacgcattgaccgtgcgtggcgcgccggcgatcggcattgccgctgcctggggtgtcgtgctggctgcacgcgaggtgcaggccgccgatggtgcgcacgccctgcagcagctggaaccggccctgcagcgcctcaatgcatcgcgcccgactgcggtcaacctggcctgggcgctggcgcgcatgcgccgttgcctgaacgccgccggcgccgactggaaggcgttgctggaatcggaagcgcaggccatcgccgaggaagacctggccgccaaccgccacatgggtgcactgggcgcgggcctgatcgaggctggcagcggcgtgctgacccactgcaataccggctcgctggccactgcggggttcggtaccgcactgggcgtgatccgcgccggcatggcccagcaccgcatcgcccgcgtgttcgccggcgagacccggccgtggctgcagggggcacgcctgaccgtgtgggaactgcagcaggacggcatcgatgccaccctgatcgccgattcggctgcctcgcacctgatgaagaccggcgccgtgcaatgggtgatcgtgggcgcggaccgcatctgcgccaatggcgataccgccaacaagatcggcacctaccagctggccatcgccgcccgccaccacggggtcaagttcatggtggtcgctccgtcctcgaccgtggacatggagaccgtggacggcagccagatcgagatcgagcagcgcgacccgggtgagctgtacggcgtggggggtacccgtaccgtcgccgagggcattgctgcctggaacccggtgttcgacgtcaccccgggcgagctgatcgacgccatcgtgaccgagcgcggggtcatcctgaacccgaccgccgggaacatgcgcaccgccttcggcggctga

SEQ ID NO: 494008 - DNA, 732 bp, Stenotrophomonas maltophilia
ttggtcaagtggttcgcggttgtcgctgcaccggtgtactccattgcgctctggggtgcctggctgccgtcgccggcgtcggcccagcaggtgggctacgacgatgaagtggtgacctgcgaatcacgcgacatgggttgggtgcactgcgatatcgaggttgccaacggcgtcgacctggtgcgccagctgtccagcaacagctgcatccgcggcagcgagtggggtactgaccgcagtggtgtgtgggtcaccctgggctgccgtgccgagttccgcgccaggcgcgcagcgggcgcggcgccgccggctgacagctcgggcaagcgcctggtgcgccgtgtggtgcgctgcgagtccaatggccgtccgcagagttgcccggtacgactcgatggcgcgccggtgcgcctgctgcgccagttgtcggtgttgccgtgccgcgaagggcagggctggggctacaagcgcaatgaagtctggaccagccgtggctgccagggtgacttcgaggtggccgatgacgatggccgcttcgtcgacatgccgcgccgcctgacctgcgaatcgaagtcgaagaagcggcgcttctgcggtgccagcatctcggttggcgccgtggtctccgagcagctgtccagcacgccctgcgaggaaggcagtacctggggctggagccgcaacgggatctgggtggacggcggctgccgcgccgaattctcggtgaattga

SEQ ID NO: 494009 - DNA, 957 bp, Stenotrophomonas maltophilia
gtgagcgaggccctgctgcgcgcgctgcagcagcgcgccacgctcaacgcgctggtgcgccgcttcttcgccgagcgcgatgtgctggaggtggaaacgccgatcctgtcggtggcaggcaacaccgagccgaacatcgacagcttccataccgatttcaccggccatgtcgatgccggtggccgtcgtcgctggctgcgcacttcgccggaatatccgctcaagcgcctgctggcggccggtgtgggcgactgctacgaactgggccgggtgttccgcaacggcgaggccggcggccgccacaacccggaattcaccatgctggagtggtatcgggtcggctgggaccaccaccggttgatggaggaaaccgccgagttggtcggccaggcgctggccctggtcggacgccgtgcaacgctgcgtgtgttgagttaccgcgagctgttccagcagcacgtgggcctggatccgttcgaggccgatgaagccgcgctgcgtgttgcgcttggcgacgtgcacatcgacccggtcgggttgacccgtgatgactggctggacctgttgatgacccaccacatccagccgcagttcgatgacgcggtgatgaccgtggtgcatgactggccggccagccaggccgcgctggcccgcatccgtccgggcacgccgccgctggccgagcgtttcgagctgtacctgggtgcagtggagctggccaacggctatcacgaactgaacgacgcccacgagcagcgcgcccggttccagcgggaccagcagcgccgccacgaacgtggacaggtgcagccggccgtggacgaggcactgttgtcggcgttgccgtcgatgcctgcctgtgccggcgtggcggtgggtgtcgatcgcctgttgatggcgatgaaccgcacgccacgcatcgccgatgtgctggcctacgacttcgcccacgcgtga

SEQ ID NO: 494010 - DNA, 486 bp, Stenotrophomonas maltophilia
atgcagaccgccccgctggatttccgcctggccacccgtgccgacgaagaactgttgatcgcgttgatgcgcgagttctacgccgaagacaggatcgacttcgatgacgcgcgcgtgcgtcgcggcgtggacgcgctgctggccgatccgcgcaatggcgaagtgctgctgtggctggacgaggcgggcgaggtggtcggctacgcggtgatcgcgatgggcttcagcctggagcagggcggccacttcatgctgctggacgagctgtacctgagtcatcgcgcgcgcggtcgtggtcgcggcaagcaggcgctggccatctgtgaacagcgcgctcgcgggcgtggtgtcagccgcctgcgcctggaggtgaaccaccacaacgaactggcccgccgcctgtacctggccagcggctacatcgacgacacccgcgatctgctgaccctgccgctcgaccatccgcgcccggagggtatcctgtga

SEQ ID NO: 494011 - DNA, 2466 bp, Stenotrophomonas maltophilia
atgagccccagccccgccgaacgcgccgaagatctccgccggcagatcgcccaggccaaccgcgcctaccacgagctggacgcgccggagatccccgacgtcgactacgaccggatggtgcgcgagctggaagcgttggagcgcgagcacccggaactggcccgtgccgacagcccgacccaacaggttggtgcacgcccgtccggccgcttccccgaagtgcgccatgcggtgccgatgctgtcgctgtccaatgccttcagcgatgaggaagtggccgacttcgtgcgccgcatcgatgagcgcctgggccgccgcagcctgcagttctcggccgaaccgaagatggatggcctggcgatcagcctgcgctacgaggacggtcatttcgtactcggcgcaacccgcggtgatggcagtaccggcgaggacgtgaccgccaacctgcgtgaaatcggcgatgttcccaagcgcctgcacggcaaggactggccggatgtgctggaggtgcgtggcgaggtgtacatggcccgcgccgatttcgaggcctacaacgaacgtgcgcgccagcagggcggcaaggtgctggccaacccgcgcaacgcggcagcgggttcactgcgccagctcgatccgaagatcagtgcgcagcgccggctgagtttcttcgcctacggcaccggtgaagtgcagggcggcgagctgccggacacccattcgggcacgctggcccagctcggcgcctggggcttcccggtcagcgggttgtgcaaggtggtgcaaggcgccgacggcctgctcggctactaccgtgacatcggcgagcgtcgcgatggcctgccgttcgacatcgatggtgtggtctacaagctggatgaccgcgccggccagcaggccatgggttttgtctcgcgtgcaccgcgctgggccatcgcgcacaagttcccggcgcaggaacagagcaccacggtggaggcgatcgagatccagatcggccgcaccggtgccgccacgccggtcgcgcggctggcaccggtggctgtggccggcgtgatcgtgtccaatgccacgttgcacaatgccgatcagatcgcgcgtctcgatgtgcgtgtcggtgacagcgtgatcgtgcgacgtgctggcgacgtgattccggaagtggtcagcgtcatcctcgaccgccgtccacagggcacctcgccctggcagatgccgacgcgctgcccggtgtgcggctcggaaatcgtgcgcgaggaaggtgcagccgcgtggcgctgttcgggcgaactgtcctgccctgcgcagcgcaaggaggccattgcccatttcgcttcgcgtcgtgcgatggatatcgacggcctcggcgacaagtacatcgaaaccctggtcgacgccggcatcgtcaggagcgtggccgatctgtaccggctcaaccgcgaccagctgttgcatctgaagctggtgctggatgccgaggacccttccgcactggccgccgcgctgaagctgcacctgccggcagaaggcagcggcgcggtgctcaatgcggtgctcaagctggatggcaacgatccggcgtggcgcgcgcaggcgctggcacagccggccagcttcgaatggaacacgaagaagatcgccaccaaatgggccgacaacctgatcgcggcaatcgacgccagtcgcgcagccacgctggagcgcctgctgttcgcgcttggcatcgagcacgtcggcgagagcacggccaaggcgctggcgcagtggttcggtgacctggaactgatccgccacctgccatggccgttgttcaagcgcgtgccggacatcggtggcgaagtggcgcgttctctcggccatttcttcgagcagcagggcaaccagcaggccatcgacgacctgctgcaggtcgggcaggtgcgcatcagtgatgtgcacgcgcccagtgccaagctgcgcgaaggcctggatctggcgcaactgctggtcgaatcggaaatccccggcatcacccgcctgcgtgcggagaagctggtggctgccttgccgggtgcccaggcggtgctggatgccgagcatggccagttcgtcaacgccggcctgccggacgacactgcgcgcggtctggccgactggctcgatgccgatggccatggcgcgatgctgctggcagccgagaaggcgatgcagcagatcctggccaaggcgccggcgctggccgagatcgttgccggcccgctggatgggcagaccgtggtgctgaccggcaccctggcccagctcacccgcgatgccgccaaggaacgcctggaagcgctgggtgccaaggtttccggcagcgtgtcgaagaagaccagcttcgtggtcgccggcaccgaggccggctccaagctggacaaggcgcaatcgctgggcgtgccggtgtgggacgaagaccgcctgctggcctacctcgccgaacacgaatga

SEQ ID NO: 494012 - DNA, 1125 bp, Stenotrophomonas maltophilia
atgaccctgcctgactcccgtagacgcttcctgcagctggccggtgccagccttgccgtcgccggcagcggcctgccgctgcgtggccaggcccaatccgcggccaccgtcggtgcggcccctgccgaaggcgcggtactactgaacttcaacgaatgcccctacggcccctcccccgctgcccagcaggcggcgcgcgacagcatcgccagctgcggccgctaccgcttcgccctggcggcacaggtgcgcgatgccttcatcgagcaggcccgtatcccggccgaccatgtgcgcctctatccgggctcgagcgaaccgttgaaccgcgccgccacgttgtggaccggcccgcaggcgggactggtggtggccgaccccaccttcgagaccctgggcgaggtcgctgccgcacatggtgcacacgtgcagaaggtgccgctgcgcaatgacggcgcacacgacctgcgtgcgatggtcgcagccgcgcatgcgcgcccgaccgggctgctgtacgtgtgcaatccgaacaacccgaccggttcgatcagcccaccggatgagctcgcctggctgctggcccacaagcctgcttccacccgcgtgctggtcgacgaggcctacctgcaatacagcgagcagcccagcctgatcgcgcaggtggcacagcgcgacgatctgatcgtgctgcgtacattctccaagctgtacggcatggccggcctgcgcctgggcctggcggccgcacatcccgagcgtctgcgcgagctggccagccccggcgacaacccgctaccggtgcccgcgctggcggcggcgctggccagcctgcaggatccgcagctgattccgcagcgtcgcctgcagaacgccaaggtgcgccaggccaccatcgcatggctgggcaagcgtggtttcagctgcctgccgtcggaagcgaactgcttcgtggtcgacgtgcaacgcgacggcagcacgttcgccaaggcgatggccgacaacggtgtggtgatcgggcgcagctggccgatctggccgcagcacgtgcgcgtgaccgtcggcagcgaggacgagatggccgcgttccgccgcgcgtttgccaaggtggccggcgtaccggcgtag

SEQ ID NO: 494013 - DNA, 738 bp, Stenotrophomonas maltophilia
atgtccgacacggcactgttgcgcatcggcatcctggccgccggcctgctgttgatcgccgcgatcttcctgtttggccgtccgaagaagaagccccagggacggcgcgtggaaagcgcggaaccggccagcggcgagcgccgcgaaccggtattgggcgaggacggcgttgtcgtagccgatggccgcgtcgaaccgggcatgggcacggaaggcgaacaggccgaactcggcctgggcgataccgacccgggcgccagcgatctcggcaagcgcgccacccaggatttcgacaagatcgtttcgctgttcgtggccgcccgtgccggtgagcagctgcgcggcgaagacatcgtggtagcggcggagaagaccggcctggtgttcggccacatgaacgtgttccaccgtctggtggaaggccatcccgagcgcgggccgatcttctcgatggccagcatcatgaagccaggcagcttcgacatggccaacatccgtgccatggaaaccccggccatcgccttcttcctgaccctgccggcgccgctgaccgcgctggatgcctgggagaagatgctgccgacggtgcagcgcatggccgaactgctggatggcgtggtgctggatgacagccgcaacgccctgggtcgccagcgcatcgcgcacatccgtgacgaactgcgcgcctacgaccgccagcaccaggcgccgccgctgaccaagaccccgcgctggtga

SEQ ID NO: 494014 - DNA, 3504 bp, Stenotrophomonas maltophilia
atgcgtctttccacgatcaagctgtccggcttcaagtcgttcgtcgatccgaccaccctgcacctgccgaccaacatgaccggcgtggtgggccccaatggctgcggcaagtcgaacatcatcgatgccgtgcgctgggtcatgggcgagagttcggccagccgcctgcgtggcgactcgctgaccgacgtgatcttctctgggtccaatgcccgcaagccggtctcgcaggctaccgtcgagctgatcttcgacaactccgaccacacgatctccggcgaatacgcctcgttcaacgaaatctcggtcaagcgcacggtcagccgcgacggcaccagcaactattacctgaacggcaccaagtgccgccgtcgcgacatcaccgacctgttcctcggcaccggcctgggcccgcgcagctactcgatcatcgagcagggcatgatcagccagatcatcgaggcgcgcccggaagacctgcgcgtgtacctggaagaggcagccggcatctccaagtacaaggagcgccgcaaggagaccgagacccgcatccgccacacccgcgagaacctggaccggctgggcgacctgcgcgacgagatcagcaagcagctcgaacacctcaagcgccaggccaggcaggccgagcagtaccaggccctgcaggaagagcgccgggtcaaggatgccgagtggaaggcgctggaattccgtggtctcgacggacgcctgtcgaagctgcgcgaaggcctgtcgcaggaagagaccaagctgcagcagctgatcgccgaccagcgtgatgccgaggcccgcatcgagacctcgcgcgcgcggcgcgaagaggccgccgacgcgctcaacaccgcgcaggccgcggtctaccaggtcggcagcacgctggcgcgcctggaacagcagatccagcaccagcgcgagctgtcgcagcgcctgcacaaggcgcgcgatgaaacccagcaggccctggccgaactgggccagcacatcagcggcgacgaggccaaactgagggtgctgcgcgaggcagtggaggccgccaccccgcagctggaggcgctgcaggaagagaacgagatcaagcaggaaagcctgcgcgaggccgaagaccggctggccagttggcagcagcgctgggagcagcacacctcgcagagttcggaggcgtcgcgcgccggtgatgtcgagcgcacgcgcgtggactacctggacaagcagatcctcgacgccgaccggcgtcgcgaggccctggccgccgagcgcgccgggctggacgtggacgcgctggaagaagccttcgagcagctgcacctgcagcacgacacgcagaaggccgcgctggatgaactgagcgaagacgtcgagctgcgcaagcagggcgtggcggccgtgcaggaacagcagcgcaatggccagaacgaactggccgaactgcgcaagcaggccaacggcctgcgcggtcgcctggcctcgctggaaaccctgcagcaggccgcgctgggccaggagcagggcgcggccgtcgcgtggctgaaggcgcgcgggctggattcggcggcacgtgtcggcgaacgcctggacgtcgatgccggttgggaaaacgcggtggaaagtgcgctcggccagctgatcgaaggcgtgctggtcgatgacccgggcagcctggtcaacgccctcggcgaactcggcgacggccacattgcgctggtcgccagcgcggatgccgaggtcaaggctgcaccgacgtcgctggccgcacgcgtgcgtggcccggcggcgatccgtcgcctgctggcgcacctgcatggtgccaaggacctgtccgaggcgaaggccctgcaggccagccttccggaaggcgattcgatcatcacccagagcggcgagcgcctgggccagggctggctgcgcgtgtcgcgctccggtgcagcccagcagggcgcgctgctgcgcgaacgcgagatcaacgagctgcgcgagcagatcgagcagctgcaggaccgcgaggccgagctggaagaacagctggccggtttccgtgagcagctgcaggcggctgaacagcagcgcgaggacgcgcagcgcgcgctgtaccaggcccaccgcgcggtgtccgagctggccggccagctgcagggccagcagggcaaggtagaggctgcacgcacgcgcatcgaccgcatcgaaggcgagttgaagcaactgcaggaaacgattgaagccaacaacgcgcaggcgcgcgaagcgcgctcgcggttggagaacgcggtcagcagcatgggtgatctggagtcgacccggcagcggctggagggcgagcgccgccagctgaccgaggcgcgcgacctggcccgcgatgctgcccgtgcagtgcgcgagcgctcgcattcgctggccctgaccctggaatcgcagcgtgcgcagctggcctcgttgagccaggcgctggagcgcatgggcacccagcgtgggcagttggattcgcggctgggcgagctgcactcgcagctggacgaaggtgattcgccggtcgaagcgctgcaggccgaacaccagaatgcactggaagagcgcgtgcgggctgatcgcgtgctgaccgaagcgcggacgctgctggacggcatcgacgccgagctgcgcaattacgagcagacccgtcaccagcgtgacgaacaggcgctggcccagcgcgagcgtatttcgcagcgcaagctggaccagcaggcactggtgctcagcgcggacaccctgcaggcggcggtggaaaaggccggcttcgtgctgcaggacgtgctcaacgcactccccgaggatgcgcgcctgggcgactgggagcaggccgtgcatcagatcgacgcacgcatgcgccggctggagccggtcaacctggccgccatccacgagtacggcgaggcttcgcagcgctcggattacctggattcgcagcacaccgacctgactacggcgctggaaaccctcgaggatgccatccgcaagatcgaccgcgagacccgcggccgtttcaaggacaccttcgaccgcgtcaatgctggcgtgcaggcgctgtacccgcgcctgttcggtggcggccacgcctacctggagctgaccggtgaagacctgctcgacaccggtgtgaccatcatggcgcgcccgccgggcaagcgcgtgtccagcatctcgctgctgtccggcggcgagaaggcgatgacggcagtggcgctggtgttcgccatcttccagctgaaccccgcgccgttctgcctgctggacgaggtggacgcgccgctggacgaagccaacgtcggccggctggccaacatggtcaaggaaatgagcgagaaggtgcagttcctgttcgtcagccacaacaaggcgacgatggaggccgcgcaccagctctcgggcgtgaccatgcgtgaaccgggcgtcagccgcctggtcagcgtggacctggaagaagccgcgcgattggcgggcgcggcctga

SEQ ID NO: 494015 - DNA, 450 bp, Stenotrophomonas maltophilia
atgcagctgatcctcctgcagaaagtcaccaacctcggcaacctgggcgacctggtcgacgtgaagccgggctacggccgtaacttcctcgtgccgcagggcaaggccgttccggccaccgagagcaacaaggccgagttcgaagccaagcgcgccgaatacgaagccaaggcccaggccatccacgccgacgctgacgcccgcaaggccaagctggacggcgcgagcgtgaccatcccggccaacgcttcgaccgaaggcaagctgtacggctcggtcggcgcccgcgaaatcgccgatgccttcaccgctgccggcctgccggtcagcaagagcgaagtcatcctgggcgaaggcgccttccgcaacatcggcgagtacgacgtgctgatccacctgcacgccgacgtcgagaccaccgtcaaggtcgtcgtcgtcgccgaagcctga

SEQ ID NO: 494016 - DNA, 231 bp, Stenotrophomonas maltophilia
atgtccaagttcttccgtcgccgcaagttctgcaagttcacggctgaaggtgtgaaggagatcgactacaaggatctcaacaccctgcgccagtacctgaccgagaacggcaagatcgtgccgagccgcgtcaccggtaccaagtcgaagtaccagcgccagctggcgaccgccgtcaagcgcgctcgcttcctggccctgatcccgtacaccgacaaccacgacgtctga

SEQ ID NO: 494017 - DNA, 438 bp, Stenotrophomonas maltophilia
atgagtcgtcattacgaaatcgtgttcatggtccacccggaccagagcgagcaggtcccggccatgatcgagcgctacaagtcgctggtcgagaacggcaacggcaccatccaccgtctggaagactggggccgccgccagctggcgtacccgatccagaacctggtgaaggcccactacgtgctgatgaacatcgaagccgaccaggccgttctgaacgaactgaccgaaagcttccgcttcaacgatgccgtgctgcgcaacctggtcatcaagcgtgacgaggctgacaccgagcagtcgctgatcatgaagagcaaggacgagaagggtgacaagccggagcgcggtgagcgccgtcgtcgtgacgacgaagaaggcgagtccaccaccaccgctgacaacgaagccggcgacgacgccgcttccgccgcctaa

SEQ ID NO: 494018 - DNA, 543 bp, Stenotrophomonas maltophilia
atggaacgaccgcttttcacctatcaccccaacgcctacgacctctccttcgaagaggtcgaggggatctgcgactgctgcggccaggcgcgcgcactgcgctatcgcggaccgttctatacccgcctgcgcccggattacctgtgcccctggtgtatcgccaatggcagggctgcggccagttacgagggcgagttcaccggctggagcgatatcgagggggtatccccggatccggctgatccgccgccgaccatcgcccgtgagctgctgctggagatctgcgagcgcaccccgggctactcctcctggcagcaatcggtctggttgagccattgcgaacggccctgcgccttcctcggctacgccggcagcgacgatctgctgccgatcctcgaccaggtccggccggacgtggcggcggtcaatccgcgcgacgccgactgggtgctggagcatctgagccgggacgggatgatggtcggctgcctgttccaatgcctggaatgcggccagcatcgtcttcacgtcgatctggaatga

SEQ ID NO: 494019 - DNA, 339 bp, Stenotrophomonas maltophilia
atggccgtcagcctgacccccattgccttcgagcgcgtgcagcgcttcgtcgcccagacccccggcgcgctgggcctgcgtttcggcgtgaccaagaccggctgctccggctggggccacgtgaccgacctggcccgcgaagagcgcgagggcgacacggtgttcgagcaggagggcgtgaagatctacgtcgacgccaagagcctggcgctggtggacggcaccgtgatcgacttcggcaagcatggcctgagcgagaccttcacgttcagcaacccgaacgccaccgccgagtgtggctgcggcgagagcttcaccaccgacgccgacaaggcctga

SEQ ID NO: 494020 - DNA, 1395 bp, Stenotrophomonas maltophilia
atgacggtggtcagcgttgaacatgcgcttgccgggaagatcccggaaggcggcgaagtcacggtacgcggatgggtgcgcacggtgcgcggttcagcgaatctggccttcgtgaatgtgagcgacggctcctgcttcgccccgatccaggtcgtggccggcgacagcctggccaacttcgatgagatcaagcgcctgaccagcggctgctcggtcatcgccaccggcacgctggtgaagtcgcagggcaagggccagtcgttcgagatccaggccagcacgctggacgtggtcggctgggtcgaagacccgctcacctacccgatccagcccaagccgatgtcgccggagttcctgcgcgaagtggcgcacctgcgtccgcgcaccaacctgttcggcgcggtcacccgcatccgcaactgcctggcccaggccgtgcaccgcttcttccacgagaacggcttcaactggatcagcaccccgatcatcaccacctccgacgccgaaggcgccgggcagatgttccgtgtgtccaccctggacatggtgaacctgccgcgtgacgagaagggcgcgatcgatttcagccgcgacttcttcggcaaggaaaccttcctgaccgtgtccggccagctgaacgtcgaggcttactgcctggcgctgagcaaggtctacaccttcggcccgaccttccgcgccgagaacagccacaccacccgccacctggcggagttctggatgatcgagccggaaatcgccttcgccgacctggccgaagacgcgcgcctggccgaagagttcctgaagtacctgttccgcgcagtgctgaacgaacgcagcgacgacctggccttcattgccgagcgcgtggacaagaacgcgatcaccaagctggaagacttcatcaacgcaccgttcgagcgcatcgactacaccgacgcggtcagcctgctgcagaagtccggcaggaagttcgacttcccggtcgaatggggcctggacctgcagaccgagcacgagcgctggctgaccgaggaacacgtcggccgcccggtggtggtgaccaactatccggagcacatcaaggccttctacatgcgcctgaacgacgacggcaggaccgttgccgcgatggacgtgctggccccgggcatcggcgagatcatcggcggcagccagcgcgaagagcgcctggacgtgctggacgcgcgcatggcccagttcggcctggatcgcgagcactacagctggtaccgcgatttccgccgctatggttcggtgccgcacgccggcttcggcctgggcttcgaacgcctggtggtgtacgtctgcgggctgtccaacatccgcgatgcgatcccctacccgcgcgcgccgggcagcgcggacttctaa

SEQ ID NO: 494021 - DNA, 300 bp, Stenotrophomonas maltophilia
atgaccctgttcttcgccctctgtttcgtcggcgttgcagtggccgggttcagtgccttcgtgatcttctggccgctgaccctggtgcacgtgcgcgaccgccatccggcgctcgccgcgcgcttcggcagcggcgccttcctcaagcccgatgccctggcctggctgctgcgacgcgactatcggcagcaaccggaccgctcgctgtccgggctggcgacaccggcctgggtatcgctgctgaccctgctggccggactgggcatggccgccctgctctggctggcctcgctctggtaa

SEQ ID NO: 494022 - DNA, 315 bp, Stenotrophomonas maltophilia
atgaatgacatcaccgcctcgcgcgacagctggtggctggccagcctcggcaacaccctcatctgggcgcgcctgcgcgttcgcccggccggcactgccgaagtgctcgacagcgatggcaacacgctgagctacgacagcgaagacaccgcccgttcgcagttgttcgacgccgagttcgtcgagtacgacggcctggacgaggaggacgcactggtgcgcggcttcagtctgcacgaagtgcagccgccgcaggccgacagcgacgagggcctgcgtggccgcatgatccagtcactcggcgggcgcgcctga

SEQ ID NO: 494023 - DNA, 639 bp, Stenotrophomonas maltophilia
atgttcaccccgcgcgccttcgccgagaccgacctgctctggctggaccgcctgctggcgcgcgacccgttcgttgccgtgctcacccccggcagcgatggcctgccggagctgacccggatgccggtgctgtaccggcgtgacggcgaccagatcgaactgcgcgggcactgggcccgcgccaacccgcagtcgcgccacagcggcgcggccaaggtgctggtcgatggaccgcacggttacgtctcggccagctggtatccggacaaggagcccgccgcgcgggtacccacctggaactatgcggctgccgagctgcgtggccagctgcagaccttcgacgatgccggcgcgctggcggagctggtcggcgcgatcagcgaccgcttcgaagccagtgtcggccaggcctggcagttcgatgccacgcgtgccgaacatggcccggagctgcgcgccatcatcggcttccgtttccaggtcgaacatgtgcagatgaagctcaagctgagccagaaccatcccgacgccaaccagcgtgcggtgatcgccgaactggaacagctgggcaccccctcttccaccgagttggcgcagtggatgcgctggcaccgcgaacaggccgcccgcagcgactga

SEQ ID NO: 494024 - DNA, 663 bp, Stenotrophomonas maltophilia
atgaaagacatccacaagctgctgcagaacaaccgcgactgggccgaccggatcgagaaggaagaccccgagttcttccaccagctggccaagcagcagcacccggaatacctgtggatcggctgctccgattcgcgcgtgccggccaaccagatcatcggcatggccccgggcgaagtgttcgtgcaccgcaacgtcgccaacgtggtcgcgcacaccgacctgaactgcctgagcgtggtgcagtacgcggtggaccagctgaaggtgaagcacatcctgatcgttggccactacggctgcggcggtgtgcatgcctgcctgcacaacacccgcgtcggcctggccgacaactggctgcgccacgtcggtgacgtgatgcagaagcacaccggcatcctcgatgcgatcgagaccgatgagctcaagcacgcgcgcctgtgcgaactgaacgtgatcgagcaggtggccaacctgtgccgctcgaccatcgtgcaggatgcgtgggcccgcggccagaagctgatggtgcatggctgggtctacagcctgaaggacggacgcgtgcgcgagatgggcatcgacgtcggttcgcaggaagagctgcagcctgcatatgaaaaggccctgtcctacatcccgcgcaagggcaagcgcgactga

SEQ ID NO: 494025 - DNA, 522 bp, Stenotrophomonas maltophilia
atgctcgcttcgccgatcaacctgcacgcctggatcgaagagaaccgccacctgctgaagccgccggtgggcaacaagatgatcgacaacggcgatttcatcgtgatggtggtcggcgggccgaattcgcgcaccgactatcactacgacgaaggccccgagtggttctaccagctcgaaggcgagatggtgctgaaggtgcaggaagacggcgcggtgcgcgacatcccgatccgcgccggcgagatcttcctgctgccggcaaaggttccgcactcgccgcggcgcccgcccggtggcatcggcctggtggtcgagcgcaagcgcctgccgcacgagatggacggcgtgatctggcactgcgagcgctgcaaccacaagctgcacgaagagttcttcccgctgcagaacatcgagaccgatctgcccaagatgtttgcgcgctaccacgccagcctggagctgcgcacctgcagccagtgcgggcacgtggatccgctgccggcgccggcggtgggctga

SEQ ID NO: 494026 - DNA, 1275 bp, Stenotrophomonas maltophilia
atgtccgacctgctcagccgcacccacgccatcgccctggacgccgccgatccgctgcgcccgctgcgcaatgaattcctgattccgcgccatgagggcggcgagcagacctacttcgtgggcaactcgctgggcctgcagccgcgcggcgcgcaggcagcggtgcaggaagtgatgaagcagtggggcgaactggcggtggaaggccacttcaccggcccgacgcaatggctgtcctaccaccgcctggtgagcgcgcagctggcccgcgtggttggcgcgctgcccagcgaagtggtggcgatgaacacgctgagcgtaaacctgcatctgatgatggtcagcttctaccggccgaccacgcagcgcccggtgatcctgatggaagccggcgcgttcccgaccgatcgccacgcggtggaagcccagatccgcttccatggcttcgacccggccgagtgcctggtggaagtgcagccggacgaagccaacggcacgatttcactgaacgccatcgagcgcgccatgaccgaacacggcccgcgcctggcactggtgctgtggcctggcgtgcagtaccgcaccggccaggccttcgacctcgatgcgatcacccgcgccgcccgcctgcagggcgcacgcatcggcttcgacctggcgcactcggtcggcaacctgccgctgcgcctgcatgacgtggcccccgatttcgccgtgtggtgccattacaagtacctcaacagcggcccgggcgcagtggctggcgccttcgtgcacgagcgccaccaccgcgacaccaccctgccacgctttgctggctggtggggccatgaggaagccacccgcttccagatggcgccgcagttcactccggccatcggcgccgagggttggcagctgagcaatccaccgattctcggcctggcaccgctgcgtgcctcgctggacctgttcgagcgcgccggcatggaggcgctgcgcagcaaatcgctggcgctcaccggcatgctcgaagcactggtgcgcgcgcgcctgccgcaggtgctggacatcatcaccccggccgatccgcagcgccgcggctgccagttgtcgctgcgcgtgatcggtggccgcgagcgtggccgcgcactgttcgagcacctgcgcggcatcggtgtgctcggcgactggcgcgaacccgacgtgatccgcatctcgcccaccccgctctacaaccgctacctggacgtgcaccacttcgtcgaggaagtggaagcctgggccggcctttga

SEQ ID NO: 494027 - DNA, 1368 bp, Stenotrophomonas maltophilia
ttgatcgcacatgcttcccgctcgttgagcattatcggtgccggcctggccgggtccctgctggccatcctgctgtcgcggcaaggctggcgcatcaccctgtacgaacgccgcggtgatccgcgcgtggctgattacgagagtggccgctcgatcaacctggcattggccgagcgtgggcgcaatgcgctgcgccaggcaggtgtggaggacgaagtgatggcacgcgcggtgatgatgcgcggccgcatggtgcacccccgcgacggcgaaccgcagctgcagcgctatggccgtgatgacagcgaagtgatctggtcgatccaccgcagcgatctgaacaccacgttgctggaactggccgagcaggccggcgccaccgtgcacttccatcggcgcctgcacaccgttgatttcgacgccggttacgcgcgtttcatcgatgaccgcgacgacagcccgcacgacatccgcttcgacaccctgatcggtgccgacggcgccggttcggccctgcgcgcggcgatgaaccgccgtgccccgctgggcgaggacatcgccttcctcgaccactcctacaaggagctggagatccctccggccgccgacggcagcttccgcatcgagcgcaatgcgctgcacatctggccacgcggccattacatgtgcatcgccctgcccaaccacgaaggcaccttcaccgtcaccctgttcctgcccaaccagggcgatcccagcttcgccacggtcaacaccggcgcgcaggccgaggcgctgttcgcacgggagttcgccgacaccctgccgctgatcccgaacctgcgcgcggactgggaacagcacccgccggggctgctcggcacgctcaccctggagcgctggcaccagcacggtcgcgccgtactgatcggcgatgccgcgcatgcgatggtgccgttccacggccagggcatgaactgcgcgttcgaggactgcgttgcgctggcccgccacctgatggaagcggatgacctggaaggcgcgttcgccgcgttcgaagccgagcgcaagccgaatgcacgtgccatccagcagatggcgctggagaactacctggagatgcgtgaccgtgtcgccgatcctgcgttcctgctgcagcgcgaactggagcaggaactgcagcggcgctggccgacccgcttcgtgccgcactacacgatggtcaccttcctgcacacaccgtacgccgaggcgctgcgccgcaccgaactgcaacgcgacatgctggtggccgccaccaccggtcacgattcactggacaacatcgactgggccgcgctggaagcgcagatcaacgcgcagctgccggtcctggagggcgcgcactga

SEQ ID NO: 494028 - DNA, 1440 bp, Stenotrophomonas maltophilia
atggccgacagcttcctgttctacgacctggaaaccttcggccaggacccgcggcgcacgcgcatctcgcagtacgccgcgatccgtaccgatgccgacctcaacgagatcgatacgccggtcagcttcttcgtgcgcccggccgatgacctgctgccctcgccgatggccaccctggttaccggcatcaccccgcagcaggccctggccgagggcatcagcgaggccgaggccttcgaccgcatcaacgaacagctgtcgcgccccggcacctgcgcgctgggctacaacacgctgcgcttcgacgatgaattcgtccgctacgggctgttccgcaatttccacgacccgtacgagcgcgagtggcgcaacggcaattcgcgctgggacctgctggacatgctgcgcctgatgcgcgcgatgcgcccggacggcatccagtggccgctgcgcgaggacggcgccacctcgttcaagctcgaacacctggccgaggccaacaacgtgcgcgagggcgatgcgcacgaagcgctgtccgacgtacgtgccaccatcggcatggcacgcctgttcaagcagtcgcagccgcgcctgtgggagtacgcgctgaagctgcgtgacaagcgcttcgtcggcggcctgctggacgtggccgcgatgaagccggtactgcacatttccatgcgctacccggccagtcgcctgtgcgcggcgccagtactgccgctggccgtgcacccgaccatcaacaaccgggtgatcgtgttcgacctggacggtgacatcgacgacctgctggcactgccggccgaggtgatcgcacagcgcctttacctgcgcgccagcgagctgcccgaaggcgtggcgcgggtgccgctgaaggaagtgcatctgaacaaggtgccagcgctgatcgcctggaaccacctgcgcgccgatgaccacgcgcgcctcggcctggacgtggccgcgatcgaggccaaggtggaacggctgcgcgcgttcgccccgcagctggccgagaaggcgcgccaggtctacaaccaaccccgcgtcgccaccgtggccgacgtcgatgcctcgctgtacgacggtttcctcggcaacggcgacaaaccgctgcttgcgctggcacgcaccaccgcgcccgagcagctggccgcgctggaaggccgtttccgcgacccgcgcctgccggagctgctgttccgctaccgcgcgcgcaaccaccccgacagcctcgcgccggcggaacgccagcgctggcaggattaccgccgccagcgcctgctcggcgacggcgggctgggcgaactcaacctgccccagtacctgcagcagctcgatgcactggccgccgaagcgcccgacgacgcgcggcgccaggccctgctgcaatcgctgcgcgactggggccagcacctgcaggagacgctgtga

SEQ ID NO: 494029 - DNA, 687 bp, Stenotrophomonas maltophilia
gtgagcacctacttctcggacgccagtttcaggttcctgcgcagcctggcgcggcacaacgacaaggcctggttcaacgaccaccgccagcagtatgaagaccacgtacggcagccgttcctgcgcctgctgggcgacctgcaaccggccctggccgaggtcagcgaacacttccgtgccgatacgcgcggcgtcggcggctcgctgttccgcatccaccgcgacgcgcgcttctccaacgacaagtcaccgtacaagacctggcagggcgcgcgcctgttccatgagcgccgccgtgaagtagccgcgccttcgttctacgtgcacctgcagccgggcgagagcttcgtcggtgccggcctgtggcatccggaaccggaaacccagcgccgcgtgcgccacttcatcctcgacaacccgggcagctggaaggccgccgcgcacgcaccgggcctgcgcaagcgcttcgatttcgaggagagcgaaaagctggtgcgtccgccgcgtggcttccccgccgacttcgagttcatcgacgacctcaagcaccgcaactgggtgatgtggcgctcgctggacgacgccaccatgaccggtccgcgcctgctgtccacgctgggcaaggatctggccgcgctcggcccgttcgtcgactacctgtgcgcggcgctggacctggaattctga

SEQ ID NO: 494030 - DNA, 981 bp, Stenotrophomonas maltophilia
atgccattggcacagcaacgccgcacgctgggccgcaccggcctggcggtttcgccggtgggcctgggctgttccggcttctgggggcatcgccgattcccggaacaatcggccgcgaacgtggtcgagcatgcactggcacagggcgtgaacctgttggacaccggccacaactactccggtttccacgccgagccgcggctgggccgcatcctgcgcccgttgctgaaacaatacccgcgcgacgcactggtgatttccagcaagggcggcacgctgaccggccaggccggcgtcagcggcgccgagcaacgcaacttctcgccggcagccatcatcgccagctgcgaggcttcgctgcgcaatctcggcctggatcacctggatatctaccagttgcatggcgccagccagcacgacatcaacgacgacctgctggccgcgctgcagcgcctgcgcgaacgcgggttgatccggcacaccggcatcaacacccactcggcctcgaccctgcgctggatgatcgcccatcccgacgccttcgatgtggtgctgctggactacaacgccctgcagcaggaccgcgaaccgctgatcgaccagttgcaggcggtgggcatcggcgtgctggccgggaccgtgctggcgcagggccacctgctgcccgcgcgcccgcgcctgccacggctggccgatggctggtacctggcgcgcgcctggctgaagcccagcagccggcagctgatgcgcagtgcccgccagatgcgccgggcagtggccgcgatccgcagccaacgcccggcccagaccgccttcgcctatgcgctgggccatcccggcgtggccagcggcatccttggcaccacccgtacccgcagcctcgacgaggtgctggcgacgcggctggaagcgctgaccccggccgaacggcaacagctggtcgatgccttcggtgacggccgtggctcgcccagtcattga

SEQ ID NO: 494031 - DNA, 552 bp, Stenotrophomonas maltophilia
atgaagaaactcaccgcactcattgtgctgctggtcctggccgtcgccgcctggtggttcggcggcccctacatgaccgtcaatggcctgtccaaggccatcgagcagcgcgacaccgcccgactggagcgttacgtcgacttcccccgcgtgcgcagcagcctgcgtgcgcagctcaacgactacctggtgcgccaggccggccccgacgtggcatccagcccgttcggcgccctgctctatgggctgggcgaccagcttggcggtgccgcagtggagaccatggtgaccccgaccgggatcggcgcgatgctgcagggccacgtgctgtggaagcgtggccgcaatgaactgcagggcggcgatgccttcggtgcgaccgaaccggcgcggccgctgaagcatgccgagcatcatttcgaagcactggaccgattcgtgatcgacgtcgatcgcggccccggccagccaccgttgaaggtggtgctggagccgcagggcctgcgctggaaggtggtggacctgcagctgggaatgtcgggcagcccttga

SEQ ID NO: 494032 - DNA, 945 bp, Stenotrophomonas maltophilia
atgggcgacaactccccccgtttgctgaccgtcgcggtgacctcgcgcgcgctgttcgacctcgaggaaagccatgcgctgttcgaaagtgatggagtggaggcctacgccgaattccagcgccagcacgaggacgatatcctcggccccggcgtggccttcccggtggtgcgcaagctgctggcgctgaaccagggcgccagcccggagaacccgcgggtcgaggtgatcctgctgtcgcgcaactcggccgataccggcctgcgcatcttcaattcgatccagcattacggcctgggcatcatccgtgcgaccttcaccgccggcgagccgacctggccgtacgtgaagccgttcggtaccgacctgttcctgtcggccaaccccgaatcggtgcgcagcgcgctgcgtcatggcatcgcggcggcaaccatcctgcccaagccgccgggcgagaccgctgcggcagccgccgaccagatcgatactggtcgcccggccggccagctgcgcatcgccttcgatggtgacgcggtgatcttcggtgacgagagcgagcgcatctcgcgcgagcagggcgtggaagcgtttggccgccacgagcgcgagcgcgcccgcgagccgctcagcggcggacccttccgtggcttcctgtcggccctgcatacgctgcaggaagtgttcccggccggcgagagcgcgccgatccgtaccgcgctcgtcaccgcgcgttcggcaccggcgcatgagcgggtgatccgcaccctgcgcgagtggggcgtgcgcctggacgaggcactgttcctgggcggccgtcacaagggcccgttcctccaggccttcggtgccgacatcttcttcgacgattcgcagcacaacatcgacagcgcccgcgagcatgtggccgccggccacgtgccgcacggcgtcgccaacgaggggtag

SEQ ID NO: 494033 - DNA, 774 bp, Stenotrophomonas maltophilia
atgagcgacaccccccgcatcgctttcctggccagcgccaccgaacctgcacagatggcccgcgccgcgatggtctcgcgttatggcgatcacgcgccggagcaggccgacgtgctgtgtccgctggggggcgacggcttcatgctgcagaccctgcaccggcatgggcacctgggcaagccggtgttcggcatgaagctgggcaccgtcggcttcctgatgaaccagtaccgtggcgacgacgacgtgcaggcccgcattgcgcgtgccgaaccggccaacctgcgcccgctggaaatggtggcgctgaccgagtcgggcaccagtaccggttcgctggcctacaacgatgtctcgctgctgcgccagacccggcaggccgcgcatatcggcatcgacctcaacggccaggaacgcgtggccgagctgatcggtgacggcgtgctggtggccaccccggcgggcagcaccgcctacaactattccgcgcatggcccggtattgccgctgggctcgcacaccatcgcgctgacgccgttggccccgtaccggccgcgtcgctggcgcggggcgatcctcaaggccgataccgaggtgcgcttccgcgtgctcgatccgtacaagcgcccggtcagcgtcacggcggattcgcacgagacccgcgacgtggtcgaggtgaccatccgcgagtcgaaggaccgccgcgtgaccctgctgttcgacccggagcacaacctggaagaccggatcctgagcgaacagttcgttttttga

SEQ ID NO: 494034 - DNA, 4977 bp, Stenotrophomonas maltophilia
atgaaaccgcaaaaaaccgcagccaagaccgtgaaaaacaagacgaaaccagcagagtcggaggtcgcagtgaccgctggtttctccctggagccggtgtacacggccttgcgcaagcgctaccccgcggccgcacaggccgaagcggtggccttcgccactgacttctacaagcgcatggaatcggacgagttcccgcaccacagcgctgaagagtgggccgcgctcgcggctgagacgctggaattcgcccgtgcccgcaaggccggcaaggccaacgtccgcgtgttcaatccgactgcgaaggccaacggttgggaatcgccgcacaccgtgctgcagatcgtcaacgacgacatgccgttcctggtcgataccgtcaccatgtcgctggccgagcagggcgtgggtgtccacgtgctgggccacccggtgctgcgcttcacccgcgacaaggccggcaagctggtcaaggtcggcgagggcgatgccgagtcggtgatgctgctggagatcgaccgccagccggccgacgccatggctgccatcgaacaggccatcaacaaggcgctggacgaagtgcgtgcgatcgtgcgcgactggcagccgatgaaggacaaggcgctggcgctggccgacgacctcggcagccgccagctgccggtcgacgacgcatcgcgcaaggaagcacaggagttcctgcgctgggccgccgacaaccacttcaccttcttcggctaccgcgagtaccgcgtcgagaagcagggcaaggaagaggtgctggcgccgctgaacgacaccggcctgggcctgatgcgcggcaaggacaagtccgccgcccgtccggtcaagaccctggccgcgcagggcctgaacaccacgtccggtctgaaggatgcgctgatcctgaccaagaccaatgcccgttcgcgcgtgcatcgcgctggctacatggattacatcggcgtgctggaattcgacgccaagggcaagatcatcggcgagcagcgcttcctcggcctgttcacctccagcgcctacaaccgccgcccgtgggaaatcccgctggtgcgccagcgccacgagcacgtgatgaagcagtcgggcctggccccggccagccacagtggcaaggccctgcgccacatcctggaaaccctgccgcgcgaagaactgttccagtccagcgaggacgaactgttccgcaccgcgatgggcgtgctgggcctgcaggagcgcgtgcgcagccgcctgttcctgcgccgcgacaagtacagccgtttcatctccgcgctggtctacctgccgcgtgagcgcttcaacaccgacgtgcgcctgcgcatcgaagcgatgctgaaggacgcgctgcacggcgagtacgtcgacagctcggtggtgctgggcgaatcgccgctggcccaggtgcacctgatcgtgcgcccgaagccgggtgagatgctcgacgtcgataccgccgaactggagcagaagctggcccaggtgctgcgcaactggcaggacgacctgcgcgaagcgctggtggcccgccacggcgagaccgaaggcctgcgcatcgccgcccgtatcggcaaggcgctgccggccggctacatcgaagacaacagcaccgcggttgccgccaacgatgtcagccagctcgacgccctgaccggcccggacgacctgcgcctgagcctgcaggccgtgccgcgcgaaagcggtgatggcctgcgcctgaagctgtatcgccagctggacgacattccgctgtcggacgcgctgccgatgatggaaaacatgggcctgcgcgtgatcgccgagcgtccgtaccgcctgtcggtcgacaacgccccggtgtacgtgcaggacttcgaggtcgagtcgaccgccggcgcgatcgatgccgccagtgtcgatgaagccttcggcgagaccttcgcccgcgtctggcacggcgatgccgagaacgacggcttcaaccgcctggtgctggctgccggcctgcactggcgccaggtcgccatgctgcgcggctactgcaagtacctgctgcagaccggcgtgccgttctcccaggcctacgtggaaggcaccttcgcgcgctacccgctgctggcccgcctgctggtcgagctgttcgaagcccgcttcgatccggccaccggccacgaaagcaaggacgacatcgccgccggccaggcccagctgaaggcccacttcgacgtgctggctgccggtgacgatgccaccttgaaggtgctcaagaccgtggtcgacgcccgcaagggtgaccgcgacgcgcagatgcaggccgcgcgcgatgcgctgctgaagctgatggaccgcgtgtccagcctggacgaggaccgcatcctgcgctcgttcatgggcgtgatcgacgcgaccctgcgtaccagctactaccagaccgatgccaacggccagcacggccatgtcatcagcttcaagttcgattcggcgctggtgccggacctgccgaagccgcgcccgtaccgcgagatcttcgtctacggcccgcgcgtggaaggtacccacctgcgcttcggcgcggtcgcccgtggtggcctgcgctggtcggaccgtcgcgaagacttccgtaccgaagtgctgggcctggtcaaggcacagatggtcaagaacaccgtcatcgtgccggtcggcgcgaagggcggcttcttcgccaagaccccgccggtgaacggcgaccgtgatgcgatcttcgccaacggcgtggcctgctacaagctgttcatccagggcctgctggacatcaccgacaacatcgtcaacaacaagatcgtgccgccggtggatgtcgtgcgccacgacatggacgatccgtacctggtggtggccgccgacaagggcactgcgaccttctccgacatcgccaacggcctggccatcgcgcacggcttctggatgggcgatgcgttcgcctccggtggttcggtcggttacgaccacaagggcatgggcatcaccgcacgcggtgcgtgggagtcggtcaagcgccacttccgtgcgctgggccgtgacagccagagccaggacttcaccgcggtcggcgtcggcgacatgtccggcgacgtgttcggcaacggcatgctgctgtcgcgccacatccgcctggtggctgcgttcgatcaccgccacatcttcctggacccgaacccggatgcggccaccacgttcgtcgaacgtgagcgcctgttcaccgtgccgcgttcgagctgggcggactacgatgccaagctgatcagcaagggcggcggcgtgtacccgcgcagcctgaagtcgatcgagatcaccccgcaggtgcgtgaagcgctgggcctggacgagaacgtcaaggcgctgtcgccgaacgaactgatgagcgcgatcctgaaggcaccggtcgacctgctgtggaacggcggcatcggtacctacgtcaaggccgccagcgagcagcacagcgatgtcggcgaccgtgccaacaacgcgctgcgcgtgaacggtggcgagctgcgctgcaaggtggtgggcgagggcggcaacctgggcatgacccagctgggccgcatcgaagccgcgcaggccggcgtgctgctcaacaccgacttcatcgacaactcggccggtgtcgacacctccgaccatgaagtcaacatcaagatcctgctcaacgatgtggtgcgggccaagaagctgaccgtcgagcagcgcaacaagctgctggcctcgatgaccgatgaagtcgccgagctggtgctcaacgacaactaccgccagaaccaggcgctgagcctgatggagcggatggcggtcaagcgcctgggttccaagcagcacttcatccgtaccctggaacagcagggcctgcttgatcgccagatcgagttcctgccgtccgatgccgagctgtcgcagcgcaaggcgcgcggccagggcctgacccgtccggaactgtcggtgctgctgtcctactccaagctggtggcattcgcccagctgctggattcggacatcccggaagatccgtacctgtccaaggaactgcagcgctacttcccgaccccgctgcagaagaagtatgccgacgcaatggagcgtcaccgcctgaagcgcgaaatcatcgccacggccgtgaccaaccagaccatcaaccgcatgggcgccacattcctgatgcgcatgcaggaagacaccggccgttccatcgccgaggtcgccaaggcctacaccatcagccgtgaaacgctggatgcacgcgcgctgtgggcgcagatcgatgccctcgacggcaaggtgccggagtcggtgcagatcgacgccctggaagtgatctggaagctgcagcgctcgttcgtgcgctggctgctgtcgcgccccggcgcgatgcccggcatcaccgaagcggtcaaccgctaccagggcccgttcaacgacatccgcgttgcctcgggtgtgctgccggattcgcagcgtccgacctacgaagccctggtggccgagtggaaggaaaagggcctgccgtccgcgctggcgcagcagctggccgaactgcacttcctggagccggcgttcgacatcatcgaactggcccgtacccgcaagctgaagccggtggacgtgtccaaggtccacttccgcctgggcgatgccctgcagctgccgtggctgttcgagcaggtcgatgcgctggaggtcaatggccgttggcacgcggtggcacgtggcgtgctgcgtgacgagctggccgccaaccaccgcaacctggcgggccaggtgctgggtaccaagggcagcagtgccgaagcaaaggtggcggcctggatgggtcgcgacgacagcagcctgcgcttcaccctggcgatgctggccgaactggccgagcagaagaccctggactacccgaccgtttcggtcgcggtgcagcgcctgggccagctggctgcgcatggtgcgtaa

SEQ ID NO: 494035 - DNA, 657 bp, Stenotrophomonas maltophilia
gtgaacccggcctacctccccgttgccctcgacgcgcgcgatgagcgcgtgttcgatgccgtgcgcagactgctggccgagcagggcatgcagatgagcatggacgcggtggcccagcatgccggctgctccaagcagaccctgtactcgcgctacggcagcaagcaggaactgctgcgccgggtgatgcagcgccacgtcggccacgccaccggggccatgctgcgtgcactccgcggtgacgacctgcgtgccagccttctccagttcgccaccgacttcctggagcatttcaaccaaccgcacgtaggacaggcctgccggctgattgcagccgaggcagcccagtttcccgaagaggcgcgtacgctttaccggcacggtgccggcgcgctgacgcttcatcttgctgaatggattgaaaccgtttgcatgcaaggccagctccggcatgacgacccgcacttcatggccgaactgctgctgagcatgatcgccggtcaggatttcgacaaacagcgcttccataccccccatcgtgatgacgcgctcctgcgtcggcgctgggcagagttctccgtcgacagcttcctgcgcgcgttcgcgccacagccgtcgccggccccgtctacaaaccaaccccggagttcctcctga

SEQ ID NO: 494036 - DNA, 1269 bp, Stenotrophomonas maltophilia
atgaccgccccactccgcacccttgccttgacgtgcgccgttgctgtcgcgctggctgcctgcaagaagccggaacagcagacgcccccgccgccggaggtgggcgtgatcgacgccaagccgcagaccctgccgctgcagcgcgagctggtcggccgcctgtcgccgttccgcagcgccgacgtccgcgcacgcgtacccggcgtgctgctcaagcgcgtttaccaggaaggttcgcaggtcaagcagggccagaccctgttcctgatcgacccggcgccgttgcgtgcctcgctcaacgcctccgaggcccagctggcttcggcccgcgccacctacgccaatgccaaggtcgccgccgatcgcgcgcgctcgctggcgccgcagcagttcgtctccaagtccgacctggacaacgccgaatcggccgagcgcaccgccctggccgccgtcaagcaggccgaagcggcagtgacctcttcgcggatcaacctgggctacgccgaagtgaccgcgccgatcagtggcgtggccaacaagcagcaggtcaccgagggcgcgctggtcggccagggcgatgtgaccctgctgaccaccgttgaccagctcgacccgctgtatgtgaacttctcgctgagcgtggatgagctgacccagcttcgcgcgcagcaggccaagggctcgctggcgctgtccggcgacggcaaggccacggtcaacgtcaagctggccgacggcagcacctatggtgagccgggcacgctggacttctcctcgaccacggtcgacccggccaccggtgcggtgtcgctgcgtgcgctgctgccgaacccccagcagatcctgctgccgggcgccttcgtcagcttccaggccaacctgggcgagcgcaacaatgcctacctggtgccgcagcaggcgctgctgcgtgacaccaccggcggctacgtgatggtggtcggtgccgacggaaaggtggtgcgcaagaacgtgaagaccgatggcgcgcagaacggcaactggctggtcagcgacggtctggccgccggtgacaaggtgatcgtggccggcgtgcagaaggtcaaggaaggtgcaccggcggtggccaagccgtggaccccggggcaggacgccaacggcaagcctgccgcaggcggcgccgctccggcgggcgcagcaccggcggcaggcaaggcaccggccgacgcggccaagccggaacaggccgatgcggccaagccggccgccaccgattcgaacaagcagtaa

SEQ ID NO: 494037 - DNA, 3174 bp, Stenotrophomonas maltophilia
atgcctaaatttttcatcgaacatccagtcttcgcctgggtggttgcgatcctgatctcgctcagcggcgtgatcgcgatcctcaacctgggcgtggagtcctatcccaacatcgccccgccgcaggtcaccgtctcggcgacctacccgggcgccagcgcggacaccaccgagaaatcggtcacccaggtgatcgagcagcagctgaccggtatcgatcacctgctgtacttcagctcttcgtcggcctccaacggccgcgcgcagatcaccctgaccttcgagaccggtaccgatccggacatcgcccaggtgcaggtgcagaacaaggtgtcgctggccacgccacgactgccttcggaagtgacccagcagggcgtggtggtggccaaggccaatgccggcttcctgatggtggtggcgctgcagtccgataccccgaccatcaaccgtgacgccctgaacgacatcgtcggctcgcgcgtgctcgaccaggtctcgcgtatccccggcgtcggcagcacccagcagttcggttccgagtacgccatgaacatctggctgaacccggagaagatgcagggctatggcctgtcggccagccaggtactggccgcggtacgtgcgcagaacgtgcagttcgccgccggtgcgctgggttcggacccgtcgccggaaggccagcacttcaccgccacggtctcggccgaaggccgcttcagctcgccgcaggaattcgagaacatcatcctgcgcgccaacgccgatggctcgcgcgtgctgctcaaggacatcgcccgcgtcgccttcggtgccaacaactacggcttcgacacccagtacaacggcaagccgaccggcgccttcgccatccagctgctgccgggcgccaacgccctgaacgtggccgaagcggtgcgcgccaagatggacgagctgcagcccagtttcccgtccggggtgacgtggttctcgccgtacgacagcaccaccttcgtcaagatctcgatccaggaagtggtcaagaccctgtttgaagcggtcctgctggtgttcctggtgatgctgatcttcctgcagaacttccgcgccaccctgatcccgaccctggtcatccccgtcgccctgctcggtaccttcctgggcatgtggatgatcggcttcacgatcaaccagctgaccctgttcgcgatggtgctggcgatcggcatcgtggtcgacgatgcgatcgtggtgatcgagaacgtcgaacgcatcatgagcgaggaaggcctggcgccgaagccggccacgcagaaggcgatgacccagatcaccggcgcggtggtggcgatcaccgtcgtgctggcggcggtgttcatcccgtccgccctgcagggcggcgccgccggtgagatctacaagcagttcgccctgaccatcgccatctcgatggcgttctcggcgttcctggcactgggcttcaccccggcgctgtgcgcgaccttcctcaagccgacgcacaacgacaacccgaacatcgtctaccgcaccttcaacaagtactacgacaagatcagccacacctacgtgggccacatcacctcggcggtgcgccatgcgccgcgctggatgatcctgttcgtggtgctgaccgcgctgtgcggcttcctgttcacccgcatgccgggcagcttcctgccggaagaagaccagggctatgcgctggcgatcgtgcagctgccgccgggctcgaccaagggccagaccaacgaagtgttcgcgcagatgcgtggcatcctggaaaagcaggatggctatgaaggcatgctgcaggtggccggcttcagcttcgtcggttccggcgagaacgtgggcatgggcttcatccgcctgaagccgtgggaggaacgcaagttcaccgcgcccgagttcatccagaacatgaacggcgcgttctacggcatcaaggaagcgcagatcttcgtggtcaacctgcccaccgtgcagggcctcggccagttcggcggcttcgacatgtggctgcaggaccgcagtggtgccggctacgaacagctgacccaggcgcgcaacatcctgctgggcaaggccgcgcagaagcccgaagcgctggtcggcgtgcgtccgaacgggctggagaacgccccgcagctgcagctgcacgtggaccgcgtgcaggcgcagtcgatgggcatgtcggtgtcggacgtgtacagcaccatccagctgatgctggccccggtctatgtcaacgacttcttctacgaaggccgcatcaagcgcgtgaccatgcaggccgatggcccgtaccgcaccggccaggagtcgctgaagagcttctacagcccctccaccctgacccagaacgccgatggcaccaacgcgatgatcccgctcaacacggtggtcaagtccgaatgggtgtcggcaccgccgtcgctgagccgctacaacggctactcggcgatcaacatcgtcggctcgcaggcaccgggcaccagctcgggcgaagcgatgcagaccatggagagcatcgtcaacgacgacctgccggccggcttcggctacgactggtccggcatgtcctaccaggaaatcctggccggcaatgccgccacgctgctgctggtgctgtccatcgtggtggtgttcctgtgcctggccgccctgtatgaaagctggtcgatcccggtggcggtgctgctggtggtgccgctgggcgtgctgggcgcactgggcctgtcgatgctgcgcggcctgcccaacgatctgttcttcaagatcggcctgatcaccgtgatcggcctggccgcgaagaacgcgatcctgatcgtggagttcgcggtggagcagcgcgcagccggcaagaacctgcgcgatgccaccatcgaagcggcccgcctgcgcttccgcccgatcctgatgacctcgttcgcgttcatcatgggcgtgatcccgatggcgatctccaccggcgccggcgccaactcccgccacgccatcggtaccggcgtgatcggcggcatgctgttcgccaccctgctcggcctgctgatgatcccggtgttcttcgtggtcgtgcgccgcatgctgggcgacaagctggatgaaccgtccaaagagttcatggaacgccagcgcgacgcggatgctgcacaccgcccggatcgttga

SEQ ID NO: 494038 - DNA, 318 bp, Stenotrophomonas maltophilia
atgcaggccgtttccatacggtctgcacagatgatctatcgtggttggggaatcctgacactgatcacgccgatcgcagcgatcctgctgctggcgtatttcttcccgcacgcaggccccaagggcaacaccccactctcgcaggtgttgctgggtgccagcattggcgcggcggtgaacgtgctgctgggcctgtggctcaaccgggcaccccggcagaagggcgaagtggcgccccatcatttctttttcgtgccgatgcagtgggctgcactggtaatcgtggcagtgtgcgtggtggtcgcgctgttgcgctga

SEQ ID NO: 494039 - DNA, 1149 bp, Stenotrophomonas maltophilia
gtggatttcagctttaccgaagagcagttgatgctgcaggacgtggcgcggcgcatcgcgcaggaaaagatcgcccccagcgcggagcaccatgaccgcaccggcgagttcccgctggacaacatccgcctgctgggcgagaacggcctgatgggcatcgaagtgccgaccgagtacggcggtgcgggcatggacccggttgcgtacgtgctggcgatggtggaggtcgccgccgctgacgccgctcactcgaccatcatgtcggtcaacaactcgctgttctgcaacggcatcctcacccacggtaccgagcagcagaagcagacctacgtgcgtgccatcgccgaaggcaccgccatcggcgcgttcgcgctgaccgagccgcagtccggttccgatgccactgccatgcgctgccgcgcggtgaaacaggccgacggcaccttcgtcatcaatggcaagaagagctggatcacctccggcccggtggccaagtacatcgtgctgttcgcgatgagcgagccggacaagggcgcgcgcggcatcaccgccttcctcatcgataccgacaaggccggtttcggtcgtggcaagaccgagcccaagctgggcatccgcgcctcggccacctgcgagatcgagttcaacgattacgtggcgcaggccgaggacgtgctgggccaggaaggcgagggcttcaagatcgccatgagcgtgctcgatgccggccgcatcggtatcgcctcgcaggccatcggcatcgcccgtgccgcctatgaagcgaccctggagtacgtgaaggagcgcaaggccttcggtgccgccatcggcaccttccagatgacccaggccaagattgccgacatgaagtgcaagctggatgcagcgctgctgctgacgttgcgcgcggcttgggtgaagggccagggcaagcgcttcagcaacgaagccgccatcgccaagctcaccgcctcggaagcggcgatgtggatcacccaccaggcggtgcagatccacggcggcatggggtactcgaaggagatgccgctggagcgttacttccgtgatgccaagatcaccgagatctatgaaggcacctcggaaatccagcgcctggtgatcgcccgcaacgaaaccggactgcgctga

SEQ ID NO: 494040 - DNA, 930 bp, Stenotrophomonas maltophilia
atggatctggaagactggtcgacccgcctgaaggtgttcgccgatgccacccgcgtgcgcctgctggcgctgctggagcaggaggaactgaccgtggccgaactgtcggcaatcacccggctggcgcagccgcgcgtgtccacccacctggcgcgcctgaaggaagccggcctggtccgcgaccgccgtgccggcgtgtcggcctactaccgtttcgacgaagcccagctggacccggcgcagcgtgcattgtggcatgccttgagcaacggaagcgacgacccgttgctgcgccaggatgccgagcgcgtggctgcagtgctggcccatcgcgcctctgaccagaactgggccgacagcgtggccggcgacatggagcgccactactctccgggccgtacctgggaggcgctggcgcgcaccgccttgccgttgctggagaccggcgacgtgctggacatcgcctccggtgacggcgtgctggccgaactggtcgccccccacgccaagcgctacatctgcatcgataccagcgcgcgcgtggtcgccgctgccagcgagcgcctgcgccggctgcccaatgtggaagtccgcgagggtgacatgcatgccctgccgttcaaggacggcagcttcgacctggtggtgctgatgcacgcgctgacctatgccagcaagccggcgcaggccgtaaccgaagccgcacgcgtgctgcgcccgggcggccgcctgctgttgtgcagcctggcccgtcacgagcacaaggcagcggtggaggcctatggccacgtcaacctcggcttcagcgacaaggagctgcgcaagttcgtcgacaaggccggcctgcaggtgtccagcctggaaacggtcacccgcgagaagcgtccgccgcacttcgaagtgatttcgctgatcgccaacaagccctga

SEQ ID NO: 494041 - DNA, 1092 bp, Stenotrophomonas maltophilia
atgcccgccctgccctggttgcatcctgatcgtgccaacgccctgctcgacgccctgcgcgagcggatcctgatcatcgacggcgcgatgggcacgatgatccagcgccatggcctgcaggaagacgactaccgcggcgagcgattcgccggtggctatgaccatgcgcacggtcccggctgcgaccacggcacgccggaaggccatgacctgaagggcaacaacgacctgctgctgctgacccggccgcaggtcatcgccgacatccataccgcatacctggacgccggggcggatctggtcgagaccaacaccttcaacgccacttcggtcagccaggccgactaccacctcgaacacctggtgtacgagctgaacaaggccggcgccgccgttgcacgcgcctgctgcgatgcggtggctgcggccacgccgggcaagccgcgcttcgtgatcggggtgatcggtcccaccagccgcaccgcttcgatcagtcccgacgtcaacgatccgggcttccgcaacaccagcttcgacgagttgcgcgacacctatcgcgaagccatcgagggcctgatcgatggcggcgccgacaccctcatggtcgagaccatcttcgacacgctcaatgccaaggccgcgctgtatgcgctggaggaggccttcgacgcgcgtggtgcacgcctgccggtgatgatctccggcaccatcaccgacgcctccgggcgcaccctgtccgggcagaccgccgaggccttccatgcgtcactggcgcatgcgcgcccgctgtcgatcggcttgaactgcgcgctgggcgccgaggcgatgcgcccgcacgtggaaaccctctcgcaggtcgccgactgttacgtcagcgcacatcccaacgccggcctgcccaacgccttcggcgagtacgacgaaacgcctgaagagatggccaccaccctgcgcggcttcgccgaggatggcctgttgaacctggtcggcggctgctgcggctccacccccgaccacatccgtgcgatcgcccgcgccgttgccgggctgccgccgcgcgccctgcccggtgtccaggagcaggccgcatga

SEQ ID NO: 494042 - DNA, 2685 bp, Stenotrophomonas maltophilia
atgacgcctgtccgccctacccgcctgtccggcctggaacccctggtcatcactccggacctgctgttcatcaacgtcggcgaacgcaccaacgtcaccggcagtgcgcagttccgcaagctcatcaaggaaggccgctacgaagaagcggtggacgtggcccgccagcaggtcgccagcggcgcgcagatcctcgacgtcaacatggacgagggcctgatcgattcggaagcggcgatgacccgctacctcaacctgatcatgtccgagccggacatcgcccgcatcccggtcatggtcgactcctccaagtggagcgtgatcgaggccgggctgaagtgcctgcagggcaagagcgtggtcaattcgatctcgctgaaggaaggcgaggcgctgttccgcgaacacgcgcgcaaggtcctgcgctatggcgccgccgcggtggtcatggccttcgatgaaagcgggcaggccgatacctgcgcgcgcaaggtcgagatctgcacccgcgcctaccgcatcctggtcgacgagatcggcttcccgccgcaggacatcatcttcgacccgaacatcttcgccgtcgccaccggcatcgaagagcacgacaactatgcggtggacttcatcgaagccacccgcatcatcaagcagaccctgccgcactgccacgtctccggcggcgtctccaacgtctcgttctcgttccgcggcaacgaaacggtgcgccaggccatccactcggtgttcctctaccacgccatcgccgccggcatggacatgggcatcgtcaacgtcggcgccatgccgatctacgacgagctggagcctgagctgcgcgagcgcgtcgaggacgtgatcctcaaccgccgcagcgatgccaccgagcgcctgctggagatcgccgagcgctacaagggcagcaagggcgcggcgaagaccgaggacctggcctggcgcgggaagccggtggcgcagcgcctggcacatgcgctggtgcacggcctggatgcctttgtcgaggaagacaccgagctggcccggcaggcctccagccgcccgctggacgtgatcgagggcccgctgatggacggcatgaacatcgtgggcgacctgttcggtgccggcaagatgttcctgccgcaggtggtgaaatccgcacgcgtgatgaagaaggcggtggcctacctgctgccgtacatcgaggcggagaaggcacgcagcggtgataccgccaagagcaatggcaagatcatcatggccacggtgaagggcgatgtgcatgacatcggcaagaacatcgtcggcgtggtcctggcctgcaacaacttcgaggtggtcgacctgggcgtgatggtgccggcgcagaagatcctcgatgccgcccgcgagcacaacgccgacctggtcggcctgtccggactgatcaccccgtcgctggaggagatgagccacgtcgcccgcgagatggagcgccagggcttcgacctgccgctgctgatcggcggcgccaccacctcgcgcgcgcacaccgcgctgaagatcgacccgcactacaaagcgcctacggtgtgggtgaaggacgcctcgcgcgcggtgggcgtggcccagtcgctgatctcacgcgacctgcgcgaagccttcgtcgccgccaacgaagccgactatgccgagatccgcgcccgccaccgcaaccgtggcgacgccaagcgcctggtgacgctggaacatgcgcgcgcgcagaaattccagggcggctgggacagctacacgccaccggcaccggaacaacccggcctgcacgtattcgacgactacccgctggacgagctggtcgactacatcgactggacgccgttcttccaggcctgggagctggctggcaagttcccggccatcctcaccgacgagatcgtcggcacccaggccagcgagctgtaccgcgatgcgcgcgcgatgctcgagcgcatcgtcggcgagaagtggctgacggccaaggccgtgttcggcctgtggccggccaacagcatcggcgacgacgtccgcgtgcagcacccgaagggcgaaaccaccctgcacttcctgcgccagcaggtagacaagccggccgagcgcccggacttctgcctggccgatttcatcgcgcccctcgacagtggcaagcaggactggatcggcgcgttcgcagtcactgccggtatcggcatcgacgcgcacgtcgcgcgcttcgaggccgagcatgacgactacaacgcgatcctgctgaaagcactggccgaccgcctcgccgaggcgctggccgagcgcctgcaccagcgcgtgcgtaccgaattctggggccatgagcgcgccgaggcgctggacaacgacgccctgatcgacgagcagtatcgcggcatccggccggcgcctggctatccggcctgcccggaacacagcgagaaacggcgcctgttcgacctgctgcaggccgaagcaaacgccggcatggaattgaccgagagcttcgcgatgctgcccacggccgctgtctcgggctactacttcagccatccgcagagccagtacttcgtggtcggccggctcagccgcgaacaggtcagcgactacgcccgccgcaagggcgtggaccgcgcccaggccgaacgctggctggcctccaacctcgactacgaccccgaatga

SEQ ID NO: 494043 - DNA, 1185 bp, Stenotrophomonas maltophilia
atgaccgttcccgttgcacgcctctccagcttctacctgttctactacgcggcgctgggcgcgttcacgccgtactggagcctgttcttgagcgcgcgcggcatgagcgtgacggccatcagcgtgatgatgggcctgtggtacgccacccgcgtgatcgcgcccagcacctggacctcgctggcggccgcatcgccacgaccgatccgcctgctgcgcgcgggctgcgtgctgaccctgctcagcttcgcggtattcctgctgccgctgccacagccgtggatgtacccggcgatggtggtgttctgcttcttctacaacgcggtgatgccgcagttcgagtcgatcaccctcacccatctgggcaacgacagccatcgctacgggttgatccgggtctggggctcgctcggcttcatcgccgtcgtgaccctgttcggctggctgatcgaagatgacggcacggccagccacgccgggctgctgccgtggatgatgctgccactgttcgcgctgctggtcgcctcggccttcagcaaccactacgcgcgcggcgtcggcaagaccggcggcgacgccagcggcttctggcagatcgtgcgccgaccgccggtgctggcgttcttcctggccgccttcatggagcaactgtctttcggcccgtactacacgttcttttcggtctacatggaccatcacggctaccgcacctccaccctgggcctgttgtggaccatcggtgtggtcttcgaagtgggcgtgttcttcaccatcggccgcttcttccgccgctatgacgccagctggatgctgttgatcgcgctggtcagttcctgcctgcgctgggccgtgaccgcactgttcccggaaaacctgccggtgatgctgctggcgcagagcgcgcacgcgctgggctttgcggcgttcttcgcagcagcgatgcagatgttggcgacctacttccccggtcgcctcaatgggcatggccaggggctgctgtacggattctcgtccggtgtcggcggtgtgctcggcgcactcattgccggccaactgtggaagatcgacgatggtcgcaccgcgttcctggccggcagcggcttcgccctgattggcgccctgctctgtttcttcgcactgagcctgccgctcatacgtgcgcgacggaacagccacgcgcgctga

SEQ ID NO: 494044 - DNA, 2073 bp, Stenotrophomonas maltophilia
atgaccgctgatccaagccgtggctacgtgccgcacattgacggcctgcgcgcgatcgctgtgctggccgtcatcgtgttccacctggacccggcctggttgccaggcgggttcaccggcgtggatgtgttcttcgtcatctccggtttcgtggtcagcgcgtcggtacaccggctgccgccgctgtcgctggggcagtcgatgctgcgcttctatgcgcgccgcatccgtcgcatcgcgccggcgctgttggcctgcctgttgctgactgccgtggcaagcgtgctgttcattcccgagtcctggctcagcgaagccagtgacaggaccggactgatggcgttcttcggcttcagcaactgggtgctggcagcgatcggcaacgactatttcgcacccagggccgaattcaatccctacacccatacctggtcgctgggcgtggaagagcagttctacctgctgttcccgctgctgttcctggcttgggcgcgcggtgcacgcgggcgctggatcagcctgggcctgttcgccctggtcagcatggcgtcgctgctgcatgcggcggtgctgggtctgcgcgaggcgccgccatcgtgggcgttctatgccaccagcacccgcctctggcaactgggggtgggcgtgctgctgttccagctgctgcatgtgcgcgaatcgctggacccggcaaccggccaggcaccgaagcgcgccgcgccggtgttctccctgctggccatggtggcgctgggcctgctggggtgggcgttgtggtccgcgcgtgccgggcggtcaccgtggcctgacggcgtgctgccggccttcgccaccgcgggcctgctgtgggcgctgcatcatcatccgcaggcatgggtggcgcgcctgttggccagcgccccgatgcgccgtatcggccagctgtcgtactcgctgtacctgtggcactggccggtgttcgtgctgatgcgctggaccgtgggcttgcagacacccttgcagatgaccgccgcgatggcgttggtgctgctgctgtcatggctgtcgtggcgctgggtggaacagccgttccgcggcacgttggcgcagcgcctgcgtcccgggcgttgggtgctggccggcgcggtcgtactgctgtgcgccgccggcatccagacagtgctctacctgcaggcgccgcggctgtcgttgagtacggtcagccggcatccggccgattggtaccccaatggcaagagcgtggccggtgactatcccgagtgcgcactggtggtcgccaagcatcgtttcgaaggcggtagtgcgcgcacctttgcccgtggagactgcgaccgcccgctaccggttggcgcgccgaagcgggtgttcgttgctggtgattcgcatgcgatggcctacatcgagctgctgcagcgactggccctggaaaccggctcggcggtctccctctatggccgcggcggatgcccgcaggtgagcctgcagaagtggcgcggtgccggtgccggttgcgctgatttcgacgccgcggtgttcgccgatatcgcgcggcgtgcgcagccgggggatgccgtggtgctggtgtcgttgcgcgtgccacgcctttccgatcagttcgtgctgttcgatgcgcaggcgcagctggcgggcgaactgacggcagaggccgcggcaggacgcgacgccgaagtggccgagacggtcgcgcagtggagacccctggccgagcgtggcgtgcgcatcgtgctggaggcgcccaagccagtgctgccagcgcctccttatcgctgctcggaccgcttcaatgcccgcaacgaggtctgccgcaacggcctggacagcacgcgcgtcgcgatggaaacgttgcgggcacccatgctgggcagcctgcagcaggtggtcgatggactgccaggtggcgtgctgtgggacccgatgccggtgccgtgcgacgacgcgttatgtccagcccagcgcgatgggcggccgctgttcttcgatggcgatcatctcagtgcgcatggcaatcgggtgctgctgccctcgctgcaacaggttctgttgcagcgctga

SEQ ID NO: 494045 - DNA, 681 bp, Stenotrophomonas maltophilia
atgagcgataccctccgcgaccagctgatgggcctgggcttcaagcctgcgcccaagccagagcgcaagaatgatggcccccgccgtgacggccgcccgcagggcaagggtggcaacggcaatggaaagccgcagggcgctggcaagggcgagcacaagcccggccagcgtcgtggtcctggccatggcggcccgggcaagcccggccagtcgcgtggcccgggccagcagggcccgcgcaagccgcgcagcgcagaagagatggacctggccaaggcctacgccatccgcgcgcagaaggaaaaggaagagcgcatcgaaaccgagcgcctgaagcaggaagaggcgcgtgtgcgccgcgaggccaaggccaagctggaagaactgctgaaggacaagggcctgaatgccgaagcggcggacattgcccgccacttcccctacggcggcaagatcaagcgcatctatgtaaccgccgaacagctgaccgcgctcaacgccggtgagctgggtgtggtccagctcaatggccgctacctgctggtgaccgccgaggtgctggcgcagtgcgaggcggtgttcgccgcatcggtggcgctgaaggtcgatccgaatgcgccggccgaggaagatccgtacgcggacccgcagtaccaggtgccggacgacctggtctggtaa

SEQ ID NO: 494046 - DNA, 243 bp, Stenotrophomonas maltophilia
atgtctgatctgctgccaaccgaacgcgagcaggcgctggaagcgcgcctggtcgaactggaaatgcgcgtgtccttccaggaacaggcgctggccgaactgagcgatgcgctggccgatgcccgcatgcagggcatgcgcaacgccgacgtgctgcgtgtgctgctggaagatctgggcaaggtccgcaacgcgctgaattcttccgatccggcgagcgaaccgccgccgccgcactactga

SEQ ID NO: 494047 - DNA, 1350 bp, Stenotrophomonas maltophilia
atgcgcgttgcgattttcggtaccggttacgtagggctggtgaccggtacctgcctggccgatgtcggccaccaggtggtctgcgtcgatatcgaccaggccaaggtcgatggcctcaaccagggcatcatcccgatctatgagccgggcctggaaccgatggtgaaggccaatcacgccgcgtcgcggctgacgttcaccaccgatgccgcagccgcgatcggccacggccaggtcgtgttcatcgctgtcggcacgccgccggacgaggatggcagcgctgatctgcagtacgtgctggccgtggcccgcaccatcggccagcacatgagcgtgccgaccgtggtggtcaacaagtcgacggtgccggtgggcaccgccgacaaggtccgtgccgccattgccgcagagctggcggcacgtggcgccgacatcgccttcgacgtggtgtccaacccggaattcctgaaggaaggcgacgccgttgccaactgcatgcgtccggatcgcatcatcatcggtgcgaccagcgccgagtcggtggcggtgatgcggcgcctgtatgcaccgttcaaccgcaaccacgaccgcgtggtggaaatggacgtgcgctcggccgagctgaccaagtacgccgccaacgcgatgctggcgaccaagatctcgttcatgaacgaaatcgccaacatcgccgaacgtgtcggcgccgatgtggagcaggtccgccagggcatcggctcggatccgcgcatcggctggcatttcatctacccgggcgccggctatggtggctcatgcttccccaaggatgtgcaggcgctggcccgcaccgcgcagcaggccggcctggagcctaaactgctgaacgccgtggaagcggtcaacgatgcgcagaagggccatctgttcgccctggtccagcgccattacgacaagggcgaggatgaaggcgtgcgtggcaagacctttgccgtgtggggcctggcattcaagccaaacaccgacgacatgcgcgaagcctccagccgacgcctgctggcgcaactgtgggaaggcggtgcgacggtgcgtgcctacgatccggaagcgatgcatgaggcgcagcgcatcttcggtgaacgcgatgacctggtgttctgcagcaatgccaacgaggcgctgcagggcgccgatgcactggtcgtggtgaccgagtggaagcagttccgcagccccgatttccagacgctgcgcgagcagttgaaggacgcggtggtgttcgacggccgcaacctgtacgagccggcggacgtggaagcagcgggcctggcgtattacggcattggccgggggcgctcgctgcatgtctga

SEQ ID NO: 494048 - DNA, 978 bp, Stenotrophomonas maltophilia
atgaagatgggaatgcgcggcgccgcggcgtcggttctgattctggcgatgggcacttcgggtgtcgctctgtcgcaacaaccggctgcccccgcagccgccaaggagaccgcaaccttgaattcccccaagcagaagctcggctacgccatcggcctggacgtcgccaagtcgttcaccccgatcgccgatgagatcgatgtggccgcgctgcgcaccgccgtggaacgttcgttcgaaggcctgcagccgcagatcacccaggaacaggccaaggccaccgatgccgcactgcgccaggtcgtgatggcccgcagcgggcagcaggtgccgggcatggcgccgggttcgcagccgccgaaggtcgaccgcgtcaaggtgtcgcagatgatcggttcctactcggtcggcccgtcgctggcacagctgaaggacgacatcgacgtcgcctcgctgtttgacgcgatcagcaccggcctgagcaagggtcagccgaagatgacggaagctgacgcgaccgccaccatccaggcgttcatgggcagcaagcaggccgaaatgcaggccaaggccgccgctgccgcgcagaccaaccgcgaggaaggcaatgcgttcctggccaagaacaagacccagccgggcgtggtgaccaccccgtcgggcctgcagtaccaagtcatccgcccgggcagcggtgagcgtccgctgccgagcagcaaggtgcgcgtgaactacgaaggcaagctgctcaacggcaccgtgttcgacagctcctatgggcgccagccggccgagttcggcctggaccaggtgatcaagggctggaccgaaggcgtcgcgctgatgccggtcggttcgaagtaccgcttctggatcccgggcgagctcgcctacggtgagaacggcaccccgggtggcccgatcggcccgaacgcgactctgacgttcgacgtcgagctgctgggcgtcctgccgtaa

SEQ ID NO: 494049 - DNA, 588 bp, Stenotrophomonas maltophilia
atgcccctgccgaccgttgtcccgcgccgactgcgcggcctgtccctgttgaccctgctggtggccggcctggccggttccgcccatgtgctggcggccgatctgctggacctggactatcgcccgctggccagcaagcagcaggtcaacctgcagcagcgctaccacgggcaggtgctgctggtggtcaataccgcaagcaagtgcggctataccccccagtacgaaggcctggaggcgctgcagaagcgttatgccggccgcggctttgccgtgctgggtttcccgtccaacgatttcaagggccaggaaccgggtgacgagaagcagatccaggatttctgcacgcttacctatggcgtcaagttcccgatgttcgagaaggtgcacgtcgtcggtgcggaggccacgccgctgtaccagcggttgaccgcagccaccggcgtggcgccgggctggaacttccacaaatatctggtcggccgcgatggcaaggtcatcgcccagttcgccagcaaggtgacgccggacgatccacagctgaccgccgccatcgacaaggcgctggccgtcgctcctaagcattga

SEQ ID NO: 494050 - DNA, 237 bp, Stenotrophomonas maltophilia
atgaacgcccggatccgtcgcaacctcaccgcacccgcggccgctgccgtttcgaccctgatcgtgctggcctggctggccatgccaaccgcccccgcctccgccgacagtgcgcaggatgcatccgtttcgccggccgggaacgccgattcctccccccctcccccgcgtcggctgcacagctccctgtccatgccgtatttctcgttcgcacagccgctgaccccacggagctga

SEQ ID NO: 494051 - DNA, 360 bp, Stenotrophomonas maltophilia
atgagcgacatccagtggagcgacggcgctcccatctaccgtcagttgaaggagcgcgtgatcgccatgatgctcgacggaatcctcaagccgggcgatgccctgccttcggtgcgccaggtggccgccgactaccagctcaaccccatcaccgtttcgcgcgcttaccaggaactggccgatgaaggcctggtcgagaagcgccgcggcctgggcatgttcatgaccgagcaggcggccacgcagctgcgcagcagcgagcgcgagcgctttctcaatgaagaatggccggcggtgctggagcgcatccagcgcctgggcctgagcctcgacgaattgctgccccaggggaaagtctga

SEQ ID NO: 494052 - DNA, 876 bp, Stenotrophomonas maltophilia
atgaatagcactgcaagtgaaccggtcatcaccgcccgaggcctgcgcaaggcctacaagaccaccgtggccctcgacaatgccagcttcagcattccgagcgggcgcatcgtcggcctgatcgggcccaacggcgccggcaagaccaccgcgctgaaggccatcctcggcctgacctcggtggaaggtgagttgagcgtgctcggccgcgacccgcggcagcaccgcgacgcgctgatgaacgacatctgcttcattgccgacgtcgccgtgctgccgcgctggctgaaggtccgtgaagcgatcgatttcgtcgccggtgtccatccgcgcttcgaccgtgcccgctgcgagcgtttcctggccaacaccaagctgcagccgaagcagcgcgtgcgcgaactgtccaagggcatgatcgtgcagctgcacctggcgctggtgatggccatcgatgcgcgcatcctggtgctggacgagcccaccctgggcctggacatcctgtaccgcaaggagttctaccagcgcctgctggaagattatttcgacgaacagaagaccatcatcgtcaccacccaccaggtggaggagatcgagcacatcctcagcgacgtcatgttcatccgtgatggtcgcatcgtgctcgatgcagaaatggacgatgtcggccagcgctacaccgagcttctggtcaacgccgaccagctggagaccgcgcgtgcgctgaagccgatcgacgagcgcagcctgacgttcggcaagaccgtaatgctgttcgacggtgtgccgcgcacccagctctccacccttggcgagacccgcagcccgggcctggccgatctgttcgtcgccatcatgaaggggacctacgcatga

SEQ ID NO: 494053 - DNA, 1029 bp, Stenotrophomonas maltophilia
atgactgccgtcaaccaccccgtcagcccgatgggcaccctgcgctggctgctcaagcgcgagtactgggagaaccgtggcggtttcctgtatgcgccgctgatcgccggcctgatctcgctggtgatgagcaccgtcggcatcgccttcggcctgtttgcactgaaccgtgcagcacgcaacggcgcactgcatgtcgacggcgagagcgtgaacatcaacggcctggacctggccctgctgacccgcgacatcagcgccaaggacctggccgacctcggcaacggcctcgacctgaccctggtgctcagctcggcctggccgttcctggtgctggccttcgtggtgttcttctactgcctgggcgccctgtacgacgaccgtcgcgaccgcagcatcctgttctggaagtcgctgccgctgtcggacacccagaccgtgctgtccaaggtgatcagcgcactggtcgtggccccgctgatcgcggtgatcgccggcatcatcaccatgttcggcttcatgctggtgatcagcatcgtcgcgctgatgcacggtggcagcccgatgaccctgatctggggcccggccagcccgttgaccctggccgccggtcacctggcctggattccggtctacgccctgtgggccctgcccaccgccggctggctgctgctgtgctcggcctgggcccgcaccaaaccgttcctgtgggcggtgatgctgccgctgttcgccggcgtcattgtcagcaccaccaaggtgatgccgttgatcggcctgaccaccggctggttctggcagaacatcgttggccgcctgctgctgggtggcgtgccgggcaccgacctggtgtatcgcctcagcgccgaggaaggcacgcgtcgcgatctcgaatcggtggtcagcctgatgtccccggcctcgcagctgaagtcgctggcgatgccggaactatggatcggtgccgccgtcggtgtcgtgttcatcgtcctcgccatccgcctgcgcaagcgcgccggcgagatctga

SEQ ID NO: 494054 - DNA, 888 bp, Stenotrophomonas maltophilia
atgcgttccctgctcgcctgttctgcgttgttgctgttgcctctgtcggcgctggccgccgatgctccgaactgcaagttcaccgccgcccgcacgctgaagctggatgtggccggcgccaaggcggtggtgctggaggtgaaccagcatgacctgaaggtcgtcgccagcaagggcggtggccagctcgatggccgcgcctgcgcctccagccaggaatggctggaccagctggtactggagcagcgcagggaaggcgacaagctggtcgtcagcctgcgccgcgacggccgccacagcggcatcagcctgggcaacagctatgcctggctggacatccgcggcagcgtgcccgacaacctgcccctgcagctcaaggtcggctccggcgatgccagcgtggacaacgcccaatcgctgagcgtggacgtcggctcgggcgacgcgatcgttcgcggcacccgcggcagcatccacgcagcggtgggttcgggtgacctggacatcgacggtggcggctcgctgaacctgctgtcgctcggctccggcgacgtcaaggcgcgcaacatcggcggcgatgcggtcaccggcaccgtcggctccggtgacctgaagatcagcgatgtccgcggcaacgcccggctggacacggtcggttccggcgacatcgggttcaagcgcgtgcaaggcaacgtcgaggtcggcgtggtcggctcgggcgatgtcgacctgtccgacatcggcggcaacgtgcacgtgcgcagccatggttcgggtgacatccaggtcgacggcgtgcgcggcagcctgaccgtcgaccacagcggcagcggcgatgtcggccaccgcaacgtcggcggcacggtcaccctgccccgcaacaagtaa

SEQ ID NO: 494055 - DNA, 606 bp, Stenotrophomonas maltophilia
atgaacctgctgcgcctgctgcctgccaccctgctgtgcctgccgctgatcgcctgcggcggcacttcttccacgcccgacaagaccgtcggcaaaagcgtcgccgaagccaccagcggcgtcggccagacggtcaaggaggccatggttgatgcccggaaggacattacccagggcaacatcaacatctccgccgacaagcagccgcgtgcggagatcacgccggatggccacctgctgatcgacggcaaggacgtgccggccaacgaggcccagcgacagcggttgctggagtaccgcggccacgtcgtcgccattgcgatggacggcatggatgtcggcctggccggcgccaagctcggcgccagcgctgccggagaggcactgaagggcatcttcagcggcgacagcgaaggcatcgagaagcggatcaatgccgaggcggagaagatcgaagcccaggccaagcgcatctgcaaccgcttgccggcgatgctggccagccagcaggcactggcgcgcgagctgccggcgttcaagccctacgcaacgatggaccagagtgacgtcgacgactgcggcaaggacaccgtggtcaagcgctag

SEQ ID NO: 494056 - DNA, 459 bp, Stenotrophomonas maltophilia
atggcggccccggacgcccccgaaccgaatgccatgaagaagttgttcctgctgctggccgccctgctctgcctgggcctggtcggctgtgacaaggattaccgcaaccaccgcgccgagcgcggcaagccaaagatctccgtcagcgaaggcatggtcactgtgcgtcgcccgccggcgccgaacatcatcatcctcggcgatggttcgatgaaggtggacgagatccagattccgctggacgaggcacagaagcagatgctgcagaccatgttcggcaagctgcaggtgctgcgccagaacaccctggtcgccgccccggccgatcccaacatgcagccggtgaagatccagccgccggaaggcatggaagtgatcccggccgacctggtccagcgcatccccgagttcaaggactacaccgacaccttcggcaacatcgtcgccgaccgtcgctga

SEQ ID NO: 494057 - DNA, 1428 bp, Stenotrophomonas maltophilia
atgagcagagctgcaagcaagggtttcagaatcgaacacgacagcatgggcgagctgcaggtgcctgccgacgccctgtggggcgcgcagacccagcgtgccgtgcagaatttcccggtgtcgggccagcgcatgccgcgcggtttcatccgtgccctgggcctggtcaagggcgctgccgccggcgtcaacgccgagctgggccatctgcccaagaacgtggccaaggccatccagaccgctgccgccgaagtggccgccggcacctgggacgcgcagttcccgatcgacgtctaccagaccggttctggcacgtcctcgaacatgaatgccaacgaggtcatcgccaccctggccaaccgtgccggcaaggcgggcaagaccgcggtgcaccccaatgaccacgtcaaccaggggcagagctccaatgacgtgatcccgaccgcgttgcgcgtatcggcggtactggcggcacatgagcagctgctgccggcgctggtgcacctgcgcaagaccctcgacaagaagggccgcagcctgcgcaaggtggtcaagaccggccgcacgcacctgatggatgcgatgccgctgaccttcgagcaggagttcggcgcatggtcggcacagctggcctcggcacaggaacgcatcgaagacagcctcaagcgtgtgcgccggctgccgctgggcggcaccgccatcggtaccggcatcaatgccgacccgcgcttcggcgcgcaggtggccaaggcgttgaagcagcagaccgggttcaagttcgacagcgccgagaacaagttcgagggcctggccgcacaggatgacgcggtggaactgtcgggccagctcaatgcactggcggtggcgctgatcaagatcgccaacgatcttcgctggatgaacgccggtccgctggccgggctgggcgagatcgaactgccggcgctgcagccgggcagctcgatcatgccgggcaaggtcaacccggtgattccggaagcgacggtgatggcctgcgcgcaggtaatcggccaccacaccgcgatcaccgtggccgggcagaccggcaacttccagctcaatgtcaccctgccgctgatcgcggtgaacctgctggatggcattggcctgctggccaatgtgtcgcgcctgctggccgacagcgcgattgccgggctgaaggtgcgtgaggatcgcgttgccgaagcattggcgcgcaacccgatcctggtcaccgcgctgaacccgatcatcggctacgagaaggcggcggcgattgccaagcgtgcctacaaggagcagcgtccggtgctggatgtcgcgctggaggacagcggcctggatgaagccgagctgcgccgcctgctggacccggccgcactgactgccggtggcatccacgcggggggcggtggcggcggcggttga

SEQ ID NO: 494058 - DNA, 1368 bp, Stenotrophomonas maltophilia
atgtccgattccgccctgctcgccctgtccccgctcgatggccgctatgccggcaaggtcgacgccctgcgcccgatcttctccgagtacggcctgatcaaggcccgcatcacggtcgaggtggaatggctgctggccctggccgccgagccgggcatcgtcgaactggccccgttctccgacgctgccatcgcccgcctgcgcgcgctggccgccagcttcagcccggcccaggccgcgcgcgtgaaggagatcgagcgcaccaccaaccatgacgtcaaggcggtggagtacttcatcaaggaacagctgaaggacgacgccgagctggccccggcgctggaattcgtgcatttcgcctgcaccagcgaagacatcaacaacctcagctacggcctgatgctggaacaggcgcgccgcgaggtgctgttgccgaccctggacggcatcgccagcaccctgcgcaccctggcccacgccgaggctggccagccgatgctgtcgcgcacccacggccagaccgcctcgccgaccaccctgggcaaggaactggccaacgtggtcgcgcgcctggagcgccagcgccggcagattgccgcggtcgaactgaccggcaagatcaacggcgcggtgggcaactacaacgcccacatcgccagctacccggacgtggactggccagccttcgccgagcgcttcgtgaccggcctgggcctggtgttcaacccgtacaccacgcagatcgagccgcacgacaacatcgccgagatcggtgatgccgcacgccgcgccaacatcatcctgatcgacctggcccgtgacatctggggctacgtttcgctgggctacttcaagcagcgcctgaaggaaggcgaagttggttcgtcgacgatgccgcacaaggtcaacccgatcgatttcgagaatgcggaaggcaacttcggcatcgccaacgcgctgttcgagcacttcagcgcgaagctgccgatcagccgctggcagcgtgacctgaccgattccaccgtgctgcgtgcgctgggcaccgcgttcggccacagccaggtggcactggattcgctggccaagggcctgggcaagctggaagtgaacccgcagcgcctggatgccgatctggacgcagcctgggaagtgctggccgaggccgtgcagacggtgatgcgccgccacggcctgccgaacccgtacgagcagctgaaggcgctgacccgcggccagggcatcaccgccgagtcgatgcgtgcgttcgtgcaggggctggagctgccggcggatgcgaagcagcgcctgctggagatgaccccgggcagctacaccggcctggctgagtcgctggcgaagaagatttaa

SEQ ID NO: 494059 - DNA, 927 bp, Stenotrophomonas maltophilia
atgcaacacccccacgatccagcggccgccgccggcagcatcggccagcagaatgcggccgccacgctcaaggccatcctgcgcacctacccctggcagctcaccggcacgttctcgctggtggcgctggagaacaccctgctgctggcctatccgttgttcgccggcttcgcggtagacgcgatcatcagcggcaacatcggccatgccatctcctatgccggcgtggtactgctgttctggctggtgggcgccgcccgtcgggcggtggatacgcgcaccttcacccgaatctatgccgatctggcagtgagcgtggtgcaggcgcagcgccggttgggccaggcgacgtccacttcggcggcacgcgtggtgctggcccgcgagttcgtcgacttttttgaaaagcacgtgccgatcatcgccaccgcgctggcatcgatgttcggtgcagtggccatgctgctggcgatcgagccgatggtcggtgccgctggcctggccaccctgctcggcgccctgctggtgctgccctcgttcgcacgccgcaacgagcagttgcacggccgactgaacaaccgcctggaacacgaaatccggctggtcgaccgggtcagcccctgggtgctgcgccgccactacaccacgctgtcgcgcctgcgcatcctgctgtccgaccgcgaagccggcgcctatgtggtgatcggcctggctgccgcggcattgttcgcgctgaccatcggccgccttgccaccagtgaaggcgttacaccgggccacgtctacgcggtgatgacctacctgtggaccttcgtcggcagcctggacgatgcgccgtcaatggtggatcagcttgcgcggctgaaggatatcggccgccgcgtcagccccggcatggacgatgcggaccacaagggcgtcgcttga

SEQ ID NO: 494060 - DNA, 1077 bp, Stenotrophomonas maltophilia
atgaaccccaaaggcaagagcatcggccgccagatcagcctgtcgatcaccgtggcctcgctgtgttcgacggtgctgtcgatcagcggcttctacctgttctactacctgctggaggtgttctatccgcgctggtatgacgagccgaagtccatgatgccctccgggctggagtggctgtggatcggcctgaccgccaccgtggtggtggcactggccacgttgatcgcctcgcgcctgacccggcgcatcatcaccccgctgaactcggtggccgaaagcctgcgtcgcgtcgccagcggtgatcttgaggcgcgtgcgcgcggcggcgacacctcgatgaccgaggccgccacactggtcagcgacttcaattccatggccgagcggctcagccggatgtccgagaaccgcgtgttctggaatgcagcgatcgcacacgaactgcgcacgccgatgaccatcctgcgcggccgcctgcaaggcatcgccgaaggtgtattcgagccgggccctgagcagttcaacagcatgctcacccagctggagggcctgacccgcatcatcgaggacctgcgcgtggtcagcctggccgagagtggccacctggatctgcgcatgcaacgcagcgacgtcagcgtgcaggtggcggcggtggtggaggcgatgtccgaggcgctgaccgaaagtggcttctcggtgagcctggacgcgcggccgtcgctggcggactgcgatccggcccgcatccgccaggcggtgctggcattgctggagaacgcccgtcgccatgccatcccctgcccgctgcgggtgcgcgtcaccctcgctgaggggcactgcgcggtggccgtggaagatggtggccccggcgtgccggacgacctgcgcgacagcattttcgaagccttccagcgcaccgatgtgtcgcgctcgcggcagagtgggggctcaggtctcggcctggcggtcgtgcgtgcgattgccgtggcccatcacggaacggcgcagtgccgagctaccgagcgtggcggcagttcgttcgagatccgctggccggtgcacgtgcgccgttga

SEQ ID NO: 494061 - DNA, 717 bp, Stenotrophomonas maltophilia
atgaaacaccaactccgtaaccgacagccgcccttggtgctgattgccgaagatgagggcgagatcgccgacatcctcggtgcctacctggcccgttcgggcctgcgcagcgcacgcgccgccgacggtgaggcggcgcttgccagccaccgccagctgcgcccggacctggtgctgctggatgtgcagatgcccaagctggatggctggcaggtgctgagcgaactgcggcgtcgcggcaacacgccggtgatcatgctcaccgcgctcgaccaggacgtggacaagctgaccggcctgcgcgtgggcgctgacgactacgtggccaaaccattcaatcccgctgagatcgttgcgcgcatccaggccgtgctgcgccgcagtgcccgcagcgtggccgaagaacccaccgggctgatccgccagggcccattcgagatcgacctgcgcagccacgaagtgacggtccgcaacggcgagcaggtgcacgcactgaacttcaccctcaccgaattccggctgttggtgcacatggcgcgcgcgccgcgccaggtgcatgcgcgggtggacctgctgcacgcctgcctgcccgagggcgatgcgcaggagcgcaccgtcgacagccatgtcagcaagctgcggcgcaagctcgaggatgtcggcgtgatcggcattcccgccaccatccgtggcgtcggctaccgcttcctggactga

SEQ ID NO: 494062 - DNA, 450 bp, Stenotrophomonas maltophilia
atgtgggtcgcaccgtatccgctactgccgttgctggccggcttcggggccgccgccctgctggggttccgcagtgacgggcccggacgcacccgccgctccgggtcgctcgcatcgctggccttgatcggcctggcgttctggtcggcaacacctccggccgccaacgtcaacctgcatctgctgcttgcgcccgccaccgccgtggtcgccgccctgctggcagtgcgcctgcgcgccatcgtgggcatggcctcgcggctgcaggcccgggtgaacgccacccccatggcctcgcgctggaacgcgctgcctgccgcggtgtctaccctgacgctgcagcagctgcgcggcgcgggttcggtggaccccagcctgcagcgctcgctggtgctggccacgctggcctgggcggccaacgaagaggcgcaggcagcagatgcaggttga

SEQ ID NO: 494063 - DNA, 1182 bp, Stenotrophomonas maltophilia
atgaacaaccgcagaacctggatcattgccgcaacgctggccgttcttgccggcggcggttgctggtgggcgtttgccgatggcgaggatgccgcgttgatcaccgcaccggcaagggtcgccggtctggaaaagaccgtgcaggcggtcggccgggtcaatccgaaagaactggtggccgtgggcgcgcaggtctccgggcaggtcacgcgcctgcatgtggtgctgggccagcacgtgcaggccggcgacctgattgccgaagtggattcacaaccgcagcgcattgccctgcgcagtgccgaagccgccgccaacgcgctgcgtgcgcaacatgcggccagccaggcgcgctaccgccaggcccttcgcacgtacgatcgccaatcgcagctggtggcgtcgcggctggtctcgcaggaaggcttcgaagcggcacgtgtggcgcgcgatgcggcgcgcgcggatgccgctgcgttgcaggcgcagatcgatcaggcggtgacccaggtggaaaccgcccgcatcaacctgggctacacccgtatcgtgtcgccgtccgagggctacatcgtggccatcgtcaccaaggcggggcagacgctgaactcgatgcagaccacgccgaccatcgtgatgctggcacagatggacacgatgacggtgcgcgccgagatcgccgaggctgacgtggaactgatcgcacccggccaaccgttgtggttctcgacgctgggaccgagcgggcgccgctatgaatcgcacctgcagcagcttgagccagcgccgtcgtcgattgccgacgcgtccagcggcaacagcggcggatcggcgcagacgccgaaagcggtgtactacgcggggctgttcgacgtggccaatccgggcttgatgctgaagccttcgatgacggtgaaagtgacgatccagctggcacgcgtggccaatgcactgcaggtgccgctgaccgccctgggcgagtccgacgacaagaacggcaacggcgcaaccgtgcgggtggtcgatgcgaaaggccgcgcccacgagcgcgctgtgactaccggcctgcgcaccgccaccgccgtgcagatcctctctggcctggaagcgggcgagaacgtggtggtcggccaggcgcccagcggtggcgatgccgaacccaccagcctgctggggatgtga

SEQ ID NO: 494064 - DNA, 1944 bp, Stenotrophomonas maltophilia
atggccgacgcactgctgcaattgaagggcgtatcgcgcgcctatcgctcggccgccggcgaggtggtggtgctgaaggaggtctcgttgcgcatcgatgccggcgagttcatcgccatcatcggcccctcgggttcgggcaagtccacgctgatgaacatcctgggctgcctggatcggccgaccgaaggcagctaccgcgtggagggggctgcgaccgagcagatgtcgcctgaccagctggcgcgcctgcgccgcgagcacttcggcttcatcttccagcgctacaacctgatggagaacctcagtgccaccgagaacgtggccttgcccgccgtctatgccggggtggaggccgatgcgcgcaccacgcgtgcccgcctgctgctggaaacgctcggcctgggcgagcggaccgcgaaccggcccagccagttgtccggcggccagcagcagcgcgtctccatcgcacgctcgctgatgaacggcggcgcgatcgtgctggccgatgagccgaccggcgcgctggatcatgccagtggcaggcaggtgatggccgagctcaagcgcctgcatgcgcagggccataccgtgatcctggtcacccatgatgcggcgattgctgcccacgcgtcacgggtgatcgagatcgccgatgggcgtgtggtggcggatcgccaggagcgaggcccttcggtgcggcagcgttcggacgcaccggcgcgcacatccacggcggctaccgagcggcgcgcccgcatcgatgccgtgcgcgaggcgacgcgcatggcagtgcgttcgatgctggcccatcgcctgcgcaccctgctgaccatgctcggcatcatcatcggcgtggccgcggtggtgaccgtggttgcgctgggcaaaggcgcgcaggcgcaggtcgaggcgcagataaacgagctgggcgccagcacgctggagatcttcccgggcgccgatttcggtgacccgcgctcggcggagatcgagacgctggtggtaggcgatgccgatcacctggccgccctgagttacgtggacagtgtcagccccaacctcagcggttcggtagcagcactgcagggcggccgacgagccaatacgcaggtactgggcgccggtgccgatctgccgcgcgtgcgcgggctgcgcctgagggccggccggttcttcaccgatgccgaggtggaggcgcatcgggcagtgggcgtggtcgaccagaaggcagcgaaggcactgttcgctggcaaccctatcggcagcacggtgctgctgggcggcatgccggtcgaggtgatcggcgtggtgggtgccaatgcattcgccggtggggccacgccaaccgtctacgttccctatacgtcggctgcctcccggctgctgggcagccagcgcctggagagcatcaccgtgcgcgtacgcgacaacgtacccaccaatgccgccgaggcctcgctgggcgccgagctggagcgcctgcatggtcgtcgcgatttcttcatctacaactcggaccagatccgcaaggcggtgatgaaatccagccagaccatggcggcgctggtttcggcgatcgcggcggtggcgctggtggttggcggcgtgggcgtgatgaacatcatgctggtgtcggtgaaggagcgcgtgcgcgagatcggcgtgcggttggcagtgggggcccggcagggcgacatcctgcgccagttcctgatcgaggccgtgctgatctgcctgttcggtggggtgctgggcgtactgctggccttcgccgtgggtgcgctgtccagcctgctgtcgctgggggtgccgttcctgttcacgccagggccggtgctcgccgcgctggcatgttcgtcggcaatcgggctgggtttcggctacttcccggcccgcaatgccgcacagctggacccgatccaggcattggcggcggagtag

SEQ ID NO: 494065 - DNA, 594 bp, Stenotrophomonas maltophilia
atggccggactgcctgcctggatcgcggattggctgctggtggtggtgccggtggccgaggtgctggtcattctcggggtggcctggctgatggtgcgtgcactggcgtggctgctcgtgcaggcccggcagcgcggcaggctggctccagagcttcatgtaggcctgcgccgcggcggtgctttgctgctgtatctggcggctgcgctgctgatactggagcgacttggcgtttcgcgctcggtgctgtggaccgcgctgaccgggttcatggcggtcggtgcggtggcgttcttcgcagcatggagcgtgttgtccaacctgttctgttcgttcctgatcgtggctacgcgcccgttccgcatcaacgacacgatcgaagtgctggaaagcgtggacaagccgggcctgtgcggccaggtggtggacatcaacctgatctacaccacgctgagtgaccgtggcgaaggcgcgcgcggttgcctgctgcgcgtgccgaactcgttgttcttccagcgcatcacccggcactggggtgacagcggctattcgcagctgccgggcagcctgccgataaagggcaaggtgcgctga

SEQ ID NO: 494066 - DNA, 867 bp, Stenotrophomonas maltophilia
atggccctgcccgactacccacgtccgcccttcccggcgcagcagcaatccttccccggcaagaccgcgcagatgcagccgcggccggaccacggcgaggacagctaccgcggccatggcctgctgcagggcaagaaggcactgatcaccggcggtgacagcggcatcggcgcagcggtggccatcgctttcgcgcgcgagggtgccgacgtcgccatcgcctttcttgatggcgagcaggacgacgcccgccatgtgcagcagcagatcgaacaggccgggcgcaaggccgtgctggtgccctgcgacatcagcgacccggcgcaggcgcgctcgctcgtcgaccgcgtggccagcgagctggacggtctcgacatcctggtcaacaacgcggcctaccagcgctactacgagcacttcgacgacatcaccctggatgactggaagcggacgttcgataccaatgtccatgccgtgttcaatctgacgcggttgtgcgtgccacacctgcgcggtggcggcgcgatcatcaacaccgcatcggtcaattcgaagcgaccgaccccgaacatccttccgtactctgcgaccaagggcgccgtcgccaacctgacgctggggctggcgggcctgctggccgagcaccagatacgcgtcaacgccgtgctgcccggcccgatctggacaccgttcattccggcaggcatggccgccgaagaggtcgagcaattcggctcgcagacgccgttcggccgacccgggcagcccgcggaactggcctcggcctacgtgatgctggcttcggacagcgccagttatacctccggtgccttgctgaccatctccggcggcgcggcaacgctgtga

SEQ ID NO: 494067 - DNA, 384 bp, Stenotrophomonas maltophilia
atggaaacgaacacttcctgcatcgggcatcgacgctgggctatcgccgaaggctacattccagcctggagcaacggcccgtcgccggagatgcagagtcacgagacctgctgcgtcctcaatgcgggcaacgaggacgcgcatgtcacgctgaccctctacttcgaggaccgcgatcctgtcggtccctaccggatcaccgtgccagcacgacgcacctgccacctgcgcttcaacgacctgcaggatccggcgccggtaccacgcggcaccggcttcgccaccctcatcgaatccgaccagccgatcatcgtgcagcacacgcggctggattcacggcagccggccaacagcatcatgaccacgatcgcccatccgttgtga

SEQ ID NO: 494068 - DNA, 1014 bp, Stenotrophomonas maltophilia
gtgtccagtccccgcacggaatccgtgatgaccatcggctaccacgcatcgcatgagcagttcccgcccgccaccttgctgggcctggcgctgcgcgccgaacaggcgggattcgaggctttgatgtgctcggaccatttccacccgtggacgaccgcgcaagggcagtccggccacagctgggtatgggccggcgcgctggcggtgcagagcgcattgaccctaggcatggtgacctgcccgatgctgcgccagcacccggcattggtggcacaggcagcggcgacgctggagcagttggcgccgggccggatctggctggcgctgggtaccggcgaggccctgaacgagcgcatcaccggccagccgtggccagccaagcgcgagcggcagaaggcattacgcgatgcggccgaggtgatgcggcggctgtggggcggcgagcaggtcgaccacgacggtggcttccgggtgcgccaggcacggctctacagtcgcgcggcgcttcccctgccgctgctgggtgcggccgtcaccgaggaaaccgcacgctggatggggggctgggccgatggcctgatcaccatcagccagccattggcgcagttgcggcgtgtggtggcggcgttcgaggacggcggcggcaggggcaagccgatgtacctgcaggccaagctctcctacgcgcgcgccgaacaggcggcgctggaaggcgcgatggagcagtggagcgccaacgtgctgccgccggaactggccgaaggcctggaccagcccgaacagttcgaagcacaggcccgatcggtcagcgccgaggtggtgcgcgagcacgtgcatgtctcggcagacctgggccagcatcgggcctggctgcaggagctgcagtccctggggttcgatcgcatctacctgcacaacgtgaaccgcgagcaggaacgcttcatcgacgacttcgccgaacacgtactgcctgcgctgcgcactcaggcaccctcggcagccagccacgtatag

SEQ ID NO: 494069 - DNA, 1587 bp, Stenotrophomonas maltophilia
atggcggtgcgtccgctgcgcgccatctaccagatcgacccctacctgttccgcgacagcgacggccgcggctggggcacgctggatggcatcacggaaaagctggactacctgcagtggcttggcatcagccatgtctggctgctgccgttctactgcaacgccggccgtgatggcggctacgatgtcaccgatcactaccgcatcgatccacgcctgggcgaccaggccgccttccagcgcctggtcgatgccgccgacgcgcgcggcatcggcatcatcgtcgaactggtgatgcagcacaccgccagcgcgcacccgtggttcgtcgccgcacagcagggcgacccggcttggcgccgctggtacctgtggagcgaccacatgcctgacgacggcctgcagccgatgttcccgccgatcgaggccgctgtctggacatgggatgccacggccggcgagttcaaccggcacatgttctaccggcacgagccagacctcgacctggcgcatgcgccggtacgcgaggaactgctgcgggtaatgacgttctggctgcagcgcggcgtggccggcttccgcgtcgacgcggtcccgtacatggtcgagcgcgcccgccacgcggacccgcgcgacgacgggctgtggctgctggaggcgatgcgcgcgacggcagacgcacagcagccagggctgccgttgatcggcgaagcggatgtccgcgcgtcccactacggtgacttcctgtgccacgggcggcggctttcgcacctgctggatttccacctcaacaatcatttcttcctggcactggcacgcggcgatgccagcgaagtggcgcgggtcatggccgagtacggcccgcacgcgccgccggacacacgcattgcctggctgcgcaacaatgatgaactggacctggagcagctggagccggatgagcgcgaagcggtgatggaacgcttcgctcctgagcgtggcatgcgcatctatggccgtggcatccgccgccggctggcaccgatgctggacggcgacatcgcatggcaggccatggcctgggcggcgctgctgtcgctgggccaggtgccggtgatccgctatggcgaagagatcggcctcggtgattgcctagaactgcccgaacgcaatgccgtgcgcatgccgatgcactggcataacggcccaggggctgggttcaccgacgaaccgcggcatgcctggcgcgcgccaccgtcggacggcccctacggttaccgcacggtgaatgtcgaggcgcaacgtgcgatgccggactcactgctgctgcgggtgcgcgagctgctgcagcaacgcaatgcccatcccgtgctgcagcaggggccacacacgctcgacccaccctcacccgcgctgctgatgctccgcttcggtgaggcaccccatcaggcactggcactgatcaacttcggcgacaacccggttgaggtggacgtacccctgcacggcccgctgcacacgctggtgggccacggcgccaaactgcagggtcgccgctgctacctgcagggccatggctatacgtggctggctgccgagggtgcctga

SEQ ID NO: 494070 - DNA, 795 bp, Stenotrophomonas maltophilia
atggcccgacgcaagacgcttcgtattgccacgttcaacgtcaacggcatcggcacgcgcctgccaaagctgttggactggctgcacagggaatcgcccgacgtggttgccctgcaggaactgaaggcgaccgacgccgcgtttccggccgcgtcattggaggaggctgggtacggtgcgctctggcaaggtgaggcgcgctggaacggcgtggcgttgctggcccgggggaccacgccggtcgagagccgccgccgattgcccggcgagcccagcgacacgcagagccgctacctggaggcggcggtgcacggggtcatcgtgggtgccctctacctgcccaacggaaacccgcagcccgggcccaggttcgactacaagctgcgctggatggagcgcttgatccggcatgcgcgcagcctggtcgaactgccgcacccggcgctactgctgggtgatttcaacgtgattcccaccgaagccgacgtctacgaccccaaggcctggcgccgcgacgcgctgttccagcccgaggttcgcgatgccttcgagcggctgctcgcgcagggctggaccgatgcgctgcgaaaggtgcacggcgacgccacgatctacaccttctgggactatttccgccaacatgccgagcgcgaccgtgggctgcgcatcgatcatctgctgttgaatccggtactggcggagcgactgaaggacgctggcgtcgaccgttgggtgcgtctgcaggaaaaggccagcgaccacgcgccgacgtgggtgacggtgcgggcggcgtga

SEQ ID NO: 494071 - DNA, 1719 bp, Stenotrophomonas maltophilia
atggacgaagccgaacgtctgctcgaaatcgaacgactgcacctgctggatacgccccccgagccggtgttcgatgccatcgtcgccgccgcccgcgccgcgaccggcatgaccatgggactgatcaccgtggtggccgaagaccggcagtggttcaaggccaatatcgggctggagggcgtcaccgaaacggcccgcgagatctccttctgcacgcatgcgatccgccacgacgagctgttcgagatacccgacgcgcgccaggaccctcgcttctcgaccaatcccctggtgaccgccgggccgcgcatccggcattacgccggcatcccgctgggctcggcccatggtgcacgcattggcacgctgtgcctgctcgacccgatgcccggcgtgctgtccccctcccagcgcgaactgatggtgcatctggcgcgggtcaccacccaggtgctggaacagcgcagtaccctgatggcgcaggttggccaggcgaaagcgctgcatcgcgagctgaaacgcagcgaagacttcctggagcggaccaaccgcgccgcccgggtgggcggctgggagatggacctggtcaccaacgaagtgcgctggacccgcgagaccaagcagctgcacggcgtgcgcagcaactttgaaccgacgctcgacaccgcgctgtccttctatcgcgaagacagccgcaacatcatccgcgcggcagtgcagcgttgcatcgacgaaggcacgtcctgggaggtgcagctgccaatgaccaccgccgacgggcgcgcgatctggacccgggtggtcggcagccggcaacaggtcgacggccatccgcgtctggtcggggcgatccaggacatcacggacgagcgagccgcgctcgacgcgctggaagcgagcgagacccgctaccggcgactgttccactacagcctgggcctgatctgcacccacacgctggacgggacattgacctcggtgaatcccgcggcggtgcagtcgctgggctttgaggaaagccagatggtcgggcgcagcctgtgcgacctgatgccaccggaaaaacgcgagggcttcaaggcctacctcgctcggatccaggcaaaccacaccgacgctggcgtgatcgagctgatcgccgccgacggtacgcgccactactgggcgtaccacaacgtgctcgacagcgaggccagcccgccctacgtgctggggcatgcacaggacgtcaccgcgctgaggatgcaggagcagcagctgcgcgaaatgtccttcaaggatccgctcacgcagtgctacaaccggcgttacctgcaccggctggatgaactgattgatgagcgctgggcctgcgtgatgttcgatctggaccacttcaagcacatcaacgacacccagggccaccgccgcggcgacgccgtcctggtcgagttcgccaccttcctgcgctcgccgctgggcaaggaggagacggtggtgcggctgggcggcgacgaattcatggtggtactggtcgcgcccgcggatggccggttgagcgaactggagcactggtaccaggaccacgctgcgctgtcgcccagcgctttctcgatgggtgcagccatcaacacggccggtgagcccgtggccgacaccatccagaaggcggacagccgcctctaccggacccgcgcgcgcgtgcgccgcgagcggcgcgaaggccctgccgtgcgttga

SEQ ID NO: 494072 - DNA, 198 bp, Stenotrophomonas maltophilia
atgatgaccccgctcgacaaaccactgcgacgcgaactggacatcgatggccggccccataccctcaccgtggaccctgaaggcctcaagctggtcgaaaaggggcgacgcaagggcatcacgctacgctggcaggacctggtatccggcgatgccgcactggccaccgccctgcaggcatcgctccagcaacactga

SEQ ID NO: 494073 - DNA, 636 bp, Stenotrophomonas maltophilia
gtgccggattggttgcccgcctctcttcagatcctcccgcgcagcttctaccggcgcccgcccgtcgaggttgcgcccgagctgctcaacaaacttctggtccgtgacgatggccgaacgggtcgcatcgttgaagtcgaagcgtacgcgggcagcgtcgatccggcggcgcactcctatcgcgggcagacgccgcgcacggccagcatgttcggtgaggccggccacctgtatgtctacttcacctacggcatgcactggggcagcaacgtggtctgcggagaggtcggtgaaggcgtggcggtgctgctgcgggctgtcgagccattggcgggccttgagcgcatgcacgagctgcgccccgccgcgcgccgggatcacgatctggccagcggccccggcaagctctcgcaggcattcgggctggaccgcagtttcgacggcgccgacctggtgactggcagccatggcatcgtgatcgcaagcgatgggaccccacctccgtccgacccggtaattggtccacgcatcggcatcacccgcgcggtcgatttcccttggcgctggcacatccgtgacaatcgtcacgtatcgattcagccacgtcgtactgccgcccctgcgaggaaacgatga

SEQ ID NO: 494074 - DNA, 960 bp, Stenotrophomonas maltophilia
atgtccgctcccaccggttcccgtctggtcatctatgccgccctcgcgggcaacctggccattgccatcgcaaagttcatcgctgccggcatctccggcagctcggccatgctcagcgagggcgtgcattcgctggtcgacacattgaatgaactcctgctgctgtacgggctgcgccgggccggcaaggcgccagacccggtacatccattcggctatggccgcgagctgtacttctggagcttcatcgtcgccctgctggtgttcgccgctggcgccggcgtctcggcgtacgagggcatccagcacatccgccggccggagccggccaccaaccacgcgttgagctacagcgtgctgggcatttccatcctgttcgagggggcctcctggtgggtggcgctgcgcgagttccggcgtaccaaaggcagactgggctacttcgaagccttccgccgcagcaaggatccgtccaccttcaccgtactgctggaagacagcgctgcgttgctcgggctgggcttcgcgttgatcggcctggtggccgcgcaggtgctggatatgccggtgcttgatggcgtggcgtcgctgtgcatcgccggcgtgctggccgcaaccgccttcctcctggcccgtgaaaccaagggcctgctggttggagagcctgcccaccctgcggtggccgagcggatcatggcggtggccgaaaccgatccggacctgcgtcgcgcgaacggcgtgaccaccatgcagatgggaccggaacaggtcgtggccatgctcagcgccgagttcgaggacgatcggcagaccccacagattgaagcctgcatcacccgcatcgaaacggcggtaaagcgcgagtatccggagctggtggcactgttcatcaagccgcagacgccggaggtctacgccgcccggcgcgccacgctggcggcaccgtccgcgccggaatga

SEQ ID NO: 494075 - DNA, 585 bp, Stenotrophomonas maltophilia
atggctgccgtgctcgcccgtacctgcctgtccgcgttgtgctgcctggccctgcccgccctggcccaggacgcctcgttcggcttcggcgaacagaccacccacaccgaccagaccacgcaatccagcagcacccggacccagagcagtggcgcggtgaccgcccagaccaccaccagcgggagctcgcagtccgggtcacgcagcgaaagcaaagagatcgacgtgggcttcggtttccacgacgacaacgacgactggggccacgaccgccaccgtggcggccgcgatgtgcgcgacagcgatctgttcggcagctggacgctgggccaggagaacggcaacacctgctccatcgagctgaagaacatcgagtggttcggcggctacagtgcctacgtgcccgccggctgcccggatggcttcttctcggccaaccgttgggtactgtcgggcaaccagctgctgctcaccgacaccagcaacaccgtgttcgggcgcttccgcgcgtcaggcggtgggcgctggacgggctaccgtgaatcggatggggcgcgtttgtacctcaatcccaaggggcactga

SEQ ID NO: 494076 - DNA, 258 bp, Stenotrophomonas maltophilia
atgagcgacgacagtggcctctggctgttggcggcaggtccggccggcgcaaccgcgctgtactgggcgctgtaccgctattaccgcaacaccgacaaatcgcactccttcgagcacgagaccgccatcgaggccaagccggtcaccggctcggaccagcaggtaggccgggttaccggcaccgaggaaaagcgtatccgcggtgacaatgtgtatgagtaccggaaacgggtggtgcgggtaaagcccgacccgtag

SEQ ID NO: 494077 - DNA, 1353 bp, Stenotrophomonas maltophilia
atgtccgatccccgaaacggcccgccgccgctgcccggatccgcgcccgcgacgccgccgcccttgccggcggcgtcgttggatgggcccggttcgccgcaggacgtccctcccctgcccggcagcttcccgctggacacctcgaaactgccacaggccatccgtgatgaagtggaagcgcccgacccggtggccatcgatacgtcggccagcgagctgaaggacggcctcaaccgctgcccgaagtgcggtgccaccgacatccggcccaaggccggcaccgacatcctggtctgcctgtactgccgtcacgaatggcatggcgcacgcgtcgaggaagagttcggcctgggcgaggccatcgaccagctgcgcggtacggtcattgcctctggcgcacgtgacatcgacgccgacacctcggcactgatgacgttcaaatgcaccgggtgcggtgctgaagtcacggtcaataccgagagtacgatgacggcgcgctgccactggtgccgccatgtgttcggcgtcaacgagcagatcgccaacggcgcggtgcccgatgcagtgctgcccttccatatcaggaaggacgatgcggtcgcgcgcatccgccagttcgtcgacaagcgccgcatgttcgcgctgaaggcattcaaggaccagttcaccccggaaaacgtggtgggcgtgttcctgccctacatgatcgtcgacagcaatgtcagcgcggccgtggccggcaagggtgagatccagacccggcagtacaccgtgggcagcgagaagaacaagcgcaccctgtacgacgcagacgtctaccaggtcgagcgacaggtcgacttcacggtcgatgacctgccactggaatcctcggccgagcgcgggaatctcgatacccgcgccaatacgaacaacatcatcaacaccatcctgccgttcgacaccaagaacgcggtgaaatggaacgcctcgtacctggccggcttcacctccgaaaagcgcaacctggatgtggaaaagctgcggccgcggctggaagaccagctgctgtcgatcgcccgcgcacaggtggaaggttcggtgaagcgctacaaccgtggcgtgcgctgggaacaggagcagctggaggtgcatggcacccgctgggtgtcgatgtacctgccggtgtggttgtactcctaccaccagcccggcaagaacggcggcatgctgcactacatcgcggtgaacggccgtaccggcgaaaccatgggcagcgtgcccgtgcagcaatggaagatgctgctggcggcactggccaccggcaccgtcattgaagccctcgcaattgccttcctggtggcatcgacatga

SEQ ID NO: 494078 - DNA, 1140 bp, Stenotrophomonas maltophilia
atgggtctggtacaggcggtgaagggtgcggtgggtggtgtgctggccgaccagtggaaggacttctacaccgtgcccacgggcctgccctcgacggcggccctgttcgcggcggtaccgcgcggcaccaatgccggccgcggctccaataccagcggctcgtccaacatcatcaccaacggctcgaagatcatcgtgccggagggctacggcctgctgctgttccaggacggcgcgatcaccgcgttcgtcgccgaaccgggtggctacgagtggcgttcggatgatctgaactcgcagtcgatcttcgccggcgacggcctggtcagcaccttcatcaagcagagctgggagcgcttcaagttcggcggccagccgggttcgcagcaggcggcgtatttcgtgtcgctgaaggaactgccggacaaccgcttcggtacccagtcggaaatctactgggacgacggcttcctcaacacccaggtgggtgcggtcacgcgcggctcctacacgctcaagatcgtcgacccgatcctgttcgtgaagaacttcgtgccggccagctacctgcaacctggccaggtgttcgacttcaccgacctggacaacgccgccgccagccaactgttcaatgaagtggtcggttcgctggccccggccttcagcctgtacacgaacgacccgggcaagggcaaccgcatcaccaagctgcagcaggattcgctgggctttgcacagagcctgtctgccgccgtcgagcagggctaccagtggaagtccgaccgcggtctggccatcgtcaagaccgccatcgtctcgatcgagtacgacgccaacacccgcgaactgctgaagaccgtgcagcgcgccgatgccctgtcgggttcgcgcggcaattccaacctgcaggccagcgtcgcccagggcatccagtcggccggcgagaacggcggagcggctggcctggtcggtgtcggcatggcctcgggcatgttcggtgtcggcggcatgcagcagccggtcgccccggctgccgacgacccggtggccaagctgaagaaggccaaggaaatgctggatctgggcctgatcacccagggcgactatgacgccctgaaggccaaggcactgggcctgtaa

SEQ ID NO: 494079 - DNA, 264 bp, Stenotrophomonas maltophilia
atggaccgcaccccgccacccgtgccccccaggaactacctgatgtgggccatcctgagcatcatcgccggcttctggccgttcggcatcgtcgccaccgtctacgccaaccgcagcacgtcattggtcgccagcggccagatcggcgcggccaccgaggcttcgcgcaaggcgctgcgctggatgatcgcctccttcgtcaccctgccactgtgcctggcactgatgatcggctatgccctgatcgcgcgcggcatggcctga

SEQ ID NO: 494080 - DNA, 1488 bp, Stenotrophomonas maltophilia
atgcacaggcaagtcagtgagatgctgcagcgcgcttatcggccctatccgtcattgcccgaactgctgggcgcgttcgtgaaggagctgtcccagcacaaggtgatgcggggtggccaagtgcggttgcgtggtgcggtggcaggggcagctgcggggttgccagctgcgtccggggaagaggtttccttgcagcgggttcccatccgctatggcggcgaggtgctgggtgagctgcacctggaaggcgagaagggccggctggatggcagtgccctggcgctgggggagcagtttgcccagcgttgcgcgcatctgatcaagcgctacgaagccaaggcctgggccgaacaggcattgagccggccgctgttgctggtcggcgccggcgaggcgctgaagcagatggatgaattcgtggagcgcgcggcggccagcccgttgccggtcctgctgcgcggcgagtttggtaccgagaagatggagctggccgccgccctgcacagtggcggcccttcccggcagggcccgtttgtggaagtgaactgtgttcacccgctgggcgaagccagcgactggttcgcgcgcgcgcagggcgggacgctgtacttccacgaagtcgacgaactgccggtgccgctgcaggggcagctgtcacatcgcatgcgtgggctgcctgccgctcatgctgaagcgctggcggccggcccgatacgggtgatcgcgtcgaccagcgcggacctggaacaacgggtgagagagaagcagttctcgcgcgccctgctggccgggctggaattcctgaccgtggatattccaccgctgcgcgaacgggtggaggacatcggcgcgctggcggcgcgttcgctggagctgcatggattcaatccccgcgtgctgggcgacgatgtgctggaagccctgtgcgcgcacgactggcccggcaatctgctggaaatggagcgggtggtggtccggctggcggtgatgaccggtggccgatgcatccgtcgtgaggatctcgcacgccacgcgccggatctggctgcaggccacgttgccagcgatgccgggcgcgccccgcaacggctgcccgcggttgagcagaccgtcggtcctgcgcccgcgcagccggatacgccgcgggcagcgcatgaaggcctgcacgacggcctgaagcgcgccctggcctacctgaaggaccatgccgcagagccgctcacgctgggcgaccttgcccgtcaggcccatgtgagccagtcacacctgggattcctgttccgcagcgagctgggcacgacgttcaagctgctgctgcagcaactgcgcatcgagcacgccaagcagctgctgcgggatgggcagcgtctgcgcattaccgatgtcgcactgcaggtcggcttcggtgacctgagccacttcgaaaagagcttccggcgcgcggtaggggtcagcccgcgcagctaccggcgaagcccgtaccagtaa

SEQ ID NO: 494081 - DNA, 237 bp, Stenotrophomonas maltophilia
atgaccttcccgaccccgcttcccggcaagcccactcccgcccatccggcgggcagaaccccgatggagatcgcccaggaactggcggacgccgcaatggctgccagtgaagaaggcatccgcgccgcgatgaaggtttcgcaacgcgcggtcgaggccgccgccgaggcagcgcgacgcgcggacgaagcggccgaacaggccgtgcagcgcgctgctgaagccaacgcgcgctga

SEQ ID NO: 494082 - DNA, 1080 bp, Stenotrophomonas maltophilia
atgagcattttcattgccggtcgttccatcccccaggccaacctgatcagtcaatcctgcaggcatgtccttcagttcatcgacggcggcgagcactggttgaagtgggccatggaatcgcatgagcaccgctacgccttctccgacgagggcacgatgcttgatggggtgcaacagggcctgcacggttcgcgcatgacatggttgccgcgcaccgggttgcagatcggcccggtcaagctgctcagccttggtgccagcgacctcggtgccctgcgcaacatggagtttgatgacgagacacgcctgtcgcacaacgaggcacagcgagtgctggaaaaacaccggctgctgaccaacgccgagctcggcgcctcgcgcgcgttcctggcttcgatcggcgcggccgacgcacccctgctgcagcagctggactttcgcgaatcggtggcgctccaccagctggcccgtgaggtggacatgtccgccgcagggcgcgacgacctggccgacgctgccggcttcgcgctgctgcacgcgcgcaggcccatcgagtttgccgactacttccgcttctaccagcgggtgagcacagggggtggcagccgcgagcatcggctggcgcgtgccacccgtgcgttgcagcaggtgctgccgatcctgttcggcttcctggacgggccgcagctgccacagttgccgtcgccagagcaggtgcgcgaggcgatcgacgcaagcctggccgcgcaccggcagatcggctatgcccgcatctcgctggccgcccagcagatggcggcctgcttcgacgacgaacccgaactgctgcaggatgacagccggttgcgcgaggccgcgcggtggcagctgcgcgatgcacaggaattcctcaacgaacatccggtttcccgtggccggctgggccaggacggtgccagcgtgcagttcgcgatcgatggttccagagcgaaggcgctgatacaggtggaggacaatgtgatcaccctgcaggattaccgccgaacccgccgctacctgggcgatgaagcgcgggtggattatcagaaggatgcagtgtga

SEQ ID NO: 494083 - DNA, 348 bp, Stenotrophomonas maltophilia
atggacccgagcaacgtcaacgcccagatcatcgatgtgatcaaccaggtgcagacggccaccatgtcagcgaccgtcgtgacgaccagtggtgccggcaaggcctaccagtcggtggcccagtctgcggcgatcgccgtacaggatgccgccgacgccctgcgcaatgtctcaaccatcgcgaccaccgcggccggcgtggccatggcccagtacctggcgacgggggacgaaaagtacgcaagggtgctcacgcaggcgcagaacatgatgcagggggccaccgccgacttcaaccgcgtcggcaatgccgctgcgaccgtcctcaaggaatttccggcccagtga

SEQ ID NO: 494084 - DNA, 585 bp, Stenotrophomonas maltophilia
atgagcagtgagaacaccgtcaacagccagatcgtcgacagcgtcagcgccgcctcgacgttgctggtggcccagggtccggcgcagtccttcagcatgctggacatggtgatgctggagacgctgggcaccgccatgcacaacgccgtcgcgcgccagcagggtgcaggcatggtcagcaacgcagcggtcaccgccacctgcgcgaagatgatcaacgctccctggccggtgccgccacccgctccggaaccccctccgccgccgccaccgcaggtcatccccctgcccggcccggtgccggcgcccccttcgcctgcggcggtgatcgccgcggccaccgcagaaggaaagaccgccatcagcgtcctgcaggcacagacccacggtgccactgccgacgctgcggccgctaccagcagcctgcatgcactccaaacgcttgcaggcaatgcggcagcgcccgcgcccggtcctgcgcccgaccccgcgtccggtccggatccggacgcaggtcccgcccaggatcccgcgccagactccccttccccttccccggcggacgacgctgacgccggggcctga

SEQ ID NO: 494085 - DNA, 237 bp, Stenotrophomonas maltophilia
atggccgcatcgcccgccaccggctacctgctggcaaccaccagcgccggatccggtgtggcgatcgcccttgccccctcgttcgcgatgtccgccacctacctggcgatggccgacagcctcggcctggcaatgcagaacgcggtggccaaccagcaacgcggccaggtgaccgccggcgcaagcctggcccaggtcctggccctgatcatccagaagggagccgttccgtcatga

SEQ ID NO: 494086 - DNA, 273 bp, Stenotrophomonas maltophilia
atggcatttcccaccgccgtcaacagccagatcaccgattcggtctcgcaggtcaacaccaaggtgcttggtgatgcgccggccatcgcaatgggcaacctgttcgtggccaccagccaggcgctgtccaacgccgcgcacaacgccaccaacaaccagcagcagtcctacgtgaccatgcaggcgtcgaccacccagggggtgtccacgctgtatgcgatcgacaccgcctccaacggcgtggccacccgcgaaatcctgggcctgcgctga

SEQ ID NO: 494087 - DNA, 267 bp, Stenotrophomonas maltophilia
atggcgtttcccacggccgtcaacgaccagatcaccgactcggtcagccaggccaacctgcaggtgctgggcgtggcgcctgccacggcaatgggcacgctataccaggccaccgcgcaggcgctggccaatgccgcccacaacgcgacgctcgcccagcagcagatgtatgtcacggcgcaggccgcgaccacgatgggcgtcgcgctgctctacgccgtcgataccggcgccaccggcgccgccacccggaagattctcggctga

SEQ ID NO: 494088 - DNA, 270 bp, Stenotrophomonas maltophilia
atggcattcccgaccgctgtaaacgaccagatcaccgattcggtcacccaggccaacaccaaggtgctgggcgacgcgcccgccgtggccatgggcaatctgtaccaggccactgcgcaggcgctggccaacgccgcccacaacgccaccaatgcgcagcagcagtcctatgtgacggcgcaggcggccaccaccatgggcgtggccacgctgtactcgatcgacaccgccaccaccggcgtggccaccaagcagatcctcggcgcgtga

SEQ ID NO: 494089 - DNA, 291 bp, Stenotrophomonas maltophilia
atggcatttccaaccgcggtaaacgaccagatcaccgattcggtcacccaggccaacaccaaggtgctgggcgacgcgcccgccgtggcagtgggcaatctgtaccaggccaccgcacaggcgctggccaacgccgcccacaacgccaccaacgcgcagcagcagtcctacgtcaccgcgcagtcggccaccaccatgggcgtggccaccctgtactcgatcgataccgccaccacggcggtagcgagcaaggaaatcctcagcacccgcgtccgcggcctgggctcctga

SEQ ID NO: 494090 - DNA, 1293 bp, Stenotrophomonas maltophilia
atgcgcaccctgatgaggatcaccccgttggcgctggcggcgttggcgggcaccgccttcgccgcgccacccgcggcggatgatggcgccgacgtgcaggcgctggccaaccagctggagcagctcaaagccaactacgcgcaggaagtgcggcggctgcgcgaactggacatgcaggtgcaggcgatgcaggcgcgcctgagtgggaaggttggcccgatggccccgtctacgactgcgcccgtcgggcatggctcgaccctacagacgtcgccgggcagcgaaggctatgccagcagtgccgccgaggcgcagcaggcaaagcaggaatcgcggcgcagcgtggatgatgtgaaacagcagcagtcggcgctgttctcgcgccgcttcaccgtcgagaacagcctcacctacgcccgctacgaccgcaagcagctcaccctcaatggcttcctggcgctggatgcgatcttcctcggcaacatcgccatcgagaacgtcgagtccgattcgctcacctacaatctggccgcgcgctggggcgtcagcccgaacctgacgctcaacctggacgtgccatacctggcgcggcgcaccgtctaccagaagggcggtgccggcggtgcggcggccgcgatcgcgcaggaacaaaccaatggcaacggcctgggcgatatcggcctgagtgcgaactaccgcttgttcggcgagcgcggctggcgcccggaagccgtactcaccgccggagtgaccgcacccaccgggcgtgcaccttacggcctggactggaaagtgatcgagcgcgatgacgatgactacatccgcttcgccgtgcccaaggaacaaccgaccggcaatggcgtgtggcaggccaacgtcgggctgtcgatggtcaagacagccgatccggcgatcctgttcgccaacctcggctacgtgcattcgttcccgcgtggtttcagtgacatcgacagcaaccccgacacggtcaacccgggtgacgtgaagctcggcggctcggtctacttcggcgccggcgtggcctttgggttcaacgagcgcaccagtctcagcctgtccttcagcgaccgcatcagcgcccgcgcttccacccgtttccagggcggaaagtggatgaaagtgattggcagcgacgccaacgcggcgtcactgaatctgggtgtgacgtatgcgctcaaccagcacaccacgctggtgaccctgctgggcatcgggctgaccccggatgcaccggacttcacgctggcgttcaagatcccttacatgctctga

SEQ ID NO: 494091 - DNA, 750 bp, Stenotrophomonas maltophilia
atgttccgtcaccgcctgttgatggtcctgctgctggcctgccccgccctgcccctgcaggcggcggacgcggcgcccgggcgcggcctgaaggaaatcccggatcccgaactgaacctgatgcggggccgttacaccgtgggcggcaataccgtcgcctggttcggggtgacgatggtctcgcagtggcaggccagcaacggaagcgtgttgcagggtgcgttgaccctgggcatggacttccgcggcgggggcagcccgaaactgagcttccagcccagcgtgcacgtcaccgccgcagatgcgccgctgccggacacgcagggtcgccacatcgacagcaacggcctggccaacgccagcggcgtggtgcagagcgtgcaggtggccggcgatggcaacgtcgcccgcaatgccaccacgctggtggtacgcaatggcgcggtgccggccctgccgggtgacggtgcccattcgatcagtgcacacgccgcaggcgtctcggcctctgcggtgctcgacggcaaccaggcacgcctgctgttgcaggtagatggccagggcctggtccagcaatggatacgcaacggcagcgtcggccagggcatcgccctggccggtgacggccagatcgccagcaaccagctgcggctggagctggtgcgggataccgcgggcggcaacctgccgttgagccagaacgtggcccaggcgattgcgatgaaccgcggcatggggccgggccggtag

SEQ ID NO: 494092 - DNA, 705 bp, Stenotrophomonas maltophilia
atgatcggccaccgtctgtcgatatgcctgctggcctgcctgctgctgctgggcggtgcatcggcgcgggcgggcgacgtcggcttcgccgccgtgctgcccaatggcgcactgctgcagcagaaggtggaaagcatgcaggaacggcgctaccgcaacgtggtgcggcagcacaccgattacagctgcggggcggccgcactggcaaccatcctgcgccatgcctatcacctgcagaccgacgaagcgaccgtgatcgaaggaatgatgggggtgtccgatccagcgctggtggccgagcgtggtttctcgctgctcgacatcaagcgctacgtggaatcgctgggcatgcgcgggcgcggctatcgtatcgatgaaacacgcctgcgcacgcttcgcgttcccggtcttgtgctgatggacgtgcgcggcttccgccacttcgtggtgctcaagcaggtgcgcgacggtgtggtcgaggtggctgatcccatcctcggcaaccgcagcctggcgctgcctgaattcctcgctgcgtggccatcgcgtgccgtcttcgtggtgatcggcagcgatttcgatcgcaacacggttctgctgcaacccagcgaacggcccagtgcccgcgcgctctacgcgcgacaggggccgatcaccgatgccgaactggtcgacttcggcttcagccacgccgacctgttctga

SEQ ID NO: 494093 - DNA, 1317 bp, Stenotrophomonas maltophilia
atgaaagcgaccgtcaaacggaccatgctcgccatggcgattgccactgcctcgaccgccgctgcggccaatggctgggacaaccagaacgccaacgcgaacatcaaccacaaccataccgtcagcgaaacccgcaacgacacccacaaccacaccgacaacgacgtacgcatccgcaccgtcaacgtcaatgtgcagaagcacagcaccatccaggccgacgagcgcaaggaaaagaacaaccacggcgtcgacgtgaacctggagaaggacctgcgcctcagcaccgacgtcaatttctccggcgaccccaccataaccggcgacatcgacctcgactcggcggccattgcggtgatcgacaaccgccagtcgatcagcagcaacgccaccagcaacagcctggtcaccaacagtgcctccatcggtgacagcgtgggtgccggcgcctccggcaacctcggcttcaacgtggtatcgggggacaacaacgcccaggacaatgccgcgtcattgtccgctgccgatgcgtccttcagcttcggcatggccgacgccgaggtgttcgtcaaccaggccggcttcggcaacgcgaccatgaactccggcgtcaccaatgccgcaggtctcggtggcaatgccttcggcggtgcgtcaggcaacatcggtgtcaacattgcttcgggcaacaacaacgagcagaagaacgcgctcgcggcctcggtcgcaaccacggcggtggcgcagtcgagcatcagctccaaccaggtctccaccggcaacacggtcagcaatgccggcttcgtgcagtcctacaccgataccgtgcaggtcggcctgcatggcggcgtcagcggcctgacgtggggctatggcgccggcacctaccgcggcaccggcaatgcctaccagatggccaactattacctggatacgtggaacggcgcactgccgcacccgggtggcaacagtaccggccacatcgacctggacaacgagatccagaacgccacgatgaaccccaaccggccgggggtgggcggcctgggcttcgatacgcgtgaaagcggcaccagccagttcgtcgaactgggcgtggccgatctgtacgccagcctgagcggcacggtcagcaccacgcgctgggtgaacgtcaacgccaccaacacgtcggccttgtccggcagtgccttctccggcgcctccggcaacatcggcgtgaacgtggcggcgggtaccggcaacctgcaggccaacagcctggctctggccgtagcccagcccagcaccggcggtggtggcggcaacggcgagtaa

SEQ ID NO: 494094 - DNA, 618 bp, Stenotrophomonas maltophilia
gtgaagcgggcacgttggctgctgctggtcctgtttgccacgccgttgatggcgcaggccgacgactacagcggcatgctcgcctacctcgacgtggcccgcatcgacggtcacgccctggcgggtgcaaacggcgccatcgcggtgaaccaggcggccggtgacctcaacctgcaggccaacctgcatggcatcgccaccggcgaacgcgccgacgtgtcgatcggcaaccggcaactgcgggccggcaaccgcgtgctgagcgcaccggcgcacgccaccgccgccatcggcggcaacgcactggcaggcgccagtggcatcgcatccatcaaccaggccagcggcatcgccaacacgacgctcaacgtcgtcagcgcgacgctggccagacagggcatacgcgaatccgacgatacggccttggccgccgaaggttccgcgttggcaggggggcgggacgacgccggtcgcggcgtcgcgaccggcacccgcagcgccggtgtcaccagcaccgcgctgcggggattcgacggggtcctgcaactcaatcagatcgcgggcaacggcaacgacacggccaatgtgctgggcctggtcgtgcaggaccgcccgtga

SEQ ID NO: 494095 - DNA, 531 bp, Stenotrophomonas maltophilia
atggacggcatcacccccattcgcggcctgctggcaatgctggccgtggccctgctgtcggcagccgcgggcgcccctgcctccggtgcccgccagggcgtgaaggcacaaccgggcgaaatcgtcctgttgcgggatgtggccgcgcgaccggcctatcgcatggcgcccccgggcatggcgctgatcgccgatccgaaaccgcagcgcgagattgcgttggcgctcggtgcgggtaccccggcaaacgcgatggatgagctgagcgatgaggactatgccggcatgggggcggggcacacggctgcgaccgcgacccccactggcaccaccgtcgaacgggtcgcccagcaggccctgggcggcacgctgggacgcagcagtgacggcatgctcggtagcagcctcggtggcgcactgggtggcccactgggcgcggtcgggaacagcacccgcggcatcggcgataccgtgcgcggcgcgctcgcccagttcccgttgcagggcccggccccggcaggtggcaagtga

SEQ ID NO: 494096 - DNA, 1356 bp, Stenotrophomonas maltophilia
atggcagcggtcccggaggcttctgcgtcacgatgcgtgctctggttcggcgagccgctggcgaacgagcgcagcgcgctggcggccgcaggctggtacgtgcgtcgcatccatcccgacccggcgatggccatcggcctgcgcgggcgcgaccggctgctcgccgtgctggatcttcgccatctggatgcgccagcccagcaattgctggcgccgtggatcgaacagcacgcgcatctgacctggctggcggtgctgccgcctggcgcagggcccacgcctgcagcgtggctgcccttgttgcagcgttgcatctcgcggttcacgctgcctttcggcctgctggacctggtggcggcgatgcgccagcagttcgacgcggaggatacgtctgccgacgaagtgtgcggcgggcaggggccgcgcgcattgatcggcgagagtcctgcgctgcatgcggtgcgcaccgtactgcacaagttcgcgccggtcgatctgccggtgctggtcaccggcgagaccggcaccggcaaggagttggcggcacatgcactgcacgcgttgtccggccgtgcgggcaagccgttcatcgcggtcaactgcggtgccatccctgcgaacctggtgcagtcggagctgttcggccacgagcgtggctcgttcaccggtgccgacaagcgccagatcggcgtattcgaggccgcatccggcggaaccgtgttccttgacgaggtgggcgacctgccggccgaagtgcagaccagcctgttgcgcgtgctgcaggaaggtacgttcgagcgggtcggcagcagccagccgctgcgggcggacgtgcgtgtactggctgccacccatgtggaactggagcacgcggtggcgcaggtgcggttccgcagcgatctctactatcgcctcaacgtgctgcgcctgctgatgccaccgctgcgcgagcgcggcgctgatgtgcagctgctggcggagcatttcctgcgctgcttccgcctgcgccacagcgtgcgtgcacgtggctttgcacccgctgcgctgcaggcgatgcggcgtttcgaatggcccggcaacgtgcgcgaactgctgaaccgggtgcagcgggcggcgatcatggccgaaggcgagctgatcagcgagcgtgacctcgaactgggagggcgcgtgcatgcgccgccgggggcggtgctgcacgatgcccgcggccaggccgaacgtgatgtgctgctgcagacgctgcggcagaccggctacaacgtctccgagtgcgcgcggcagatgcagatctcgcgggtgaccgtgtatcggctgtgccgcaagcatcggctggagctgccggcgcagcgctga

SEQ ID NO: 494097 - DNA, 309 bp, Stenotrophomonas maltophilia
atgcctgagcccgagcggatcgagatcgagagcatcaccacgcccgggcacatccagcgcgtggatcgcgccaagtacatggccatgcgcgcggccctgctgcgtgccttgcccaggcaacctcgcgggatgacggtggcgcaggcgaagcaggcgctgttgccgcacctgcccgcatcgctgtttccgcaaggcgccacggccggttggtggctgaaagccgtgcagctggacctggaggccaagggcgtgatcgagcgtcttccaggcacgccactgcgcctgttcaagcacgtgccggccggctga

SEQ ID NO: 494098 - DNA, 537 bp, Stenotrophomonas maltophilia
atgccttcccaacagtcccttgcctgcgcctgcggccaggtccgcctgaccaccaccggcagccccatcgccagcgtcgaatgctgctgcgacagctgccgcagggccggcgcccggatgcaggcgatgcccggcgcaccgcaggtgctggggcctcagggccagacgcatttcgtaatgcagcgcaaggatcgcgtccgcatcgatgccgggcattcccggctgcacgcgtggcggttgtccagcacggccggcagccgccgcgtcgtggcgggctgctgcaatacgccgctcttcctggagttcagcggtggccattggctgagcctgtatgggctgttgtggccggacgcgatacgccccgccgtggagatgcggacgatggtcaacgatcttcccgacgcgtctgtccttcccggcgatgtgcccaacctgaagacccactcgctgcggttctatgcccggctgttgaaggcgtggatctccatgggcttccgcagcccacgcatcgagatcacgggagacagccatgcctga

SEQ ID NO: 494099 - DNA, 882 bp, Stenotrophomonas maltophilia
atgaaggcgcttctggccgtgatgctgctggcatcggcattgcccgtgccctccccgcccgtggtgctgcggatcatcggccccgccgagcggttcgcccccggcattgcctccacacagcatgacgagatccggctgaccctgagtccggacggcaataccgccctgtggttcagccgcaaccggccggggggggctgggggctacgacatctggatctcgcaccgcgaaggtgaccgctggcggccggccacgccagtgccgttcaacacgccggggcgcgacttcgatcccgcattttccgcagatgggcgcgtggtgtatttctgctcggaccgcgcaggcggccggggcggtgacgatctgtatcgggtcagcatggggagcgacggtcgattcggggagccagtcaatcttggccccgcagtgaacagcgcggccgatgagttcgcgccgatgctctcgcccgacggtcgtacgctgttgttctccagcgatcgtgcgggcggtgctggcggccatgacctctacagcgcggcgatgatcggcggcgtcgcgcagccggcacggccgctggcgggagacctcaataccgcagcgaaggagttcgatgccaccttcctgggcgacggccgaacggtggtatttgcccgcgcccaggacttcggcagtgcaccggtgcgccagttcattgcctacgaacgtggaggccgctatgacgcaggccatgctttgccatcgcccgtgaacgcgcccagcggcgacagctacggcgcgatgctggatggctcgcgccgcgacacgctgacctactcggcgcgacgcgccggtggtgagggactggacctgtaccgcgtccgctaccggatgatgccgccctga

SEQ ID NO: 494100 - DNA, 1041 bp, Stenotrophomonas maltophilia
atggatcgacggcagttcctggccaccctggccgccacggcagcgtccaccgccctgccctccgggtgggccctggccagccccagcgcagactggaaatggttgcagggcaactggcaggtccggcaccaacgcctgaaggagcgcctggtgggcgatacccgctgggacgccttcaccggcgccagtgcggtctggctcaccctgggcgggctcggcaccatcgatgacaacgtcatggcactgccttcgggcccctacaggggcctgggcgtgcgtgccttcgatccggtgtcttccacctggtcgatctggtggatcgatgggcgcacccctgcccatatcgaagcgcccgtgcgcggcgccttcgcaggcgatggcggcagcttccgtggtcgcgatgacttcgagggacgccccatcgaggtctggttccgctggcatgacatccacggcgatgagccgtggtgggagcaggcgttctccgacgatgccggtgcccattgggaagtgaactggcgcaactggttccgccgcactgctgcgatccccactccgcttccgaagctgccggatgcaccgggcgattttgatttcctggtgggccattggaacgtgcgccatcgccgcctgcgggctcggctggcaggcagcgatgcgtgggacgcgttcaacggcaccctgcacaactggccggtactgggcggattcggcaacgtgggcgacaacctgatggacgtgcctggagcaccgctgcgcggcatgggcatccgcgcctggaatgcggccgagcggcactggctgagctggtggctggatggccgcgcgccgacccggatcggcgcgccactgcgtgggggattcgaggccggtgtcggccgcttcttcggcgaggaccagcacgagggacgggcgatccagacgcgggtgatctggtcacgcatcaccccgcgttcggcgcgctgggaacaggcggcctccgccgatggtggacgcagttgggaaaccaactgggtcagcgacttcgagcgacaggcatga

SEQ ID NO: 494101 - DNA, 927 bp, Stenotrophomonas maltophilia
atggtgacccaacgtcagctgccatcgcttgtcgccatccgcgccttcgaggcggcggcacggctgggcagtttcgcccgcgccgccgaggagctcgataccagtgcggcatcggtgagttaccacgtgcgccggctggaggcccagaccgggacctgcctgttcctgcgccacgcccagcatgtggaattgaccgccgccggtgcgagcgtcgcagtggaggccacccgggccttcgacgcgctgcgcgccagtttcatgcgcgccgctgacatggatgcggcacgactgcgcctgtccgttctgccgacgctgggcaccagctggttgacgccgcgcctgggcagtttccgcgcgcgccatcgaagcatcgtgctggaactggacctgtcggcagagccgcaggacctggccgccgggcgtttcgatgccgccatccgcaacgggcatggtgcgtggcccgggctgcaggccacgcccctgttccccagcattttcactccgctgtgcgcgccagcgctgctgccggcggcagacgggctcggtcggcgggcgttggaggttccactgctcggcaggcctgactggtgggcgctgtggttttccgcacatggtgctgttcggccaccggacccggagagcttcgtcaccccctttgcgatggagcatctggatgtcggtgctgccattgccgggcagggcatcgccatcggctcgccgatcctgttccaggccgaactggacagtgggcgcctggtgcaggcacatcccggtgtggccagcgacgggcgtggtttctggttcgtggcaccgacggcgcgcagccgcagcgccaaggtcatcgcattcggtgactggctgggcgagcaggccgcgcaggccaggcgtgcgtcgcgacatcatctggcacacgcggtgacgccatga

SEQ ID NO: 494102 - DNA, 462 bp, Stenotrophomonas maltophilia
atgaaccagagcccggaactgttgcggcgcctgctgcgtgccaaggaccggatggaccacgccagtcacgaggactggccggtggcccgcctggccgaggtcagtgcggtatcgcctgcgcatttcgcgcgttcgttcaagcaggcattcggcctgccgccgcaccgctacctgctcagccgccgcatcgaacgggccgtggcgatgctgcgtgacaccgagctgccggtcaccgagatcgccgcgcagaccggctggagcagcctgggcaccttcgggcgcatctttcgtgacatcaccggcgacagcccgggcaatgtgcgccagcgcgagcgcgccggcgaggcgacgccggccagcgtgccggaatgccacgcacgtgccgcgcagcgaccggacctgaacatcgcagttttggagaagcgccgccgcgaggcggttgctaacgtggatcccacctga

SEQ ID NO: 494103 - DNA, 426 bp, Stenotrophomonas maltophilia
atgacaaacactgtgaacacggtcggcctgtatgtgcgcgaccaggatgaggcgctcgcgttctacgtcggcacgctcggcttcgaagtgcataccgacgtgcgcaatggcagctaccgctggctgacggtgcgcagccccggccaggacggattccagctgggcctgttcgtgcccggtccgcccacccacgatgcggccaccgcgcaggcgctgcagcagctggtggccaagggcgcaatgccgccgctggtgctggccgtggatgactgccaggcgcgctacacgcaatggctggcgcagggcgtggagttcacccaggagccggtcgaacgctacggcgccatcgatgcggggttccgcgacccgtccggcaatggctggaagatgatcgaagcgcgctccgaagcgaggcaccgtcaatga

SEQ ID NO: 494104 - DNA, 231 bp, Stenotrophomonas maltophilia
atgagccgcggtggctgggcgcggcccgtacatcgctggacctcgatcgtcttcaccctggcggtgatcgccaacttcgtcgtccgcgggttggggcagggcgagcctgcagcgtggatcacctattcgccgctgccgccactgttcctgcagctgttcaccggcctgtacctgttcgtgctgcattacgccgggaaacgccgcggcgccgcgctgggcgctgcgggctga

SEQ ID NO: 494105 - DNA, 696 bp, Stenotrophomonas maltophilia
atgtcccgtttccccttcgatgccgtgctgttcgactgcgacggcgtactggtcgattccgagccgctggtggcccgtgtgctctcggaaatgctgaccgcacgcggctggccgctgaccccagcgcaggcgggcgaggtcttcctcggccaatccgtggctcatctggccgggctgatcgcagagcgcaccggcaagccgttcaccgagcaatggctggaggaattccgccagcagcgcaaccgtgcgctggagcaggacctcgaggcgatccagggggcgcccgaggccgtgcgtgcgattgccgcggccaccggcgggcggattgcctgcgcctccggtgccgacctgttcaaggtgaagctgcagctgggcaaggtcggcatccttgatgccttcggtgcccatgtgttcagtggccaggacatgccgaacaccaagcctcacccggatgtctatctggccgccgccgcagcgctgggcgtggacccgaagcgctgcgcggtgatcgaagacaccgtgaccggcgccaccgccggcgtcgcggcaggtgcgaccgtgtttggtttcagcgagggcggcccgcaccacagcacgccggaggccctgcgcgctgcgggcgcgaaggtgatcttccagcgcatggagcagctgccggcagtgctggcggcctacgccgccgacgcagccgcctga

SEQ ID NO: 494106 - DNA, 906 bp, Stenotrophomonas maltophilia
ttgaaccgattgcgatcattcttcagtgcgtaccccatccagttcgcgatggccgccaagctttacgtgctttgcctatatctgcccgtagccctccgcctggtcgaattcgggcgccgtctgggcccgcccgaggcctcaggtgaaatcggctacgcgctggctgagctcggtttccacctgagtctgtctgccggagcggcggtactggtgtcgatgctgctgttcgggcgtcgcggcgcgctgcggatccggcatccggtgatcgcttcggtcgcctttttcgggttgctgatcgtgcttgatcgcgcgatacgcattccactggcgcaggcgcagtttcccgtctacggcgtcgccgccatcagtctgggcatgcttgcgcatgcactggtcctcacgctgctggccttggtgccggcgctgctgatgcagcggcgcatccctgccgagggcgggcaccatcacctcatcagtgccagcatcgccggcgcggtgacgctggtggccggcagctgcctgctccccatcctggtggcgcagctgccggtgggattctcgcccggcgagttcatcatgcccgttgccgacggcgccgcgcagctgcagattgcgagcctgatcctgctggtggcctgcgcgctggccacgtttgccggcctgtgggccggcgcgccgtcgccgaaacccgcatcgacggcgcgcacgatggtggtgtcgctgatcctgcttgccacggcgctgctgatcatcctggccagcatggctcatctgctgcgagcgctgtccgctggggcgccgacgacaggtcgcgggcttgtcgttgccaccgccgtcggcgccgcagtgcagttcctgttggccagagtgctggcgtcacgatggctgcgcgcacaggcatcgtga

SEQ ID NO: 494107 - DNA, 741 bp, Stenotrophomonas maltophilia
atgcgccttgcaagcttcgtctttgccttcgtcctcagcgcctttgccggcgcagcccaggcccaggtagtcaccctcaacaagggcggcttcgtgctcacctacgactgcagcatccacagtgccacccgctacgagtacacgctcaccgccgataccggttcggccgcacggccgtccagcttctacaaggacccggacctgccggccggttgcctgggccagaccagcaccgcgtcctacgccagcatcaaatccggctatgaccgtggccatctggtcacgtccaaccacatggattacaacgcgacctacatccgtcgcgccaactacatgaccaacatcgtgccgcaggtgtccagcttcaaccagggcatctgggtgaaggccgagaacgtggccgagtgctaccgcgacatcgcgccggtggacgtctacggtggcgtggtctacggcgatgccgccaacgattatttcctggccagccatggcattccgacgccggagttcttctggaagacgatcatcacccgcgacccgaacaccggaaccgccaaggcgatcagctggatcatccccaacgaggccaacctgggcagcctggacaactacctggtgacgattgcggatctggaggaactgctgggcgccagctacgtggcgatcaacgcgccggcctcgctgaagaacatgctgccggccaccacctggccgcagccggccgggtgtgacctgggctga

SEQ ID NO: 494108 - DNA, 1014 bp, Stenotrophomonas maltophilia
atgcgcaggacgctcttcgtcggcacgctcttgagcgtggccagtctgttcgccccttcagccgtggcggcccgggaccccgacgtcacggatgactgcagcgaaatcgcgcagttgatgtccaacgacgactttccggcactggacgcgatggccgcgcgcctccgcacgggcgagctcaacgccgccggcgaatcccggctgggccgtttctatctctgcatgtcgcgtgcaatcggcacggcgcggcaggaggtggaggcctggaaccgctggtcggcctgggcggcgcgctgggttcagcatgcgccaaagtcgccggcagcccacctgatgactgcacggattccgctcaacctggcctggagctaccgcggaaatggttacgccaacaccgtcaatgccgaagactgggctcagttccatgagtacaacgcggcttcgcaggcctacctgcaatcgcatgagggcgttgccggcggcgacccgttctggcacgagatgagcgtgctgatcgcgctgcgcgagggcgcggatgacgaagaactactgacgctcgtcgaccgtgcagcgaaggccttccccgactacgagccgctgcacttcattgccctgcagcacttcacgccggcctggggcggcagcgcacagaagatggaagccttcgcacggcgctcgatggccagtatcccgaagaaaaagcgggccatgcgctacgcacggctgtactggtcagccaccgcgtattcggccgatcacttccgcgcggcgacacccgattggccgctgatgcgccaggggctggacgaaatcgcacagcgctacccgaccatcgacaatctggagaccattacgcgctacgcctgttgggcgcgtgacggcgatgccctggatcggtggaatcgcctgtacttgagccgaagtggtttcagcgaggcggtcattgcggactcgagcgagcaaagcagggccgcctgcctggcgccggatgctgggcaagaggcttccttgtag

SEQ ID NO: 494109 - DNA, 1575 bp, Stenotrophomonas maltophilia
atgcgcaagcttttgctgctgttgatcctgctgaccggcctggcgcccaccgcctgggccgccacggtcaagaccacccatcgcaccattcccagctgggatggcacgcctctcggggccttcgtcatcgagccgcaggatgccggcagcgggcgctatccgttgctggtcatgcccagcagctgggcggtgcccagcgtggagtacgtgggcgtggcacagtcgctggcgcagcgcggctatgtggtcatcagctacagctcgcgcggcttctgggagtcgggtggcagcatcgacatcgccgggcccgccacggtcgaggatgtcagcgcgctgatcgactgggcgctggacaacacccgcgccgatccggccaggatcggggtctcgggcatctcctatggcgccggcaccagcctgctggcggcggcgcgcgacccccgcatcaaggccgttgccgcactcagtggctgggccgacctgcaggcgtcgctgtacagccatgacacacccagcgcccagggcatcgccctgctggtggcggcgggcctggccaccggccgccccggcgcggagctggccaccatcaaccgcaatgtgctggtcggcagttaccagggggcggtggactcgctgctgccggtggccgcacagcgcagcccggccagcagccttgaagagatcaacgccaaccagccggcggtattcctcgccaatgccttcaatgacagcctgttcccgccgggccagctggtcgatttcttcaaccgcctgaaggggcccaagcagctgcagttgcgccacggcgaccatgccctcaacgaggccttcggtgcgctcggcattcccaatgaggtctatgccgccgtgggcaactggttcgaccactacctgaagggcgtggccaatggcatcgatcgccaggcagcggtgcagctgaagtcgcagaagggcagctggagccgctatccggactggcaggccaccaatgcgggcgccgtcagctacggcctgaccgcaccctccggtttgctgctgcccaccggcggcctggcagagaacggtggcgctaccggctggagctaccgcatcggcagcgggctgctgacggctgccaattccggcgtggtgatggcctccggtgcactgcagatgatcaacctgccgcccggcgcctatgtaccgttcgtcggccgcaacgccgccggcgtctggcagggcccgatctactggagcgcacgtcgcctggatggcgcaccggaagtgcgggtgacggtgacgcccagccgcgccaataccacgctgtatgcctacctgtatgccgaagacgtgctgggcaacggccagctggtcagccacaagccctacaccctgcgcggggccacgcccggccagccgaagacaatcgatctccgcctggaagccagcagctggaacctcccggccggcagccgcctgaccctggtggtcgataccgtggacctgcgctatgcgggcatcagccagctgggcggtgcggtgaccttcagctcaccggccaacgcgccttcggtgctgaaggtgcccctgcattga

SEQ ID NO: 494110 - DNA, 1455 bp, Stenotrophomonas maltophilia
atggcgctcgcatcgttgctggtcggtgcggtactggcagcaggcacccaaggctgtgccacagattggccgagcacgctgttgatggatctggaggctgctgacgcggccctgcgcggcagccatcccggggtggttgacccgcacaatcccggcttcgtcgcccagatggacggcgccctgtcacttgcacggtcgcgcgcgcgccaggtcgacagtttcgccggctactggtgggcgatgaagggctatgcggccacgttcaacgatggccacgtgagtctcaatccattggcgggcgcccccatgctgccggcccgatggcccgggttcctgacgggcttcgaaggtgacgcgcaggtggtgatggtcgtggatggacgccccggtcggccgcccatgggcgcgcgattgctgtcctgtgatggcgtcgatgcacaggcactggctgagtggcgcgtgggcgacttcaacgggcgctggaacctgcaggcgagccgtatccacgctggcggcgaggtgctgcttgaacagggcaacccgttcgtgccgacgttgcacagctgcgtcttctgggtggatgggcgccagagcgcctacacgctgcaatggcttccgattgatacggcaacacgcgaagcgcgactggccgatacccgtcgcagcttccgcccagccaatggctggcacacattggccggtggcggctactggatcaccaccagcagcttcaatgccgatccagccacgcgcaatgcccagcagctgaccgagcttttgcagcaactcaccccggtggccgacgcactgcagcaggcaccgcgggtggtgctggacgtgcgcggcaataccggaggtgcgtcgcactggagcatcgcgctggcccgtttgatctgggggcctgcagcggtggatgcattgcgtgacgagagttgggcggaatggcggacgtcggaggccaacatcgcgcagctgcgcggcttccggcagaagctgaaggcagcacacgacgcgtcgcccgaactgctgcacatgctggaaacggtcaccgcagggatggcccgtgccggtgcgaacggtgaggcgctgtggcgcgaaccggcggacgcgccggttgggccgatgcgtccgcccgctgcagccgttccggatcgcagcggcagggtggtgatcgtggcggacgcctcctgcggctcagcctgcctggatgcactggatctatggaggcggctgggcgctctgcaggtgggggtcgagacgtccgccgacagtgtctacatggatatcaggcctcagccattgcccagtgggctgagccggatttcggtacccatgaaggtctaccgcggtcgcgggcgcggttcgaacgagccctacgtgccggatcgccgctacgcgggggacatgcgggacacgcaggcgctggaggcatggatcctggagggcagcgactga

SEQ ID NO: 494111 - DNA, 1848 bp, Stenotrophomonas maltophilia
atgaaagagagcacgcccgagcgcgaggcccggcgccacatcagcaagcagctcaccgcgcagatcaacaacgcgcaggcgtatcccgacgtccgctcggtcgtggtcaaggccctgtcggacatcaaggaccagctgcgcagcctgtccagcaaggtacggcgcgactacagcctgaagcctgacgagccgctgatgttcttctacgtcaagggcggcaacgcactggacgcactgcttgaacgcccggcccagccgccaccgacgctgttcgatttcggccggtccgactgggatacgcaggtggtgatcaatccctggattccgatcccggcccaggacgccctgcacggcggcgtggaggacatcgtgatcgaggtgatgctcggcgccggcctcaacatcgcattggagatcagcgtcttcccacccaaccagaatccgctggccggccaagtggtggatcttgcaccggtggacatccatgtgccgcccggccagcagtgcctggtgacctgtgacacgccgcaggcgttccggaaggtctaccagcgtgaccgcgcgggcctgcatctgttcaccagtgaaccgctgaagggcatcggcacctccacggcctcggccagcccgtccgtgctgccaccgccgcagccgccactgcccgtgcagccgccacctacccctccgccgccacccggcatcatcctcaacgacggcatcaagccgttcgtgctgtaccgcatgggctacacctggcacgcgcgatgggtgaaggatccgaaggcgcctgccggcgacgacccggtgacgccgcggccgatcctgatggaactgatcgatgtgaccacgccgcgccgcgataccgtggaggccgtgacagtgtggtcggacatcatccgcaaccatctggtgattgccgaggatgccggcgcggaagagcgctggcggctgcccctgcccagcatggagtaccacctgtgggaaggcctgaccatgctgtgcgagatcgccgcctatcccggctggccgggtgcggacaagctggagaagcgtcgtcgcaatgtgcagcgcatccacgactggtaccgcgaccagcagggcgacctggcgacgttcggcagggtgatcgatggcatctcggcggcgccggtgttcgccgatgacagggactgcatccagcaggtcgatgcctgcatgcgtgaggtcaaaatgcgcatgcaggcgtcatcttccggattcgatcacggcgccttgtcggccacccacacgcatcgcctgcggcaggggcggcagtgggtcgcgcagcgggtcgcaacgctgctgcagcgcctgcagacatctgccgcatcctgtggctacagcgacgatctggcgttggtcgggacgctggcgcagaacccctacctggatgtcacccaggtgccgatctccgacgtcgactgcgcgatgatcatccgcaccgaccctgcaacgctgcgcagggcgacggcgaccaactgcttgaatgcgcttgcccaggatctcggcgcgcacatgaccatcgaggattccctgcactcgaccgtacgtgcgacgggtatcagttacgagcgaacgctggtgatcttcgatgcgccgcgttcgccgtcggcgcgcgtagccaaggcgatcctgacattcaccacggctggcccggtcggttgcccgttccgggacagccccgacggttccgggcaggccatcgcaccgttgctggacatggacaaccagcgcaaggtggcagcctcgatcgtccagggtttcgtgcaacgggcgaatctgtccaggcagcacgagatgattcgggtgctgttgccacagggggaatga

SEQ ID NO: 494112 - DNA, 1002 bp, Stenotrophomonas maltophilia
atgaaccaggtctacgtcgcagtctgggatggagcccactatctggtcgtccgcaaacgggtgctcaacagctggtggggcagcaattccgtggtcgtactttctgccgaggcgatggccgctgtgctggccatccgcaacgcgtccggcggtggcacagagcaggactgggatctggtgaagaagctgctttccggcgcctggcgcgccgcagggtcagtcgcctaccgcggcgaacgcacgctgccccgcaccatggacgcactggaccgggcgcttgaaagcgccgaacgcacgcatccgcaaaccgatgacatcgccatggagacgctggccgctctgcagagcctgttccgcgaggacgcaagaacccctcccacgttcagcgctgcgcgtgcaaccttgcgggagctctccatcgcgttgccgccgcccacccggggtgcgccgaactgggccgctgcgttgatactggcacaacgcctggtggcggaagtcggggcgtggtcggatggcctgcccccggcgctggtgaaccaggcggggcaatgtgccctgcccggcggcggccgcctgaacaacgaacgcaaggagcgcgccgcgcgccgcgagttcgaggaggagcttggcatctggcttgggcagggacgcgccgcatgcgatctgcgtgcccggctgtttccggatgggggaggcagcttctccctggttcgcttccgcaccacggccgaggagctcctgcggatggcgcaggaggccgagaacaacgtccaggccagtgccagcagccctgcgcgcccccagtcctgcctggtgaccgactgggaggtggcgagcatcggacgggtgccggtggccaatctgcgcaatgtcctcggggcacgtgtggaggttccgggcgaaggaacactggaggttgacgaggccctggccagcgccaggcccggtagccaggagatcgactggtaccgggagatcgccgctctgctgtcacccgcctga

SEQ ID NO: 494113 - DNA, 357 bp, Stenotrophomonas maltophilia
atggacacacgacgccgcgtttccagcgtattgactgcatccggcatgctcgcactggcactgtccgccaatgcgctcgcgcatccgggcgggctcgacaagcaggggtgccacaccaaccggaaaacgggtgagtatcactgtcatcgaggcgctccagcggcacctcgatacgtcgacactccgcgcagcagtttcgcccccgcgcccgcgcgcggttcccgggtgtttgccaactgcgcggaggcccgcgccgccggggcggcgccggtacggcgtggtgatccgggctatggcccgcacctcgatcgcgacaatgatggcgtgggctgcgaaccctatcggggccgcaggtag

SEQ ID NO: 494114 - DNA, 816 bp, Stenotrophomonas maltophilia
atgaagcgctggattttcctggcattggccacgctcccgttcactgccggtgccgtggtcatccgtgatgatgtggacgacacccggtatcagatcgatgcatcggccttccccgcgctggccgacatgccgggcgaggggcacggcgtcctgatcgcgccgcgctgggtgctgaccgccgcgcatgccgcgccgatggaagggaggggcgccaccatcaccatcaatgggaacggctacggcgtcgagcgtgtcttcctgcaccccggctaccggaagatgcccgaggcgctgggcaaggaagcgatggcaaccgggagcgcgtcgaaaatccacgcgttcctggcagcatcggatgacattgcgttgatcagacttgccgcaccggtgagcgatgtgccgccggccgcactctaccggggcgccgacgaggtcacgcaggtcgccgccctgatagggagaggcgccaccggcaatggtgcgactggcctggtgcccggcgggccgcatcgtacgacgctgcggcgggcctgcaacgcgatcaccggcggcaacacgcgctatctctggtaccggtttgatccgcctccgcagggccttccgcttgaaggcgtgctcggcaacggcgacagcggcggcccgctggtgatcgagaaagatggggcctggcagctggtgggcctcggttcctggatcaccgccgtacccgagcatgcgctggaagcgggtttctatgggcaggtggtctacaacgtgcgtgtgtcccgctacatcgactggatcgaaagcatcatcgagcgtgacgcgtcactttaa

SEQ ID NO: 494115 - DNA, 540 bp, Stenotrophomonas maltophilia
atgacggtcacccggccctccggctgggtacggagcggcgagcgctgggacctgtggtggaacgggcgctcggtggccaacgtcgtgccgcatgccgaacttggcttccgggtctacctggatgcacgcaggatgtcccagaccaaggtggtggccgccacgaatgtgcggcaggccaagcgctacgccgagcgctggtgtgctgcgcggctctgcccacagctgcggctgcgcgaggcagtggcacgcctggtggacgtagcgccggaaacaggcgctgcgccgtcgcccgcgctttcgcgggaacaacggcagcaggcccgccgcctggccgaggccggggcgggggaggtggtacggatcaagcaggcactggcgccgcgacagcccgcgatgaagacccgaccggaagtgcaggggcggggtggagcctggtcgatacccggccaggctccgtcaaaccgacattcgaacaacaattcctccccagccagggttatgccgagagttcttcgcgaacgatcctcgcccccgcgctga

SEQ ID NO: 494116 - DNA, 1035 bp, Stenotrophomonas maltophilia
atgccgacgaagacgctgctccccacctccaccgcaggcagcctgcccaaaccctcctggctggcagagcccgaaaaactctggtcaccctggaagctgcaggacgaagccctgcttgaaggcaagcaggacgccctgcgcctgtccctgcaggaacagcagcacgccggcattgatatcgtcagcgacggcgagcagacccggcagcatttcgtcaccaccttcatcgagcatctcagcggcgtcgacttcgagaagcgcgaaaccgtgcgcatccgcaaccgctacgacgccagcgtgccgaccgtggttggcgcggtgagccgcccgaagccggtgttcgtggaggatgcgaagttcctgcgccgccagaccacgcagccgatcaagtgggcgctgccgggcccgatgacgatgatcgacacgctgtacgacgcgcactacaggagccgcgaaaagctggcctgggagttcgcgaagatcctcaatgaggaagcgaaggaactggaggccgccggcgttgacatcatccagttcgatgagccggccttcaatgtgttcttcgacgaggtgaacgactggggcgtggccgccctggagcgtgcgatcgaagggctgaagtgcgagacggcggtgcacatctgctacggctacggcatcaaggccaacaccgactggaagcagacgctgggttcggaatggcgccagtacgaggagtcgttcccgaagctgcagacctccagcctcgacatcatctcgctggaatgccacaactcccatgtgccgatcgacctgatcgagctggtgcgcggcaagaaggtgatggtcggtgccatcgacgtggcctccaccacggtggaaaccccggaggacgtggccaacaccctgcgcagggcgctgcagttcgtggacgccgacaagctctacccgagcaccaactgtggcatggcgccactggcgcgcgacgtggccaggggcaagctgcgcgcactcagcgcgggggcgaggatcgttcgcgaagaactctcggcataa

SEQ ID NO: 494117 - DNA, 978 bp, Stenotrophomonas maltophilia
atgacgaccgataccttcaccttcagcatcacgcgcatccccttcaacgaggattaccagccggccgagggcacgcgcatcaccaccaacttcgccaacctggcccgtggcgcgtcgcggcgggagaacctgcgcaacacgatcagcatgatcaacaaccgcttcaacgacctggcacattgggacaacccgaatgcggaccgctatgcggtcgagctggacatcatctccgtggagatgcacatcgacggcgccgacggcagcgatccgttcccgttgatcgaagtgctgcggccgaccatcgtcgatacgcagaccggcgtgcgcagcgagggcatcgttggcaacaacttctcgtcctacgtgcgcgactacgacttcagcgtcgtgctgccggccagcaacgagggcaaggacaccttcggcattccggagggctttggcgacctgcacggcaagctgttccagcacttcctgcgctcggacgcctaccgcgccaacttcagcaaggggccggtgatctgcatcagtgtttccagcagcaggacctaccaccgcaccgagaaccatcacccgatcctgggcgtggaataccgccagggtgagttctcccccaccgaccagtacttcgacaagatgggcctgcaggtgcgctatttcatgccaccgggcagcgtcgcgccgctggcgttctacttccagggcgatctgctgggcgattactcgaacctggaactgatcggcaccatcagcaccatggaagccttccagaagatctaccgcccggagatctacaacgccaattccgtggccggcaaggtctaccagcccagcctgaagcaccaggactactcctccacccgcatcgtctacgaccgcgaagagcgcagccagctggcggtcaagcagggcaggttcaccgaagagcacttcatcaagccgtaccgcgccgtgcttgagcagtgggccgcccgctga

SEQ ID NO: 494118 - DNA, 585 bp, Stenotrophomonas maltophilia
atgacccgccccctccgtatcgtcgccgtttccggcggactgcaacgcccctcccgggccgccgccctggccgagcatctgctggacctgatcggcgaggacatccacagcgaacagcagctgatcgaactcggtgagctggcaccgcagctggccggtgcgctgtggcgctcgcagctgcccgaggccgtggagcggcagctggttgcggttgaacaggccgacgtcctggtggtggccacgccggtctaccgcggctcctacaccggcctgttcaagcacttcttcgacttcatcgaccaggatgcgctggtcgacaccccgatcctgctggccgccaccggcggcagcgagcgccacgcccttgtgatcgaccaccagctgcgcccgctcttcagcttcttccaggcccgcaccctgcccctgggcgtctacgccaccgaccgcgatttcgccgagggccgcgtgcacaacgacgcactgatccagcgtgcgcgactggccgtgcagcgggcgatgcccctgctggcgctgtcccatcgcgccgcgcctcccgctaccgcagaggccaccgcaacgctttga

SEQ ID NO: 494119 - DNA, 915 bp, Stenotrophomonas maltophilia
atgctggaacggatccacctcagcatcgtgcagcaggtcgaacagcagggctcgctcaccgcggccgccggcgtgctcaacctgacccagtcggcgctcagccacagcatgaaaaagctggagcagcagctgggcaccgatgtctggctgcgcgaaggccgcagcctgcgcctgacccaggccgggcagtacctgctggcggtcgccaaccgggtactgccgcagctggacctggccgaggagcggttgggccagttcgcgcagggcgagcgcggcgcgctgcgcatcggcatggaatgccatccgtgctaccagtggctgctgaagatcgtctctccctacctggcggcgtggccggacgtggatgtggacgtcaagcagaagttccagttcggtggcatcggcgcattgttcggttacgagatcgacctgctggtcacgcccgatccactgctgaagccgggcctgaagttcatccccgtgttcgattacgagcaggtgctggtggtggccagcaaccacgccctggccaaggtggaccacgtaaagccgcgccagctcggccaggaagtgctgatcagctacccggtgccgttcgagcgcctggacatctacaaccagttcctgctgccggccggcatcaccccgcggcgccacaaggccatcgaaaccaccgacatcatgatgcagatggtggccagcggccgcggcgtggctgccatgccgcgctggctggtggaggagtacgccacgcgcatggacgtggtgcccgtacggctgggcgccaagggcatccccaagcagatctacctgggtgcgcgcgaggccgataccggtatcgactacctgcaggccttcatcgaactggcccgcaacagctcgccgcttgccggcaatgtgggcggagcgcgttga

SEQ ID NO: 494120 - DNA, 873 bp, Stenotrophomonas maltophilia
atgtcggcaggcctgtcactgcgggcggaagccttcatcaacgccttttcactggaagtcagcgcgaaggccatgcctgcgctgcgcgccgaggcggatcggatcccgcgcggtacggtcatctccattccctggctggccagcgaggatgacgacgcccgcctggccgccgtgcgcaccgtgcgcgcgctcggattcgagccgatgccgcatctctctgcccgccgcatccggtcagccgcatcgcttgcgcgcttcctggagcgtgcggccggcgacgccggggtcgcgcgttgcctgctgatcgcgggcgacctggccacgcccgctgggccgtttgccgacagtgcttcgatcatccagaccggtcttctggagcactccgggatcaaggtcgttggtatcggcggacacccggaagggcatccggtaatgagcagtgacgaacgctggcaggcgcttgagcgtaaatgccagagcatcgaagcgcgcggcatggcccccttgatcgtcacccagttcgccttcgatgccgatgccgtgctggcctggctggaggcactgcgcgcgcgtggcatcagcgtcccggtgctggtcggcgtgccgggcccggccagcgtctctcgcctgctgcgctacgccgcgatgtgcggcgtgggcgccagtgcatcgatgctggcccggtatggcatctcgatcggccggctgctcggcacggcagggccggaggtgttcgtcgattgcctggtgaaggggctgacccgcgcccatggccaggtcagcccgcatttcttcccgttcggcggtattgcgccgtcgctggagtgggtggcgcagtaccggcaccacatttccatcagccagcgccgatga

SEQ ID NO: 494121 - DNA, 1152 bp, Stenotrophomonas maltophilia
atgtaccacgaccctgttcgacgccgcctgtgtgcggcgctgctggctaccggctgcggcctgtcagcaccatcggcgctggcgagccgggcgacgttggcgggatgcggttcgctgaccgcattgctgcaggccgaacggcagcctggcatggcggccgttctggtcgatcacgggcgcattgccgcgctgtccacgaccgggcggctcaatgacacccggcctgcaccgattgatcgccataccgtgttcgaactggggtcgatcaccaagctgttcacggccctgctgatattccggctccagcagcggcatctgctcgacgtcaccgcgcccatcggcgagtacgtcgaagggttgccttccgtatgggcatccacttcgctgctgcagctgctgagccatacctcaggcattcccaactatctgaatgaagacaacttcctgcggttgatgccgacgaatccagccccccgtgaattgctcgcagaggtggccgagcggccgctggcgtttgcgcccggtgcgcggcacgcctattccaatacgaactacatcctgctcggcctggccatcgagcatgcaaccggcatggactactggcgggttctgcaggaggagatactgtcgccgctgggcatgcgcgatgcgggaccgcgtcgtgccgacgatcggcgccgtgttgcccaggggcatctgttccaggacggccactggcgcgcaccgccacccactgctccgggctcggcatgggccgctggcggcctgctcgccagcatcgacgacatggcgcgctttgctgtggcgctggaccagcatcgactgttgcccgagtcggccctgaagcggatgtggtgcgacacactcctcgccaatggcagcaaggcgggctggggggccggctgggaagtttccgatggcggaaaggtagtcggccatggcggcgggaccgcaggctttaccgggtatctccggcaccgtcccaccgatcgaagaacgctcgtcgtgctgatcaatcgcgccggagatatcaacccgcagggcattgcagagcgcctcgacctgggcatgcgtggctgcaatgggaggctttccaggccggcgccttcgctggatcaacccggcacccggacaacgcgatccgtgccatga

SEQ ID NO: 494122 - DNA, 528 bp, Stenotrophomonas maltophilia
atgaacatgctccagcaactcgcctcgcagacgccgatctgggtctggctgctcctggccttcctggtcacccgtggcattgccgccatgaagccggcccagacctccctgcagaagctggcgatcgtgcccggcctgtttgccgtctggggtgcgtggtcgatcagccatcgtttcggcgcgtcgctgatcgcctggagcgagtggctggccggcatcgccacgggggccgcgcttgcctggctgctgttgagtcgattgaagctgacgctggaccgcagcaccggcaagctctggcgcagcgcggacttcagcctgctgccgctgctgctggtcaccttcctggtgaagtacggcttcgaggtcgcatttgcggtgtcgccgacgctgaccaccagtgccggcttcagcgccgcctacctgctgctgaccggcgggttcactggcgtcttcgtgggcaagtactgtcgctacctggcctcgctgcggacggatgcggcggggaaggggctggaaaccgcaggttga

SEQ ID NO: 494123 - DNA, 555 bp, Stenotrophomonas maltophilia
atggaaccatctgagcaggaatcgatagtggaagcgatatatccggtcggcgttgcagggggaatgcggatcatctggtttgcctgggtatcaggtgaccatgatcgggtgatgtccagcaatggaaggcctgtctgcgatagcagcaaggaagggctggagggtcaggttgccgcgcgcggccgagtcctggactgggaaggagagtccgtcattgacctcgactggctgatctcgtctgtagattcagggcgggaggtcgaccccggggaggtcgtggatgcatggaatttcatgacggacctctccagggtgatcgacaacgcccccaatcagctgtttcatgccgagttgatggagacctatgacatcttcttctcgcagtgcgaggtcgctcaatcgcttggtctgagatcgatttccattgcaaggcgcgatctggatcgagcccttgttgtcctgcgcgacggaaggcggatggtgcagggcatccagttgaacattgaaagtcctgtgccgtcgccaaccgtcgggcgcacgcatgagatccattga

SEQ ID NO: 494124 - DNA, 591 bp, Stenotrophomonas maltophilia
atgagatccattgatctgtggacaatgaaacggaacgccaggaaggctgggttgcgggtggttggcaactttctgattgcttcgtacacgcgcgatgtgatctccgggtttgccatcgacccagcgccgtcctccatctatgtgtggaccttcgcacttccggtctatgacggcctgccacacctgcatatgtctctcggccagagggtcgcttgcccggaagatccaaaggactttttccgcggcacgcacgaggctcacctcgcaatgctcgaaggggtgagaacagctgcggaccttctgatgtatgttgaagaggccggtttcgagggcgattactgccaatgggtgaagtacctgtccaccattcgcctgggcgatttcccggccgcagacgctgcactggagaatctgctcgcactgccggtgtccagcgcgatccgcggaagactggacaggatgctggaggcaatcgggcgaggtggcgaatcaggcgcgcggcagcttctgcaggaatggtcgatgcagacgacccgattgatgggtggcagcagcacattcgcctggagccaggacagcacaagcgcgtga

SEQ ID NO: 494125 - DNA, 903 bp, Stenotrophomonas maltophilia
atgagcatcaattgcgaaatcctggatctacgcgcgttcctgctggtatcggagacacgcagcttccatcgcgccgctgaaatcctgcacgtctcccagccggcgctcagccgacggatacagaagctggagcaggccgtgggttcgccgctgctggagcgcaccacgcgcagcgtcagtaccaccgctgtcggcgagaacctgctgccactggtgcgccgcatgctggaggaattcgatggctcgctgttctcgctgcgcggccgcgaagacacccgcggcgccaccgtgaccatcgcgtgcctgccgacggcggcgttctacttcctgcccagcgtgatggcgcgtttccacgaagcacacccgaacgtgcgcttccgcattctggatatcccggccacggagggtctgcaggcagtggaacgtggtgaagtcgagttcggcatcaacttcatgggcgccaacgatccgaatctcgacttcgacgtgctggccgaggatcccttcgtcctcgcctgccggcgcgatcatccgctggcccgcaagcgcaaagtggaatgggctgatctggccgagcaccagctgatcaccgtgcatcgcaccagcggtaaccgcacgctgctggacggcgcgctggcgcgcgagaacctcaagttgagctggcactacgaggtgacgcacctgtcgacgtcactgggcatggtcgaggccggcatcggcgtgtcggtgctaccgaagatggccacgccggacggggatcaccccaccctggtgacgcgcgcgatcggcaacccggtggtgtcgcgcacgatcggcatcgtccgccgacggggtgccctgctctcgcccaccgcagagcgattccttcagatgctgatgagccagtggcgtggggaggcgtga

SEQ ID NO: 494126 - DNA, 1122 bp, Stenotrophomonas maltophilia
atgtccaacgatctgctcagcattccctgcgtgctcatgcgcggcggcacctccaagggcccgttcttcctggccagcgacctgccggcggacaccgccgaacgggatcgcctgctgctggaagtgatgggctcgggccatccgttgcagatcgacggcatcggcggtggcaacgcactgaccagcaaggtggcgatcatcgaccgctcgagccgggcggacgccgacgtggactacctgttcgcccaggtccgggtggagcagcaggtggtggatacctcgcccaactgcggcaacatgctggcggccgtgggcccatatgccatcgagcgtgggctggtgcaggcgcaggatccgcagaccgaggtgcgcatccacaacgtcaataccggcaagctgatcatcgccacggtggaaacgccgggcggcactgtggcctaccgcggtgatacgcgcattgccggcgcgccgggctcagccgcgccggtcaggctgtccttccttgatgcggcaggcgcccgcaccggcaagctgctgcccagcgggcatgcgcaggaaaccatcaatggcgtgccggccagcctggtggactgcgccatgccgatgatgctggtgcgtgccgaagacctgggcgtgcgcggtgatgcctcgcccgccgaactgaacgcggacgcggcgttcatgcgccggctggaagcgctgcgcatcgaagcgggcgcccgcatgggcatcaccgacgccggcaacaaggtcattcccaagccggtgctgctgtcggcaccgcaacagggcggcgatctgcaggtgcgctatttcatgccgcaccaatgccacaccgcactggccattaccggtgcggtcggcctggccaccgccgccgtcacgccgggcacgctggtccacactttggtcggatgccggtccgttcccggcagcattaccctcgaacatccgagtggggccctggaggtgggcctcagtcgcagctcgggcgattcgccggtgattgccagcgtggtccgcaccgcacgccgcttgttcgaggggcgcgtgtacgcgacttcgcccgcgcccgccacggccagtgccacccaagcccgccaatggacgtcagcggcatga

SEQ ID NO: 494127 - DNA, 1059 bp, Stenotrophomonas maltophilia
atgtacaagcagttcttcttggccgcgctgtgcgcggccggtctggccgcggccggatgcagcaacagcgggcgcagcgaaggcgcatccgccggcggtggcgacaatgcaccggtacgcatcagcgtcggctcctacaacctcaacaacctgccgttcttcatcgccgacgccaaggggtacttcaaggacgtcggcctgcaggtgaagaccgagaacttcgcccagggcggctccaaggtattgcaggcgctggtggccaattccaccgacgtggccgtcggcttctacgaccacaccatccagatgcaggccaagggcaaggacgtggtggctttcgtactgctctcgcgcaactccggcctggtgatggccggccgcgaggatgccaccttcgatccggcgcgcccggagaccatcaagggccagaaggtcgggatcaccgcgccgggctcctcgtccgacttcttcgtccgtcacttcctcgcccagcacgatattccggccgacagcatctcgttgatcggcgtcggctcgggcgccgcagcggtggccgcgctcgagcagggcaagatcgacctgctcgtcaactatgatcctgccgccaccctgatcaccgagcgcaaggtcggcaggatcatcctcgacgcgcgcagcgacgacggcgcccgccaagtctatggcggcctgtacccgacctcggtgatgtacgccaaccagagcttcctggacacgcgacccgaagcggccgagaagatcgcccgcgccgagcagatggccttgaagttcatcgccgacaacagtgctgaagacatcgtggccgcgctgccggacagctacgtctccggtgaccgcgccacctatgcccgcgcggtggagaacgcgcgcgcgatcttcacccgggacggtcacttcacgcctgccgatctggaaacaccgctgaaggtgctgcgtgagttcaacacggatgtcgccaaggccgatatcgatctgtcccggacctataccaatgccttcgtcgagcgtgccaacgctgcggcgccggctgcccaaccgtaa

SEQ ID NO: 494128 - DNA, 834 bp, Stenotrophomonas maltophilia
atggccctcaatgccaccgtgcgccagttcaatggcgcgccgcagctggagcctgcacagaccatggtcgccatcaacaaggtgaccatgtccttcggcgaattcaccgccgtacgcgatgtcgacatccaggtgggtgacggcgagttccttgccatcgtcggacccaccggctgcggcaagagcaccatcctcaattccgtggcgggcctgctgaagccgtcgtcgggccaggtcagcatcgatggccgtgccgtcagcggcgtgcaggagtcggtcggctacctgttccagcaggacgcgctgctgccgtggaagaccgcgtaccagaatgttgaactcggcctgcgcttccgtggtgtgcccgaggccgaacgcaaggccaaggccaacgcgtggctggccaaggtcggcctggccggcttcgagcatcgctacccgcaccagctgtccggtggccagcgcaagcgtgtgcagatggcccaggcgttgatcgtcgagccgaaggtgatcctgatggatgagccgttctcggcgctggacatccatacccgccacctcatgcagaacgagctgctgcggttgtggcaggaagaccggcgctcggtgatcctgatcacccacgatctggaagaagcgatcgccctgggcgaccgcgtggtggtgctgtcctccggcccggccagccgggtggtgcgcagtttcgatgtggatctggaacggccgaggaacgtggccgaaatcaagctggatgaccgtttcaccgacctgtaccgcgacatctgggcctgcctgcgcggcgaagtggagaagagctatgcacgccaagactga

SEQ ID NO: 494129 - DNA, 777 bp, Stenotrophomonas maltophilia
atgcacgccaagactgacaagttcatccagctcgcgctggtggtcgccgtgttcggtggctgggaaggcggcatcgcgctgggcgtgatcgatccgttcttcttcccatcgccaaccgccatcgtgcagcaggcctggacctggctgtccgatacgtcgttctatcagcatgtctacatcacgctgaccgaaaccgcgctgggctacatcatcggcaccggcctgggtgtggccggcggcgtctggctcggcctgagccgccgctcggcacgcatcctcgatcccttcatcaagggcttcaacgcgattccgcgcgtggtgctggcgccgattttcgtgctgtggctgggcctggggctgtggtcgaaggtggcgctggcggtcacgctggtgttcttcaccacgttcttcaatgccatgcagggcgtgcgcgaggtgaatccggtggtgctggccaatgcccgcatcctgggggcgagccgcagtgacctgctgcgccatgtctacttccccgcagcggcgagctggatcctgtcttcgctgcgtacttcggtcggctttgccgtggtcggtgcgatcatcggcgaatacctcggcgcctcggcgggcctgggctacctgatcgcgcaggcagaaggcaacttcaacgctgtgggtgtgttcgccggcatcatcatcctggcggccttcgtgctggtcatcgacgcgctgctggacgtggtcgagaacaagctgatcacttggcgtcccaacgcccaggcacaggccaccagctga

SEQ ID NO: 494130 - DNA, 1434 bp, Stenotrophomonas maltophilia
atgaaccattccaacgtgctgccgctggcagcgctgtcggtcgcgctcggcctgctgttggccagtggccatgccgacgcacagtccacgtcgtcgctgcccgcgccgctgagccaggccgagctgtcacgcctggtgcagcagcaggcactgcagatccagcaactggaagcacgcctccgcgccgtcgagggcgggcagggcagtgcgagggcaccgtcaacgccgcccgcgcctgcgctggaaacgcgggtggccgcactggaaaccagccagtccaagctgccgaaggtctcctgggccaagggtgcaccggagttcagcagtgccgacggcacgacggtgttccgcccccgtggccgcctgttcgtcgatgcctccagcaccgacggttcggcggtcgccgaccgcaacgtttcgggtaccgagatccgttcggtgcgcctgggggccgaggggcgctacggcaccctgggctgggtcgtggagggcgacttcgccgacaacgcggtggcgtggaagtcggtctacgccacgctggaccacacgctgttcggcctgccggccgatctcacgctcggcaaccgcttgaacgatcgcggtatcgatggctcaagcagcacctccaacacgccgttccaggaacgcaacgtggtcggcacgctgctgctgccgcagcggggcctgtttggtgtcgggctcaccgagcgggtgtatggaaggggctggcatgccagcctgtcggtggccggcaacgacctcaacaacgccggcaccgacaacgacagccagacctgggccacccgcgtccactggaatccgctggacaccgccgacgccacggtgcatctgggcgcatgggccttccacgagaagattcccgccggggccagcggcgtggtgcgcagttcggccatcgcggggcatttcaacgatctggtcaggatcacaccgggcacgctggtgggcgccgagcgcagcaccgcctacggcgcggaactggccggcttcttcggcccggcgtgggcaaccggcgagtggggtacgcgaagcctgcgcggggccgatgccagcgggcgctatgatcgcgaccacgaagcgtgggcgatctcggccggctggttcctggcgggcgcgctgccgtcctactcgggcaaggccggcacgtggggcaaggtaaaggtggccgatccggtgacgcgcggcggcagtggcgcgtgggaactgaagggccgctatgaggacgtggactatgccgaactgcccagtggtggtaccggtcacgcgtggacactgggcgcgaactggtacctcaacgatttcagccgggtgatgttcgaagccgtgcgttggcagacccgccaccgcagcggcagtgctgcgggcagggatgaaggcaccaccttcaatacccgtctgcagctggtcttctag

SEQ ID NO: 494131 - DNA, 1248 bp, Stenotrophomonas maltophilia
atgctcgccccccattcccccctcgtgatctgggcagcggtcgccgttgccaccatcggcctgctgttccgtcccttccgcatccccgagtatgtgtgggcgctgggtgctgccgccctgttgccgctgctgggcgcggtatcgctgcagaccgcatggggcgcggtagccgaaggccgcgacgtctacctgttcctggtcggcatgatggtgctggccgaactggcgcggcgcgaaggcctgttcgattggctggcgttgtacgcggtgcggcatgcgggcggatcggggcgacgcctgttcgacctggtgttcctggtcggcacgctggtgacggtattcctgtccaacgatgcaacggccgtggtgctgacaccggcggtctacgcggcctgcaaggcggcgcgcgccaatcccctgccctacctgttcgtctgcgccttcattgccaatgcggccagcttcgtgctgcccatctccaacccggccaacctggtggtgtacggtcagcacatgccgccactgctgcagtggctggcgcagttcgcgctgccgtcggcggcggcgatcggtgccacctacctggtgctgcgctgggtacaccggcgcgaaatcgcgcagccgctggtcgccgcaccggaacatcgcccgctgaccgagggtggccgactgagtgcattgggcgtgctgttcaccggcagcgtactgctggtgacgtccgcgctgaacggaccgctgggcctggccacgttctgcgccggcgcgctgagcgtggcggtcgtggtgatacgccagcgccatagcccgctgccgctgctgcggcatgtcgcctggggcgtgctgccgctggtggccggtctgttcgtgctggtggaggcggtggcgcagaccggcgtcatccagaccgcggcaagcgcgctgcaggccatggcgcaggcttctccccaccaggccagctggctggccggtggcgccgctgcactgctgagcaacgtagccaacaatctgccggtcggcctggccgccggttcgctgggccagatggctgaactgcccgcacagacccgtgccgcactgctgatcggcgtggacctgggcccgaacctgtcggtgaccggctcgctggccacgatgctgtggctggtggcgctgcgccgcgagggcgagcatgtcagcgcgctcgacttcctgcgcgtcggcgcgctggtgatgccgcctgcactcatcgctgcgttgttgctgctgtga

SEQ ID NO: 494132 - DNA, 1200 bp, Stenotrophomonas maltophilia
atgccaacgtcctgctggttgtcctgcgccctggccctcgtgatcggcatcgcggggcccacccatgcgacgccgcctgccgacgccctcgccacgatcgagcgcaacgcgcgtgcctcgcataccgatgcggtgctcgtgatgcatgaccgggacacgctgcttgagctgaagcccgcccccgcgcaggaatccgtgcacctgatgtcggcaaccaagtccgtcgtcgcgctgggcattgcgttgctgctggacgaaggcaagctggcttcgatcgacgtaccggtcagccagatctatccggaatggaaacagggcaggaagagccgcatcaccgtgcgcatgctgctggaccacacctccggcctgcagaacgtggccaacgcgggcgccgaactggaaggggccccggacctggtcaaactggcactggcagccgagctgagtgacgacccgggcgccgtgttttcctacaacaacaaggccaccaacctgctgcccggcattgtcgagcgcctggcgggcgagccgctggatgcctacctggatgcgcgcctgttcaagccgctgggcattgcccaccacacctggatgaaggatgaggcaggcactccgctgggaatggcgggcctgtccctgcgcgccgccgatcttgccgccatcgggcaactgttgctggatggaggcgtggcgccggatggcaaacgactgttgagtgaacggtcagtggcattgatcactgctgaaagtgcccgttcgcctgacgtgggcctgttgtggtggcggataccagcgtgggaacgctatcagctcaaaccccggctggatgacctgctggccgggcacggcgttgacgatgacgtgcgccgcgccgtgcaggccagcgcggggcgcacattcgacagccgggggcagttgatcgcattcctcaccgaacggttgggcgcagacgggccgcaacgttacgccagccagatcaccgcgcgcggcctgaagctcgccgatctctacgacatcacacggggaccggtcgtcggctttgccgccaacggctacctgggccaatacctgatgatcgttccggaacaacgcgtcgtcgcagtgcgcctgatccatcggcgcgagagccaccgcgccccacaggacgactacgcgtccttcttcgccgatgtcatgcaattggcgcgggcactgcagtag

SEQ ID NO: 494133 - DNA, 213 bp, Stenotrophomonas maltophilia
atgtttgattaccaggactggaccttccacgccaatgggcgcacggtggtggcgcgcgtggcgctggacggcgacgggggcggcaccatcaaccgataccagctgatgcccgggccggcgcagtcggggctgtgcatcaaggtcgcctcccaggacgaggccgcgcagaaactggaggtcgaagtgatgaagctgctgggaccagagtggtag

SEQ ID NO: 494134 - DNA, 3129 bp, Stenotrophomonas maltophilia
atgagccgcgcgttggcgaagttccggtcccgggccatgttcaccttcgtgggtggcgccctggtcatcaatcctgcgtttgcgcaggacgcagcaccggcaaccgggcagcagccgcagagccagtcgcagcccacccagctcgatgcagtgcaggtcacgggcatacgcaacagcctgagccaggccatggacatcaagcgcgactcggcgggcgtggtcgatgcgatcagcgccgaggacatcggcaagttccccgataccaatcttgccgagtcgttgcagcgcatcaccggcatctccatcgagcgccgtgacggcgagggcgcgcaggtgaccgcgcgtggctttggtccgcagttcaacatggtcacgctcaatggtcgccagatgcccggcgccgatgcattcggtgcctccgggcaggtggccatcggcggtgtcgacggcggcactcgcgccttcaatttcgcgcagctggccgccgaggccatcaatggcatcgaggtctacaagaccagccaggcacaggtgcccagcggtggcatcggcgcgacgatcaacatcctgacctcgcgcccgctcgaccacgccggcatcgtggccaatgccggggcaaagctggtctccgaccagagccagccgttcgacaacgacctgacgccggagctgtcgggcatcttcagttacagcaatccggaaaagacctttggcgtcagcctcagcgcgagccagcagaagcgcaagggcggctcggtgcaggccacggagaactactggaacgtgcagccctggacggggtcgatgccgggcaacccgaccgtggtgaacgccccggccgtcggccagctctatgcgcggcccaacgacctgcgctacgcgttctccgaattcgagcgcgagcgagtcaatggccaggcagtgctgcagttcgcaccgacggacagcctgaccctgacgatggattacacctactcgaccaacgagatcaccgagaatcgtggcgagcagggcatgtggctgcagaacagcaactacaccaatgtccagttcgacacctccggtgcggtcgccaccccggtctacatccgcgagatcgccggcaccaaggacttcgggctggaacagcagcgcagcatgcaggagtacaagctgggctcgctgggcttcaacgcggtgtggaatgtcagcgaccgtttcaagctcagcttcgatgcgcacaattcgaagaatgaaagccgccccaatgacccactgaccggcggcggctccatcttcatgagcattgccggcaccaacaactgcacccgtggcccgcattgcggtggctcctgggtacaggaattgaacttcaacaatggcctgccggtcggcacccaggtctggtatcccagcactgccgatgcgatcgccgggaccaatggcgtggtcaatccgggcttccaggaaggcgagatcggcacccaggtgctgcgcgtcaacgcgcagacccagatcagcaagatcaagcaggcgcgtgtcgacggcgaatggaatttcgaccacggccgcttccagttcggcgtggatacgaacaagtccaccacccaccgcatccaggccgccgaggcctattcgacactgggcgactggggcgtggccaacgtggaccgggataccgccgccggcctgatggacctgctgcagccggtcagcatcgtcggcctgttcgatgactacagtgccaacagctggccggcctggcgcggcaatgccgggcagctcgcgcaatgggcatcgcgcgagtacggcgtcggcctgggtgtgaacccgcaacgcgcggccgacaacttcgtggaagagaagaccaaggcggcgtacttccaggtggaactggacggggagctgggcggcatgcgcaccaatacccgcctgggcgtgcgctatgaaaccaccgacgtggtgtcgacctcggtcattgccgttcccgagtccatcgagtggcaggccaacaacgatttccgcatcgtgctgtccgatgagcagcagcccttcaccgagaaggcgcggtacagctacatcctgcccaaccttgatttcagcatcgacctcaccgaggaactgaagggccgcgtttcgttcggcaagagcatcgcccgcgcgccgtacggcaacctgtatgcagggcccggtgcccagcagccgttcggctcggtgctgatcgatccgtcgtcgcgcgccagcggcaattcgcagaacccgagcctgaagccgctggaatcggacaacctcgacctggggctggagtggtacttcgccgatgccagctatgtgtcattgacctactggaacaagtcggtcagcaacttcatcggcaacacggtcgtccaggaaagcctgtacggcctcaccgacccgacctccgggccggatgcgcgggcggcgttggacttcctgaccagcggcgcctgcgtggcccaggtcgggccggccaatgcggccgcctgctcggccaacgacacctcgctgttcaccgcactggcgctgctgcgcaacaatccagctggcctgggcgcctacaacggcaccgatgcgcaggtactggccaccgaagcggcctacgatctgtatgggcaggccaacgacccgctgtaccagttcaacgtcaatcgcccgatcaaccagaacaagtccaagctgcatggctgggaactgggcggccagtacttcttcggtgacaccggcttcggcgtgctggccaactacaccgtggtcaaaggtgatgtcggctacaacaatggcggcgatccgggtatcgaccagttctcgctcaccggcctgagcgacactgccaacgccatgctgatgtacgagaagtacgggtggtcggtgcgcctggcatggaactggcgcgaccagtacctgatcctggccaaccaaggttccagccgcaatccgtactacgtggagccgtacgagcagtgggatctcagcgtcaactacgcgctggatgaccactggtccttcagcctggaggcgatcaacctgaccggcgaggatgtgcggtggcgctcgcgcacctcgcagatgatcgtcaagctggccgaccagagcccgcgctacatgctgggcgtccgctacaagttctga

SEQ ID NO: 494135 - DNA, 759 bp, Stenotrophomonas maltophilia
atggcccgctatgaaatgctcaacaacatcgcgcatcgggacctgagggtcgccaccggattcgggccgcagttcggcgatgcggtgggcatggtgccggcctatcccagcgagttcgccgaactgcagcgcgagtatccgatcttcctgcgccgggaggccgggaccggggcgtggcagtccgtggccctactgggtttcgagcagcacgagaacctgtacctgcaggacggacgctggaatgcctcctacctgcccggcgcggccgcaaaagggccgttcctgatcggcttccaggagcactacgtggacggcctgctcacccaggacgcggtgatgcacgtcgacctggaccatccgcgtgtcacctccggcgccggtgagccggtgttcctgccgcagggtggaaacacgccttacctggaccacatcgccggcgtgctgcgcggcatccacgagggcagtgccttcgcggccagtatgttcacaatgctcgacgactgtgggctcatccagccggtcacgcttgatgtgcagctcgcgccgcatcaccgcgtgggcgtgagcggattgcacggcatcgaccgcgagcgcctggcggcgctggacagttcacgcctggctgcgttgaaccgcgccggttacctggaaggtgcgtacctgatgcttgcgtcgctgcataacatgcgccgcctgatcgccgagaagcagcgccgtctccgcgtccaggacggcaacgcgcaggcggtcaggaactga

SEQ ID NO: 494136 - DNA, 1023 bp, Stenotrophomonas maltophilia
gtgcaagcctgcctgccgatacggagcctggaaggcatcgatcctgctgccttgccattggccgccctggtggaggccggtgagccggtcgtactgcgcggcatcgccagcggttggccactggtccaggccggactgggcggcgtgcgtgacgcgatggcgtacctgtgcagcgtcgatgcgggtgcgcccatccagtactcgttcggcggcgccgagatcgcgggccgcccgttctacagcgcggacttcacccggctgaatttcgaagtgcggcgtggcgtgctcgcccaggtgctggaagagatcgccgcggcgctgcatgcgccgcggccgccaacctattacgtggcctcgctgccgatcacgcgggcactgctgccggcattcgcgcaggccaacgacgccgggctggcgaagcagggcatcgatgccgccgccagcatctggatcggcaaccgggtgacggcctcgtgccatttcgacacacccgacaacctcgcctgctgtgcggtggggcagcgcgagttcacgctgttcccgcccgcccaggtcgacaacctctatccgggcccgctcgaacccacgccgggggggcaggtagtcagcgtggtggacttcgagcgccccgacttcgatcggcatccacgtttccgcgaggcgctggcgcatgcacgcagcgcggtacttgggcccggcgatgcgatcttcattcccagcatgtggtggcaccatgtacgcagcctggaaccgttcaacgtgctggtgaactactggtggcgaagctcaccggcctggctggggtcgccgctggcggcgctgcagcatgcgatgtggtccgtgcgcgacctgccagcgcgtgagaagcaggcctgggaagggctcttccgttactacgtattcggccccggcgagcgcgccggtcagcacctgcctgagacggcgcgcggggatctggcaccgttcgacgagcagcgcgcccgccgcatgcgcgcgatgctgctgggcaggctcaaccgttga

SEQ ID NO: 494137 - DNA, 1533 bp, Stenotrophomonas maltophilia
gtgttggatacccagagcacgcctgcagggcgcatccgcaaggtggtcattgccggtggcggtacggcgggatggctggccggctgcgcgctggcgcatcagttccgtgaccagctgcagatcacgctggtcgagtccgagcagatcggcacggtcggcgtcggtgagtccaccgtgccgccgatccgcaccttccatcgcttcctgcagattgacgagcaggagttcctgcgcgcggtggccggcaccttcaagctgtcgatctcgttcgagaactggcgcctgccgggggatcgcttcttccatccgttcggcaccatcggccacggcacctgggcggcacccttccatcacttctggctggacagcctgcgccgcggcatgccctcggagctgggcgacttcagcctggagagcatcgcatcgcatggcgaccgcttctcgctgcacacccagccgcaggccagctatgcgtatcatttcgatgccagcctgtatgcgcggttcctgcgccgcagggccgaggcccacggcctgcgccggatcgaaggcaggatcgcccaggtcaggcagcacgcgcacgacggttcggtgcaggcgctggtactggacgacggccaggtgatcgagggtgacctgttcatcgactgcaccggcttccgtggcctgctgatcgagcagacgctgggcaccggctacgaggactggcacgaatggctgccgtgcgaccgcgctgtggcggtgcagaccgaagcggtggcgccgccggtgccctatacgcgggcgatcgcccacgaagcggggtggcgctggcacatcgcgctgcagcaccgcgttggctgcgggctggtgtatgacagccgccacctgtccgatgacgaggccgcagcgaagctgctgcgcgatgccggggctccacctttgcgcgatccatggaaggtgccgttccgcagcgggcgccggctgaaggcctggaacaggaacgtggtgtcgctcgggctggccagcggcttcatcgaaccgctggagtcgaccagcatccatctgacgatcagcgcggtagtgcgcctgatccagctgttcccgttcgacggcatcagtgcgtcgctggtgcagctgtacaacgatgtcagccggcaggaaatggagcacgtgcgcgacttcatcatcctgcactaccacgccacgcagcgcagcgaaccgatgtggaaggcctgtcgcgagatgcgcgtgcccgaatcgctgcagcagcggctgcaggcgtggcgcgagcgtgcacatgcgtggcaggaccccggcgagctgttccgcgtggaatcctggaccagcgtgctgcttgggcagggcatcgcgcccggtcccgcccacccgctggcgcgggccgtgagtgacgccgacctgcgcaccctgttgagggggatccaacagcccgtgcagcaggctgccgcgcagatgccggcgcaggcggagttcatcgcgcagtactgcaggtccggcgtggacgtgtggcgttcgacggcagcaagcgcgtag

SEQ ID NO: 494138 - DNA, 1494 bp, Stenotrophomonas maltophilia
atgggtctggttgcagggatcgatgcagggacgcagagcctgaaggtgctggtctatgacccgcggacgcaggtggtggtggcctcggccagcgtgccgctcgcgctggacagcggtgccgacggcagccgtgaacaggcgcctgccgactgggtgtcggccctgcgcgactgctttgccaggatcgatccctcgctgcgcgctcgcgtcgtcgcgctggcggtatcggggcagcagcatgggttcgtgccggttgatgatgctggcgaggtactggcgccggccaagctgtggtgcgacaccagcacctcggccgaatgcatccagatcatggacgccgtgggcgggttccaacggaccatcgcgctggcgggcaatccgatcctggccggctacacagcgtccaagctgccctggacccggatccaccgtgccgacgcctatgcgcggctggcgaccatcctgctgccacacgactacctgaatttcgtgttgaccgggcagcggttctgcgagcttggcgatgcgtccggaaccggctggctggacgtgcgcacacgcacctggacgcaggaactgctgcgcgccaccgatcctgatcgtgatcttgccgcctgcctgccgccgatcgcagcacccgacgccctgtttgatatcgcgccgaaggccgcggccgcgctcgggcttgcagcggcggtgaaggtggccgttggcggcggcgacaacatgatggcggcgatcggcaccggctgcgtcacggaaggtcggctggcgatgagcctgggaacctccggaacgctgttcgcctattccggctcgccggtgatcgatccggacggtgcgtgggcggcgttctgctcgtccaccggtggctggctgccgctgatctgcaccatgaactgcaccgtggccaccgaacgcgtggccagcgccctcggtttcagcacccgcgacggcgatgcgcacctccacgcgacgccgccgggcgcaggggggctggtgatgctgccgttcctcaatggcgaacgtacccccgacctgccgctcggcaagggcgtgctggcaggcctggacatcgccaatttcaccccggcgcacctctaccgcgccgccatggagggcgcgacctacagcctgaagtacggctacgacgccttcgtccgcgcgggcatgcagttcgatcgcatcgtgctcaccggcggcggcagcaacagcgcggcctggcgtcagctggtggctgatgtgttcggcctgccggtggacgtcccggtacaggccgaaggcgcggcgtttggtgcggcactgcaggcgctgtgggcgctcgcccgggcgcggggagacgccacctcgatcagcgacatcaccgcgcgccacgtcaccgtcgatcccgcgctgtccgcacggccggatccggcccgcagcgatgcctatgcacgggcctacgcacgcttcctcagccatcttgatgccatcacgccgctgcagcgcggctga

SEQ ID NO: 494139 - DNA, 1335 bp, Stenotrophomonas maltophilia
atgagcacgcagcccttcatcggcgccaaggagtacttccccggcgtcggccgcattccgttcgagggcaagggctcggacaatccgcttgccttcaaggtctacgatgcaaaccgggtcatcggtggcaagaccatgcaggagcatctgcgcttcgccgtgtgctactggcacaccttctgcaatgccgggcacgatccgttcggcccgggtacccggcagttcccgtgggaggcagcctcgccactggccacggccgaagcgaaggtggacgcggcgttcgagttcttcaccaagctgggcgtgccgtactggtgcttccacgatatcgacctggcgccggatgccgacgacatcggccagtaccagaagaacctctcgcatatggtggccctggccaaggcgcgccaggaggccaccggcgtcaagctgctgtggggcacggcgaacctgttctcgcacccgcgctacatgaacggcgcatcgaccaaccccgacttcgcggtggtcgcgcgcgcagcggtgcaggtcaaggccgcgctggaggccacggtcgaactcggcggcgagcactacgtgttctggggcggacgcgaaggttatgcgtcgctggccaatacccagatgaagcgcgagatcgaacatttcgcgcgcttcctcaccatggcccgcgactacggccgcagcatcggcctgaagggcaacttcctgatcgagcccaagccgatggagccgatgaagcaccagtatgacttcgacagtgccacggtggtgggcttcctgaaggagcatgggctggacaaggacttcaagctcaacatcgaagccaaccacgccacgttgtccgggcacaccttcgagcacgacctgcaggttgcgtccgaccatggcctgctcggcagcatcgatgccaaccgcggcaacgcgcagaacggctgggacaccgaccagttccccagcgatctgtacgacacggtgggtgcgatgctggtcgtgctgcgtcagggcggcctggaaggaggcttgaacttcgatgccaaagtgcgccgcgaatcgaccgaccttgaggatctgttcattgcccatatcggcggcatggacgccttcgcacgcggactggaggtcgcccatgcactgctgaccgagtcgccctgggagcaatggcgcaaggagcgctacgcgagtttcgacagcggcgccggccaggagttcgagcgtggcacgctcagcctgccggacctggcgggcctggccgcccgcctcggcgaaccgcaccaggccagcggcaagcaggagcgttacgaaaacctgctcaaccagtacctgctgcgctga

SEQ ID NO: 494140 - DNA, 1410 bp, Stenotrophomonas maltophilia
atgaaccaggcagcaggcagcggtgagaacacccggctgatcgtactgatcagcgtggtagcgacgattggcggttttctgttcggcttcgacagcggcgtgatcaacggcacccaggacggcctgcaccaggcgttccggtccggtgaatggatgcaggggttcgagatcgcgtcgatgctgctgggctgtgcggtgggcgcgttcagtgccggccgcctggccgaccgcctcggccgtcgcaacgtgctgatcctgtcggcggtgatgttcctgctgtcggcactcggtgccggggcggcggcctcgtcgggctggttcattgcggcgcgggtggtgggtgggttcgcggtaggcgcggcgagcgtgatctcgccggcctacattgccgaggtcgctccggcccgctatcgcggccgcctggccacggtgcagcagatcgcgatcatcaccgggctcaccgctgccttcctgtccaactacctgctggcggccgcagcgggcgcgtcgaccgagccgctgtgggccgggcaggctgcctggcgctggatgttctggatgcaggccgcgccatcgctggtgttcctgctgctgttgctgaccattcctgagagcccgcgctacctggtggtgaagcggcgcaaggacgacgcgctgcgcgtgctcacccggctgctcggcagcgacaaggcccgcgccacgctcgaagagatcgatgcctcgctgtccaacgaccaccatcgcccgcgcctgtccgatctgaagagccgggcgaccgggcggatccgcccgattgtgtgggtcggcgtcgggctggcctgcttccagcagctgatcggcatcaacgtggtgttctattacggcgccgtgctgtggcaggcggtcgggttctccgagaacgacgcactgctgatcaacgtgctgtccggcgcgctgagcatcggtgcctgcgtggtcacggtgctgctgattgaccggatcggccgcaagcccctgctgtggttcggctcggccgggatgtcgctgtcgcttgcactggtggtggtcgcgtttgcaagtggttcactggccgacgggcatctgcagctacccgggcgcatgggcacgctggcgctggtggcggccaatgcctatgtcgtgttcttcaacctgtcgtgggggccggtgatgtgggtgatgctgggcgagatgttcccgaaccagatccgcggttcggcactggcggtcgccggcgcagcgcaatggacctccaacttcgtggtgacggtgacgttcccgatgctgctggccgcggcagggctggcggccacctacggcatctacctggtggcggcgatcatctcggtgattttcgtggtccggcatgtgcacgagaccaagggcaaggaactggagcagatggaaggatga

SEQ ID NO: 494141 - DNA, 2550 bp, Stenotrophomonas maltophilia
atgacatcgcagacctccttatcccgcagcggcgtgctggtcgccgtgctgacgctggcgttgctgggctgccacggccaggaccggcccgccgccactgcgggagccgccagcggcccgtggccacaggtcacctggccactggccgcggatcctgcgctggagaagcggatcaccgacctgatggccgccatgacggtggaggaaaaggtcggccagctcgtgcagggcgacatcgccagcctcacccccgatgacgtgcggcgctaccgccttggttcgatcctggccggcggcaattccgaccccggtggccgctacgatgcgtcgccagccgagtggctggcgctggcagacgccttctacgacgcctccatggacacgtcgaaaggcggcaaggccattccgctgctgttcggcatcgatgccgtgcatgggcagagcaacatcattggcgccacgttgttcccgcacaacatcgggctgggcgccacgcgcaatccggagctgctgcggcagatcggtggcatcaccgcgctggaaacccgcgtcaccggcatggagtggacgttcgcgccgaccgttgcggtaccccaggatgatcgctggggccgcagctacgagggctactcggaatcgcccgaggtggtggccagctatgccggcgccatggtggagggattgcagggcagggtgggaacaccggagttcctcgatggccgccatgtgatcgcctcggtgaagcactttctcggtgatggcggcaccaccgacggcaaggaccagggcgacacccgcatcagtgagccggacctggtacgcatccacgccgccggatacccgccggccatcgccgccggcgcgcagaccgcgatggcatcgttcaacagcgtcaacggtgaaaagatgcacgggcaccggcactacctcaccgatgtgctcaagggacgcatgaacttcggtggcttcgtggtgggcgactggaatggtcatggccaggtcaagggctgcaccaccacggactgcccggccacgatcaacgcgggcctggacatggcgatggcctcggacagctggaaaggcttctacgagacgacgctggctgcggtgaaggacggccggataacgccgcagcgcctggacgatgcggtgcgccggatcctgcgggtcaagttccgcctggggttgttcgaggccggcaggccgtccacgcgggccgttggcgggcagttcgcactgatcggcgcgccggcacatcgcgcggtggcccggcaggccgtgcgcgaatcgctggtcctgctgaagaaccagaacggcgtcctgccgctgtcgccgaagcagcggatcctcgtggccggcgacggtgccaacgatgtcggcaagcaggccggcggctggacgctcaactgggagggcaccggcaccacgcgcaaggacttccccaatgcggactccatctacgagggcatcgcgcgccaggccagggcggccggtggtgaagccgtgcttgccgttgacggtcgctatgcagtgaaacccgacgtggcggtggtggtgtttggcgaagacccctatgccgagttccagggggaccggcccaccttggcctacaagccgggcaacgaaacggatctggcgctgctcaagcggctcaaggccgatggcataccggtcgtcgcggtcttcctgagcgggcgtccgctctgggtgaaccgggaaatcaatgccgccgatgccttcgtggccgcgtggctgccgggctcggaaggcgccggcattgccgatgtactgctgcgcggaagcgatggccgggtgcagcacgatttcaagggcaagctcagtttcagctggccgcgcaccgccacccagtacgccaacaacgtcggccagaaggactacgatccgttgtttgcgttcggcttcggcctgacctacgccgacaacggcgacctggccgcgctgccggaggcatcgggtgtgaccggcaacgagggtgcgaccggcgtgttcttcgcgcgcggtcatgcaggccccagcatggcgctgcgccttgagcaggccgcaggccagggcctgaccgtgacccgcgtgccggacgcattgcccgatgatcggctgaagatcaccggcgtggatcatctggcgcaggaggatgggcgccgcctggcctggtcgggcaagggcgaggccgttgctgcactgcactcgcacacggcgctggacctgcagcgcgaatccaacggtgacctgatgctgctgaccacgctgcgcgtggacgctgcgccggagggtgaggcgtggctgtcggtcggttgcggcgtgggctgctcggcacgcatcgccatcgggccgtcgctggcggcgcttccacaaggccagtggaagcgcgttggcgtgccgctgaagtgcctggccaaggcgggtgcaaagctggacgcgatcgaccgaccgtggtcggtggtgacggccgatgcgatgacgatctccgtgtcacgcgtcgcgctgggcgcactgaacgaagccgaggtcgcccttggatgcggcgcatga

SEQ ID NO: 494142 - DNA, 1059 bp, Stenotrophomonas maltophilia
ttggacaagccgaagaaatcggttcgccgcagaaccgcaggcgtgacgatcgacgaggttgcggcccttgccggcgtttcgccgatgaccgtgtcgcgggtaatcaaccagggcaaggtgcgcgacgtcacccgagagcgcgtgctgcgcgccgtgcgtgagctgggctatacgcccaatcttgccgccagttcgctggccgctgcacagcacacgcgcattgcgctgatctacaccaaccccagcggcgcctacctgcgcgaactgctggtgggcctgctgcgcgtcgcctccagttccgccatccagctggtcatcgactactgggacaacctggatgccgaatccgaacgcagggcggcgcgtgcgctcgccggacgcgtcgacggggtgatcctgccgccgccgctgtgcgaatcgcaggccgccgtaagcgaactggtcaaggctggcattccggtggtggccatcgcatcgggtcgcctgagcgaggccctgtcctgcgtccgcatcgatgatttcagtgcgggcagggaaatgaccgatcacctgctccggcagggacacacccgcatcggtttcatccgtgggcgcgatgacctgagcgcaagtgcgctccgctacgacggcttcgtcaccgccctgcgcgaggccgggctggcggtggagcccggcctggtccagcacggtgactacacctaccggtccggcctggccgcggccgagaagctgctgtcccagcgccggccaccgaccgcgattttcgccagcaacgacgacatgggcgccgccgccatctccgtggcgcatcggcgcgggctggaagtgccacgcgacctgtcggtggtgggtttcgatgacacctcggccgccaccaccgtgtggccggaactgacaacgatccaccagcccatcgcctcgatggccaacgcggccatcgacatcctgctgcgcaccatccgccgtcctgcgggggacgcaacggtgctgcgcgaacatatgatgccgcatcggctgatcgctcgcggttcggtagccgcaccgcccacgcgccggtag

SEQ ID NO: 494143 - DNA, 2214 bp, Stenotrophomonas maltophilia
atgcgctgccccgggcccggacgtagtctacaaaggcgcatgttaacgccgttgttgcgcgctgtcggcacgcacctgtgggccctgctcgtgctgctggcctgtgctggcggggcacgggcggaggatggctatgcgctgtggatgcgctaccagccggttgccgcaacggtcgctgccgattaccggcggcaactggccgaagtggtggccccggatcgcacgccgatgcagcgcgccacccgcgacgagcttgcgcgcagcctccctggattgctgggagcggcgccgccgatgcgaacggcaatcagtaccgagcgtgccctggtgctgggcacgccgcaatcttcgacactcgtcgccgcgtacggcaacgagatcgccacgttgggcaacgagggcttcctgatccggcgggtccggatcgaggcgcgcgatgtgctgcttgtggcggcacgccaggatgtcggcgtgctgtatggcatgttccatctgctgcgcctgctgcagcgtggcaccccactgcaggcgctggatgtgcgtgagtcgccgcaggtcgcactgcgtgtgctcaaccattgggacaacctggatcgttacgtcgagcgtggctatgcaggcagctcgctgtgggactggcagacgttgccgcagtggcgtgacccgcgctacaccgactacgcccgtgccaacgcctcgctcggcatcaacggcaccgtcctcaacaacgtcaatgccagtgcgctgagcctgtcgccggcctatctggccaaggccgccgcgctggccgacctgttccggccctatggcatccgggtctacctgagcgcgcgcttcagtgcgccgatcgagcttggcggcctggcaacggctgatccgctggatccggctgtgcggcgctggtggcgcgacaaggtcgatgagatccatgcgcgcattccggattttggcggtttcctggtcaaggcgaactcggaggggcaacccggcccgcaggattacggtcgttcccatgccgacggcgccaacctgctggccgaggcactggcgccctacaacggcgtagtgatgtggcgcgccttcgtgtactcgcaccaggttcccgaagatcgcgccaagcaggcgtacagcgagtttgtagggctggacggtgccttccgccccaacgtgatcgtgcaggtgaagaacggtcccatcgacttccagccgcgcgagccgttccatccgctgttcggcgccatgccacgcacgccgctgatgatggaactgcagatcaccaaggagtacctgggttttgcgacgcacctggtgtacctgggaacgctttacgaagaagtgctgcaggccgacacccatgcacgtggcgagggctccacggtcgcccgcgtggtcgacggctcgttggaaggtcatgcactgaccggcatcgccggcgttgcgaacattggcgtagaccgcacctggagcggctcgcatttcgaccaggccaactggtacgcgttcgggcgactggcatggaatccgcagcagtccgcgcgcggcattgccgaggactgggctgcgctgaccttctcgcccgacccgcaggtgaccggcccgatcgtgcggatgatgatggactcgcgcgaggcggcagtggactacatgacgccgctcgggttgcatcacctcatggcacgcggccatcactacggtcccggcccctgggtggacggcggcccgcgtgcggactggacgtcggtctactaccaccgtgcagaccgcaacggcatcggttttgaccgcagcgcaagcggaagcaacgccgtggggcagtacttcccgccggttgccggggtttatggcgatccggcgcgggtgcccgagtcgctgctgctgtggttccatcacgtgccgtgggaccgccgcatgcgctcgggcaggacgctgtgggacgaactggtcgggcgctattcgcggggtgtgcgccaggtgcagtcgatgcaggcgacctgggcgggcctgcgcgatcggatcgatccgcagcggcaccagcaggtggcggcgttcctgcagatccagcgcgaggaagcgcagtggtggcgcgatgccagtgtggcgtacttccagtcagtcagcggccgaccgctgcctgcgggagaacggccaccgccacagccgttgtcgtactaccaggcgttgcagtttcctttcgcacccggagatgggcgatga

SEQ ID NO: 494144 - DNA, 1989 bp, Stenotrophomonas maltophilia
atgaaccggttcggatggtccgcccgcgcggcggcgttgatggtgctggcgtggcttgccgcaccggtggcggccggcgaaacgacgggtttgctgcacccgctgttccaggaccatgcggtcctgcagcgcgaccggccgatcaccgtctggggccaggcaagccctgggcaggcggtatcggccaccttcgcgggccaggcggtggccacacaggccgatagggcaggccgctggcaggccatgttccccgccatcgccgcaggcggcccgtacaccctcgaggcaaccgccgggacccggcgtgagacggcgcgggatcttctggtcggcgacgtctggttgtgcgcggggcagtcgaacatggagctgccggtctggcgctcgctcaacgcagccagcgagatcgcctcggccacgctgcaacggatccggctgttcagcgtgccgaaggacgcggccgtgcaggcgcaggagagcttcaagggtgaccctggatggacgcgggcaacgcccgattcggtgcgcggcttctctgcagcctgcttctatttcgcccgcgaactgcagcgcacggttaccgtaccgatggggctgatccaggcagcgtggggcggctcgcggatcgagacctggaccagtaccgatgccctgcgcgggcaaggtggcatggacgaggccctcgatattctcgcgcgctctgcccgtgatccgctggaggcacgcgcagcctggggccgccactggcagcactggtgggagacgcgcgaaggggcgctgccgggcgacgcaccttggcgcgcggataccgatgaccgcgcatggtcgcacgcaccggccacactgggcgcatgggagcggtggaacgagcccgcgcttgccgattacaacggcatggtctggtatcgcacgcaggtggtgctgagcgctgaacaggctgcacgcggcgcgaccctggagctggcatcggccgacgaggtggacgtgacctgggtgaacggggtcgccgtcggcagccagtacggcgccggccagaggcgctatccgttgccgagtggcctgttgaaggcgggatccaacagcattgcggtcaatgtgctggacacctacggcgaaggcggcctggccggcccctcaacggcatacggcctgcagttcgacaacggcgagcgcgtggcactgcagggcccctggaaataccgggtggcggcgggccagcaggcgccgcctttcgcgccatggcaggccgccaccgggctgtcgacgctgtacaacgggatgatcgcaccgctcgggggcttcgggctgcgcggcatgctctggtatcaaggtgaatcgaacaccagcgatggtgcgacgtatgcgatgcggttgcgtgcgctgcgcgaggactggcggcggcagttcggtgcgcgcacgccactgctgctggtgcagctggccggctacggccagccgccggtggcgcccgccgccagcggttgggcgcaggtgcgtgaggcgcagcggcgcgtcgccgccgaggacgcgctgagcgggctcgccattgccatcgacatcggcgacgcctatgacatccatccgccgaacaagcaggagctcgggcgccgcctggcgcgcttggcgcgccacgtggtgtacggcaagcaggacgtggcgccgtcgggtccgcgagcggtaacggccgtgcgcacgcccgctggcgtggccattgcgttcgaggatgtcgaaggcgtgctcaccgcgaccggcgcgctgcgtccgattggttttgaactgtgcgagaccaggggtgatagcggccactgcgactacggcgacgctgaactggatgggcgccggatcctgctgcgcggcccgctgtcgacgcacgcaacgcatgtccgctactgctgggccgatggcccggtgtgcacgctgcgcgacggcagcggggcaccggcaggcccgttcgaacttcccattgccgaagccgagacgcgacgatga

SEQ ID NO: 494145 - DNA, 1752 bp, Stenotrophomonas maltophilia
atgatgacgctgtccaagcagtcccctccggtccgcgacagggccggcctgaggtcgatggcgcgccacctgctggcggcggcactcctgctgtcggccgcaaccagcccggccagcgcgccgccggacgcaccgccggtgtacttcgactggttcgaataccgcggccacgacgcggccttcgacacgccgctgccggccggccactaccgcaatccggtgctggccggcttccatgccgatcccagcatcgtgagcgcgaacggccggttctacctggtcaattccagcttcacctatttcccgggcattccggtgttcgagagtgccgacctggttcactggaagcagatcggcaacgtgatcgaccgcgccacgcagctggatttcgacgggctgagcgtctcgcgcggcatcttcgcgcccaccatcgaataccacgatggggtcttctacgtggtgaccacggccaccgacagtggtggcaacttcattgccaccgcgcgcgacccggccggtccgtggtccgatccgcactggctgcccggcatcgatggcatcgatccatcactgttcttcgatgacgacggcaaggtgtacctggtcaacaacgacgcgccgcccggcacaccacgctacgacgggcaccgcgccatctggatgcagcagatcgatctggctgccttcaagccggtggggccgcgccgggtgctggtcgacgcgggcgtggagccggcgaagaacccgatctggatcgaaggcccccacatctacaagcgccagggctggtattacctgtccgatgccgaaggcggcaccgggccgcagcactcccaggtggtgctgcgcagccgcaccgtgtggggcccgtatgacccctacgcgggcaatccgatcctgacccagcgcgagctgcccgacgaccgaccgctaccgatcaccaatgccggccatgccgacctggtcgaaggcccggacggttcgtggtgggcggtgttcctggccagccgcaactatcagacgcggcactacaacaccgggcgcgagacctatctgctgccggtgcgctggcaggacggctggccacggatcctgccggccgaccagcccatcccctatgtggtcaaggcgccgtcgtggatgcagggcgaggcatcccaggccccctcgaccggcaacttcgtcgagcgcgacaacttcgatggcccgaggctcgatcgccagtggctgcgcgtgcgggtgcccaagcacgcctgggccgacctcgccacgcgcccgggaatgctggccgtgcacccgcttgccgaggatctggacacgctgcgcaatcccgcgttccttggccgacgccagcagcacctgcgcttcgaggcgagcgccgcgatgagccggccggggcctggcgtggcggccggcctggcggcgttccagagcgaggcgtactggtacttccttggcgttcgcagccttccggacgagcgactttcgctcttcctggaagtgcgtgatggcggtggcagtacgcgcatcgtggcgacccgcgaggtgcgggcaccggatgcgttgcgcctgaagatcgccggcaacgagggcgactacgcgttctcgttcgataccggcgacgggcagggctggcaactgcttgcaggcaaggtggatggcaccgttctgagcacggaccgggcgggcggcttcgtaggcgcactgctgggtcccttcgcgcgcgatgagcgcaccgggagaagcaaatga

SEQ ID NO: 494146 - DNA, 2694 bp, Stenotrophomonas maltophilia
atgaggctgtcgctgtcgtccaacgcccgtcgccgcacgttgcgccgcgggctcactgtgttcgttctgacctgcatcgcggcggccgcatccgcagccgcgccgcggccctggctggacgtttcggccagcttcgagcaacgggctgcctcactcgtcgcgcagatgacgctggaagagaaagccgcgcagatgcagaacgccgcgccggcaatcgaacgcctgggtgtgcccgcctacgactggtggaatgagggactgcatggcgtggcacgggcagggcaggccacggtctttccgcaggcgatcggcctggccgcgaccttcgatgtgccgttgatggggcaggtggccacgacgatcagcgatgaggcccgcgcaaagcaccaccagttcctccgcgaaggcgcgcacggccgttaccaggggctgaccttctggtcgccgaacgtcaacgtcttccgcgacccgcgctggggccgcggacaggaaacctatggcgaggacccgtacctcaccgcgcgcatgggcgtggccttcgtacgtggcctgcagggcgacgaccccgtctaccgcaagctggacgccaccgccaagcatctggccgtgcacagcgggccggaggccgaccgccatcacttcgatgcacggcccagccggcgcgacctgtatgacacctacctgccggcattcgaggcgctggtcaaggagggcgacgtcgatgctgtgatgggcgcctacaaccgcgtgtacggcgagtccgccagtgccagccgtttcctgctgcgcgatgtgctgcgacgcgactggggcttcaagggctacgtggtctcggactgctgggccatcgtcgacatctggaagcaccaccatatcgtgaccacgcgcgaagccgctgcggcgctggcggtcaggaatggcaccgagctggaatgcggccaggagtacgccacgcttccgtcagccgtgcgtcagggtttgatcagcgaagcggagatcgacgatgcggtgacccgtctgttcaccgcacggatgcgcctgggcatgttcgacccgccggagcgggtgcgctgggcgcgcattccggcctcggtgaaccaggccccggcccatgatgcgctggcgctcaaggccgcgcaggcgtcgctggtgctgctgaagaacgacggcatcctgccgctgtcacgcgacatcaagcgcattgccgtggtcggacccactgccgacgacaccatggcgctgctcggcaactacttcggcacaccggccgcgccggtcacgatcctgcagggcatacgcgaggcggccaagggcgtcgaggttcgctatgcccgcggcgtggacctggtggagggccgcgacgatcccggtgccacgccgttgatcgagccgaccttcctgcggccttcggcggactcgcccgagcgtggcctgcgtggcgagtacttccgcacgcccgacctgtccggtacgccggccctggtgcgtaccgacgcgcagatcggcttccgctgggaccgcggctcgccgaccgacaacctgctggcacgcggcgaagcggcaccggggcaggggatcccgaacgaccgcttcagcatccgctggagcggccaactgctgccacccgtgtccggccgctaccggctggaggtggccggcgatgatggctaccgcctgtacctggacggcaagcgcgtgatcgatcactgggtgaacacagatcgcctgcatgccgagggcatcgaactggagctgcaggccgggcgtgcctacgcgctgacgctggagtactacgacgacgagcgcgatgccggcgtgcgcctgggctggcgcatgcccggcgccaaggcgccgttcgatgaagcgctcgatgccgcacgcgaagccgatgtggtggtgttcgtcggtggccttaccggcgatgtcgaaggcgaggaaatgacggtcaactatccaggctttgccggtggcgaccgtaccgacctgcggttgcccgccccgcagcgcaccctgctggaggccctgcacgctaccggcaagccggtggtgatggtgctcaccggcggctcggcgatcgccgtggactgggcgcagtcgcatctgccggcgatcctgatgagctggtaccccgggcagcgcggcggcaccgccgtcggccaggcgctgttcggcgacgtcaatcccgccggccggttgccagtgacgttctacaaggccagcgaagcgttgccggcattcgacgactacgccatggagggccgcacctatcgctacttccgcggcacgccgctttatccgttcggtcacggcctgtcgtacacgcggttcgactatggaacgctccgcctcgatgcagacagcctccgcgccgatggccgcctgggcgtggcggtcgatgtgaccaacgcaggcacgcgcagcggtgacgaagtggtgcagctgtacgtgcggcgcgagcacgctggcagcggcgatgccgtgcaggagctgcgtggcttccagcggatccatctggccccgggcgaacaccgcacggtgacgttcaccctggaggcagcgcaggccctgcgccactatgacgaagcgcgcgccgcgtatgaggtgcggcccggtgcctacgaggtcagggtgggggcgtccagtgccgatgcacgcgcgcagggcaggttcacggtggtgtccgcgcatgactga

SEQ ID NO: 494147 - DNA, 1485 bp, Stenotrophomonas maltophilia
atggcaagcactgaacacgcgctatcgatacgcgagaagctcggctacagcctgggcgatctcgccgccaacctgatcttccagaccctgatcacctacctggcgttcttctacaccgacgtctaccgcctgccagctgcgaccgcggccacgatcatcttcgtggtgggcctgctgggtgcgttcgtgttcacgccgttgatcggcatcgcggctgaccggacgtccacccgttggggccgcttccggccgtggatcctgtggacggccattccctttggcgtactgtccctgctggcgttcagcacgccggacctgggcgagcgcggaaaggtgatctatgcactggccacctacgcgctgctggtgtgcgtgtacgcagcgaacaacctgccgtactcggcgctgagcggcgtgctgaccggcagcatggcccagcgcaacagcctttcggcctaccgcttcgtggccgtgatgatcgcgcagttcatcatccaggtgctgctgatgccgctggtgctgatcctgggtgacggcgaccgggtgcgcggcttcgagcaggtcatgaccgcattcgccatcatcggcacggcgttcttcctgatcacgttcgccaccacccgcgaacgcatcgtgccgacgcgtgaacagactggcggcatagtgcaggacctgtcggacctgctgcacaaccgcccgtggcaggtgatgctggccctgaccgtgctggtgttcatcaacctggcattgaaaggcggtacctacatctattacttccagtactacatgagtgaagcggcgctggccggcttccttgaaaactcggggttcaacggcctggtcagcgcgttgaatgctgcgctggccagcgccggcttcgcggcgttcacctggccgaaggacgcggccacctcggcgttcagcctgttcaacgcgtgcggcatcctctgcatgatcctgggtatcggcgcgtcgcgacggctggcggaccgcttcggcaagcgcgacgtcttcggtggcgccctgtttgtctcgaccctgttcctgcttgccttctacctgtttccacccacggcggtggcggtggcgttcggcgccttcatgctgcatggcttctgctatggcatcactatcccgctgctgtgggcgatgatcgccgacgtcgcggactactcggagtggaagaaccatcggcgggcaaccgcgatcatcttctcggcgatgctgtgcgggctgaagatcggcctcagcgtgggcggcgcgctggtcgccgcgatcctcgcccactacggctaccaggccggcctggcgcagcagcctgaggccgtggtgcagggcatccgcctgaccgtgagcgtctactgctcccttcctttcctgctcgccgtggcgctgctggtcttctacaggatcgacaagcgcaccgaaacccgcatcgagcaggacctccacctgcgtcgccgttccgccgacgcctccgtgtaa

SEQ ID NO: 494148 - DNA, 1038 bp, Stenotrophomonas maltophilia
atgatcgacctctctgccggcgaagacggccaggccagcgaagcccgtcttgcgcagctcaccgcgcacgccatttcgcaaccgctggtgacccacatctataccgcagacccttcggcgcatgtgttcgaggggcgcctgtacatctatccgtcgcacgacatcgacggcggccagccattcgacgacgaaggtggccacttcggcatgcaggattatcatgtgctgaagatggatacgcccgacggcacggccgtcgattgcggcatggcgttgcatgtgcgcgacgtgccctgggcccggaaacagatgtgggcccccgatgccgcctgccgtgatggccgctactacctctacttcccggccaaggatgccgagggccggttccgcatcggcgtggcgatcggtgcgcggccggagggcccgttcgtgccccagccggagccgatcaagggtgcgtactcgatcgacccggccgtgttcgaagacgaggatggcagccactacctgtacttcggcggcatatggggcgggcagctgcagaagtatcgtgacaaccagtacagcgaggcccacgaggagcccgagggcagcgcaccggcgctgggcccgcgcgtgggccgcctggatgccggcatgaccgagctggccgaacccacccgcgaagtgcagatcctggatgagcatggccagccgctgcgcgcggacgaccatgcgcgccgcttcttcgaaggtccgtggctgcacaggtaccagggtcgctactacctgtcgtactccactggcaacacccaccagctgtgctacgccatcggcgacagcccgtatggaccgttcacctacgctggcgtgatcctcacccccgtggtcggttggaccacccaccactccatctgccagttcgaaggacagtggtacctgttctatcacgatgcactgatgtccggcggcatcacccacctgcgctcggccaagtgcacgccgctgcacatggagccggacggaagcatccgcacgatcaacccgtatggggcctga

SEQ ID NO: 494149 - DNA, 831 bp, Stenotrophomonas maltophilia
atgctgccggtggatgatgcgctggctccgctgccagccggcgagctgcactggctgaggtgcggcgaactggaggttgcgttcgccgcaggggcgggcgggcgcgtggcgcacctgcgctaccagggcgtggaatggctggtggatgcgcagcaggcaggcccggcggcgatcgcgtggggctgctacccgatggtgccgtgggccgggcgcatccgccgtggacagttccattttgacggcaggccgcatcggctgccgctcaacttcgacgggcacgccatccatggggtgggtttctcgcgaccctggcggatcgaccgcttggacgcggcggcagcccggttgtcgctggagctgccgagcgacggctactggcctttcggtggcgctgccgtgctggacctgcagttgcaggctcacagcctgcagatggacctctcggtccaggccggcggccaggcgatgccggcggtgctgggctggcacccctggttccggaagccggaacgactgctgttcagtcctcgctcgatgtatccgcgggacagggaaggtattgccacgctgccccgcgtggagcccaccaccggcccctgggatgactgcttcatcgccgacggtgacgtcacgctgatacgcgaaggccagcacctgcggctgaggtcggaccacgaccactgggtggtctacgatggtacgccgcacgccacctgtgtcgagccgcagagcggcccgccagatggctacaccctggcaccgcaccggctggagcccggccagcgcctcgcattgacattcgaactggcgtgggcggcggacagcacctga

SEQ ID NO: 494150 - DNA, 1254 bp, Stenotrophomonas maltophilia
atgacctccccttcccgccgcctgctgccgacagtgatcctgctggccctgccatcactggccgcagccgccgacgcgagcgacgtcttcgctccgaagctcgcctacaccggcgaagcggccgccacgctcgacggtggcaagcgcagcggcacggcctatgccggccagctgatgttcggtgccgacgtggacctggacgcggcgtttggctggcgaggtgcgacggtcaaggcctacggcatcaaccgccatggcaccaatctcgccaacagcagtacaggcaacagcacctcggtgcaggaaatctacggcggccagggcacgcgcctggccaacctgaccctcgaacagaagctgttcaacgaccggttggtgctggaagcagggcgcagcgtcgccaacatccaccacctgggttcggacctgtgccagtacttccagggcaactcggcctgtggcaacccgacctacgtattccgcaccagcagtttcacctggtggccggtatcgagctggatggccgatgccacggcctgggtgacgcccgatgtctatgtccgcgtcggcgcctaccaggttgatcccagccaggccgaggatggccagcatggcctgaagtggaatacgaaccaggccaccggctggatcgtgccctacacgatcggctggcgcagccctgcttcggcacgactgaaagcccgctacgaactcggtggttggcaggacaactcgacctatcgcgatccgctgcgcgatgccaacggcattcccgcgctgctcagtggccaggagtacgcgacgcgtcacggtcgctccggtgcgttcgcccgcttcgagcagcagctcaccagtgatggtgccggccgcggcgtgacccttttcggtgcggcgctcaagggcacctccggccagttgatcgaggatcatttcctgcaggccgggctggtgcagaaaggcacgttcgcccggcggccgcaggacagcatcgctttcgtcgtgacccagcagaagtacagcagcatcgcgctggaagacctgcgcctcgcccgcgccgcagccggtggcagcggcaccccgcacgggagccaggtgatgatggagctgagctacggcatccagctcaccccgcagcttcgtgttgcaccgaacctgcactacatcgtgcaccccgaccagttcaatgagcccgcacgccagcacgacctgccggatgcgctgatcgcgggcatgcggatcgactggaacctgtag

SEQ ID NO: 494151 - DNA, 1707 bp, Stenotrophomonas maltophilia
atgcaagcttccaccgtagtcatcgccgctggcgaacgcagcatcgaggccgttcttgccgccgaagcgctgcgccgcgccgcacgccagcaaagggtcgaattggcgatcgaaatccgcagcaatcagggcgtgaccggggcactgtccgacgcgcaggctgccgccgcaacgcagctgctgctggtgggtgacggcgaggcggacagcgcccgcttcggcaatgcccagatcgtgcgcgccggcctcggtgaagtgctggacgacccgctcgccgtgctggcgcagctcgccgcagcatcggcacccccttccagggatgacgcgggcaagcgcatcgtcgccgtcacctcctgcccgaccggcatcgcccacacgttcatggcggccgaaggcctgcagcaggcggccaaggcactgggccacgcgatccgggtggaaacccagggctcggtcggcgcccaggacgcgttgagcgacgacgaaatcgccgccgccgacctggtgctgatcgccgccgaccgcgaagtcgatctgtcgcgctttgctggcaaacgcctgttcaagagcggcaccaagccggcgatcaatgacggccagaacctgatccgcaaggcgctggccgaggctggcgtgcagaccggcagggtggcttcaggtcgcaccaccgagaaggccagggtcaccggcccctacaagcacctgatgaccggcgtgtcgttcatgctgccgttcgtcactgccggcggcctgctaatcgcactggcgttcgcgctcggcggcatctatgccttcgacgatgcacacaagggcacgctggcctggtcgctgttccagatcggcgccaagtccggcttcatgctgatggtgccggcactggccggctacatcgcctactccatcgccgatcgcccgggcatcgccccgggcatgatcgggggattggtggcagtcaacatggatgcgggcttcatcggcggcatcctggccggtttcatcgccggctacggcgtgcattggatcaaccgtgcgctgcgcctgccgcgcagcctggaaggcctcaagccggtgctgatcctgccggtgctgggcacgctgctggtcggcctgttgatgatgtatgtgatcggtacgccggtggctgggctgctggcctggctgaccgactggctgcgcggcatgcaaggcagcagcgcgatcctgcttggcctgttgctgggcggcatgatggcggtggacatgggcggccccgtcaacaaggcgtcctacgccttctctaccgcattgatttccagccaggtctacacgccgatggcggcgacgatgatcggcggcatgacgccgccgctgggtatcgcactggcgacatggctgttcagcaaccgcttcactgccgaggagcgtggcacggccggtgccgctggcgtgcttggtctcagtttcgtgaccgaaggcgcgatcccctatgccgcgcgtgatccgctgcgcaccattccggcgctgatccttggttctgccgtggccggtgcgatctcgatggccgcaggcgtcgaactgaaggtgccgcatggcggcgtgttcgtgctgccgatcccgaacgcagtcacccaccttggcatctacctgctggcactcgtggccggcgtcgccgtcaccgcgatcgcgctgcgcatgctcaagaagccggtcacggctcccaccctgtaa

SEQ ID NO: 494152 - DNA, 957 bp, Stenotrophomonas maltophilia
atgagttcccgcgccgtcaccattaccctgaacccggcaatcgaccagaccgtgcggctggcgaacctgcaaccgggtcacgtgcatcgcgcccgcagttcccgcgacgacgctgggggcaaaggcatcaacgtggccgcctgcctggcagactggggcgtgccgaccactgcgctgggcgtgctcggcgatggcaacgacggcgtgttcagcgcactgttttccgatcggggcatcgcagacgcgtgtctgcgcattccgggccgtacccgcaccaacatcaagctggtggaagatgccaacggcgagaccaccgacatcaacctgcccggcctgtcactgtgcgacgccgatctggacgcggtatcgcgccgactcgacgcactgctccagccgcagctgccggtggtgctgtccggcagccttccgtccgggctgcaagccgatgcatgggcccgactgcaggcgcaggtgcgcgccgccggcgcgcgcgtactgctggataccagtggcgacgcgcttgccgcggcgttgagtggtgcacagggtgcactgccctacgcggtcaagcccaaccgccatgaactggaggcctgggccggcacgccgctgctggatcgcagcgccctgcgcgccgcgggccgggccctggtcgaacgcggagttgcactcgtagcgatctcgatgggcgccgacggcgcgctgttcattgattgcagcggcgccctggtcgcacgaccggcgcgactggcgcagggcagtacggtcggtgccggcgacgccatggtcgccggcatcgccgccgccttgttggagccctcccccgacctggccagttgtgcgcgactggccacggcgttctcgatgagccggctggagagtggcgacgcgcgacggctggacccggcgcaggtgcgcgcgtgggccggcgatgtactgatcgagcggttggattga

SEQ ID NO: 494153 - DNA, 2511 bp, Stenotrophomonas maltophilia
ttgtcgcgccagaccttcccctcccccgtcagccgggaactgatccgcctggacgcgcgggcgcaggacaagaccgatgcgatcgcccaggtcgcgcagatgctggtcgcggccggctgcgtggcgccggggtacgaggccagcatgggacggcgcgaagcgctggccaacaccttcctcggccatggcgtggcaatcccgcacgggcttggcgaggaccgccatctggtgcgccgcgatggcattgccgtgctgcagttgccggaaggcgtggaatggaatccggggcaggtcacccgtctggtggttggcatcgctgcccagtccgatacccacattaccctgctgcgccgcctgacccggctgatccaggatgaggcaacgctgcagcgcctgtttgcgaccaccgatgcgggtgagatcgtcaacgcgctgaccggcgacattgcgatcacggccacccaggtaccggccaccgatctggccgagcgctttgactggaccattgcctaccccagcggcctgcacgcgcgcccggccacgcgctgggcagagacggcgcgccgctttgcggcccgcgcccaggtgcgtgccggcgaccaggcagcggacgccaagagtctggtcgcgctgctgcaacttggcctgcgtcatggcgatgccgtcagcgtatctgccgagggggcggatgcccctgccctgctgaccgcgctgcgcagggtcatggaggacctggtggcacaggaaaaggccgacgccgaacgcgcagcacaacgcaaggccacgccggtggcaggctggaatccgcccgaggcacaggctgccatcgtcggcatcggtgccagccctgggctggcaatcggcccggtgcatgtattggccagcacgcaggccgaggtcgccgatcgcccggccccgctcggcgaaggcggggcgcgtctgcaggacgcgctcgcacgtacccgccagcagttggccgcgctgcaggatgacacccagcgccggcttggcgcctcggacgccgccatcttcaaggcccatgccgcgctgttggacgacaccgacctgattacccgtacctgccagctgatggtcgaaggccatggcgtcgcatggtcctggcaccaggccatcgaacacatcgcctcgggcctggccgcgctgggcaacccggtgctggccgggcgcgccgccgacctgcgtgacgttggccgccgagtgctggcgcagcttgatccgtcggccgccggtggcggcctggccgacctgcccgcgcacccgtgcatcctgatcgcggcggacctgtcgccgtccgacacggccaacctcgacactacccgcgtgattggcctggccaccgcgcagggcgggccgacctcgcacaccgccatcctctcgcgcaccctcggcctgccggcgctggtcgccggggggggcgagctgctcgcgatcagcgccggtcgcgaggcgatcatcgacggcagcagcgggcggctctacctgtctccgtccgaggccgacctcgcctcggcgcgcgcgtggatcgccgaacagcagcagatccgcgagcgtgaagcggcgcaacgtgcgcagccggcacagacgccggacggccaccgcatcgacatcggcgccaacgtcaacctgcccgagcaggtgccgctggcactggagcaaggcgcggaaggcgtcggcctgatgcgcaccgaattcctgttccttgaacgtggcagtacgcccagcgaggatgagcagtacaccacgtatgtggcgatggccaaggcactcggcggccgcccactgatcgtccgtgcgctcgatatcggtggcgacaagcaggtggcgcacctggagctgccgcatgaggaaaacccgttcctgggcgtgcgcggcgcgcgcctgctgctgcgccggccggacctgctggaaccgcagctgcgtgcgctgtaccgcgcggcgaaagacggcgcgcgcctgtccatcatgttcccgatgatcacctcggtgagcgagctggtcgcactgcgcgccatctgcgagcgccagcgcgcagcactgcaggcgcccggggtaccgatcggcatcatgatcgaagtgccggccgctgcggcgcagagcgatgtgctggcccgccacgccgacttcttctcgatcggtaccaacgacctgacccagtacgtgctggcgatcgaccgccagaatccggaactggccgccgaggccgacagcctgcatccggccgtgctgcgcgcgatccgcgccacggtggaaggcgcacgactgcatgggcgctgggtgggcgtctgtggcgggctggccggcgatccgttcggcgcactgctgttggccggcctgggcgtggacgaactgtcgatgaccccgaacgacatcccggccgtgaaagcacgcctgcgtggcagcgcgctggccgatctgcgaacgctggctgcgacggcgctggactgcgaaaccgctgagcaggtgcgtgcgctcgatggagcgcgcgcatga

SEQ ID NO: 494154 - DNA, 984 bp, Stenotrophomonas maltophilia
atgagtatcagcatcaatgacgtcgcgcgtgtagcgggggtatccaagtccaccgtgtcgcgggtgctcgggggcggcccggtcagcgaagaggttcgcggccgggtcgaggtggcgatccgccagaccggctatcggccgaacctgcaggcaaggcggctgcgctcccggcacaccggcatcatcgggttgatcgttgcggatatccgcaacccgttcttcactgcgcttatccgtgcggtggaggaggtcgcctatcgcgaaggcctgcgcgtcacgctctgcaacaccgacgaagaccccgagcgcgaggcgctgtacctgcagttgatgcacgaggagcgcatcagtggactgatctttgcgcccacacggaccacggtggggcggctggaacggctcacgctggacttcccgacggtactggtggaccgcgccgcggccagcgggtcgatcgacagcgtggtgctggacaatcccgcggcgatgggcgcgctggtcgagcatctcgtcgagcgtggctatcgccgcatcggcggcctgttcggcagcaccagcaccacggcggccgagcgccgcgacggctatcttgctgcgatgcgcacgcacggattggagccggattaccgtgaagtcgagccaacggccgaggccgccatcgcaacggtcgaccaatggctggccggcccttcgcgtcccgacgcgctggtcaccagcaacagcctgctgctcatgggtgcattgaaggcggcacgcagcgccggtctcgccattccaggagagctggcgctggcagggttcgacaacgagcgctggaccgagctggtcgaacctggcattaccgtggtcgagcagccggttgaagacatggggcgcgctgcgatgtcgctgttgctggaacgcctgcgcatgccggagctgcccgtgcgcaggctggtgatgacgggaaggtgcgtcgtgagagggtcgacggctgggcgatag

SEQ ID NO: 494155 - DNA, 234 bp, Stenotrophomonas maltophilia
atggctacctgtgatgtctgcggcaacaactacgacaagagctttaccctgcagcagggcgggcgcagcggcacgttcgattcgttcgagtgcgcgatccacgcattcgcaccccgctgcgcacactgcaaatgcgcggtcattgggcatggcgttgaaggaaatggccagatcttctgctgtgcacattgcgccggtcatgccggcgtgcagggtatagccgaccgggcctga

SEQ ID NO: 494156 - DNA, 570 bp, Stenotrophomonas maltophilia
atggcagatgatccgtcgacggccttgctgatcatcgacatgttcagccgtttcgatttcccgggcgcgcaggagctggcgcccgcggcagagcgggcggcccggcagatccggcgcctgagggatcacttcgacgaacgcgggtggccggtcatctacgccaatgacaatttctcggattggaagcgcgatttccgccagcaggtggaacagtgccggcgcgacggcggtccggcggggcgaattgccagccttctctcgcccttgcccggtcattacttcgtgctcaagcccaagcactcggcgttcctggccagtcccttgccgattctgctggccaaattgggcgtgcgccgcctgtgcctgagtggcatgacggccgattcgtgcgttctggccaccgcgctggatgccaacgccagagagttcgacgtcgtgttggcaccggaggtcgtggcggggctgccttcccggaagcggcgcgcactggcgctgctgactgattcgggcgcagcccggatcgcgcggctttcttcgcttgtctctgggcaggaagcaggaaggcgctga

SEQ ID NO: 494157 - DNA, 639 bp, Stenotrophomonas maltophilia
atgtggaaacgcaacggtctctcgctggtgctgcttgcgctcacgttggtgttcattgtggggcaggcagttgcggggcatcacgtgcacaaccaggaactggtcgagcacggacgtataccgatcgatttctggcactacctggctaccgggcacttcgtcagcgccactttcgagaactgggagagcgaattcctgcagatggggatgtacgttctgctgacggtcagcctgcgccagcgcggttcggccgaatcgcggccgctggaccctgcgcaggaaaagaatcgcatcgaacccggccgcacgccctggccggtcaggcgcggtggcctgtggaagattctttacggtcattcgctggcgattgcgttcgggctgttgttcctgttcagctttacgctgcatgcattgggaagctggcgcgccgaggaggccgaacagcagttgaagggattgccgccgccaggctttgtggagcacctcgccagcagcacattctggttcgaatccatgcagaactggcaaagcgaattcctggccgtgctgtctctggtggtgctgacgatcttcctgcgccagaaagattcgccgcagtccaagccggtcgaggcgccgcatacccagacaggagattga

SEQ ID NO: 494158 - DNA, 189 bp, Stenotrophomonas maltophilia
atgaacgacaaactgcccttcaatccaacgacggatgtggacgatcagtcaaaagcgcacacgccggacaaacggcgcaacgatcgagccagatggaaggagcacgacatgcccgacgacggcgacggccccaaggcggtaccggaggactacgagcgccctgatcccgatccgacgggaaagcgttga

SEQ ID NO: 494159 - DNA, 1164 bp, Stenotrophomonas maltophilia
atgcaggcattgacctatcacggccgcagggatgtgcgcgtcgagactgtgcccgacccggtactggcggcggatgacgatctgatactgcgggtgaccgccaccgccatctgcggttcggacctgcacctctaccgcggcaagattcctgatctgcacgatggcgatgtactgggccacgaattcatgggcgtggtggaagaggtcggcagcggcgtgacccaggtgaagccgggcgatcgcgtggtgattcccttcgtgatcgcctgtggcgagtgtttccactgcaggctggccgaatatgccgcatgcgagaccaccaatcctggcaagggcgcggcgctgaaccagaaagggctgctgcctccagctgctttgttcggatacagccatctgtatggcggcgtagccggtggccaagccgaattcgtacgcgtgccgaaggccaacgtgggcccgttgcgcattccggaaggcgtggccgatgagcaggtgctgttcctgtctgacattctcccgaccggctatcaggccgcgctgaacgcgggtgtgaagcccggctcgacggtggccatcttcggcgccggtccggttgggctgatgagcgcggcctgttgccgactgctgggagcagagaccatcttcatggtcgaccaccttcgttaccgcctggactatgcacgccgtgcttacggcgtgacccccatcgacttcaaggagatagaagacccggccgattacatccttacccagaccagtgggcggggcgtagacgcctgcatcgaggccgtaggcttcgaggccgagggcagtgcgctggagtcagcgttgaccgctgtaaagctggaaggcagcagtggcgtggcgatacggcaatgcatcgcggcaacgcgccgtggcggcgtggtcagcattccaggcgtctatgccggcttcatccatggttttctgctgggtgatgcgttcgataaaggtctgacattcaagatgggccagacccatgtgcaggggctgatgccggaactgcttgacgcaatcatggaaggaaagctggatccgggtgacatcatctcgcaccggatgcgcctggccgacgctgcgcagggctacgcgatattcgatgccaaggatgacgactgccgcaagatcgtgctgacaccctga

SEQ ID NO: 494160 - DNA, 504 bp, Stenotrophomonas maltophilia
atgagcgcgattgccgccggtgtctacgcactgtggctggctgccggctggctggacttccattttcaccggcggaccgaccttccacacacctctgcgatgcgcgaaagcctgttgcatggggtgcagttgctgctgatcggaagcggggtgctcgcatggctcctgctggaaaacacgctgtcgctcgtcacgtttctggcacttctggtcctcgcgcacgcaatcgccggctacttcgacaccgtcagcgcggacggcagacgacgcatcagcccggcagagcagcatgtgcacagcgtgctcgatgccgcgccgtgggtcctgctgggctgggtgggctggcaggtccacccccggtggtcgctcgaagtgaagcctgcagcaccgggcgtctggtggctggtcctgctgccggcgctgggcgtggtcgtgctgccatggttgtgggagctgctgcagtgcctgcgcgcacgacggcagcgcgggcaagcgagcgcgtga

SEQ ID NO: 494161 - DNA, 942 bp, Stenotrophomonas maltophilia
atgcagcatgtgacgccgccatccccgctggagagccgcgctcgcgaggtagtggtccagcggcccgacctgccattgcccggaagcggcctcacgctgcggcggtggcaggcgctggcggcatggggggcggaagacctgtgcctggccaaagtgcttgaggcgcactacgacgcccaagcgatcattgccgaactgaacgcgcccgccctggctgaaggccagctactggcggtctgggccgcggaaggtccagccaacacactccgcttcgatgttcacggtcagctccatggtgacaagccctggtgttccggcagcgcgtgggtggatgcggcattggtaaccgtccgcaacgcgcagggcgtgtggctgtgccaggtggcagcgaagcactggcgcacgcttgcagatgagccctggccggccgttggcatggccggcgttccgtccaccacggtgcggttcgacggcgcaccgatggcgcttctgggaacgcgcgatgagtacctgcagcgaccgggtttctggcacggcggtgcgggcatcgcggcagtctggttcggcgcggcggccgccctggccgagcgcatgcggccagcctgcaccgaggggaatcgcgcgcgattactgggtgaagtggacctcgccttgggcccggcggcggcgctgcttcgcgaagtggcggcgcgcatcgacgccgcgccggaatcggcgcaccgcgaagaggtcgtacgcctgcgctgcgtggtcgagcgcgcggcgacgcgtgtcctggatctggcggggcgcgcactgggcccggcgccgatgtgcctggaagatgcccacgcccgtcgctgcgcggacctgaccgtgttccttcggcagagccacgcagatcgcgattgggaatggctgggcggccagcgggcgagccaggaggcgacatgggcgctgtag

SEQ ID NO: 494162 - DNA, 759 bp, Stenotrophomonas maltophilia
atgggcgctgtagccaggacacccctgcagggggaaggaacgcaggagcaggcatggctgcgctgcgattggctgtggcagcggccggcaacatcggccaatgccctgtgcgccggccatgatcgcgtcgtggtggtcgcaccccatccagacgacgagatcctcggctgtggtggactgctacgtcacgctgcggagcagggcatggaggtacgcgtcgtcgccgtgaccgatggcgaagcgtgctatccggacgagcactggtggacgccagaacgcctgcgctcggcgcgacgcgccgagcttgccgcagcgctgggcgaactcggtatccggcctggatccgcgtttcatctcggcatcgccgacggcgcggtcagtgcgcacgaacagggcctggaagattggctgcagcagcacctccagccgagcgacctggtcctggcaccctggcgctttgatgggcatcccgatcatgaagccgcagggcgtgctgcctgcagggcggtgcggacagtgggctgccgacgcctggagtacccggtgtggggctggcactggcttgaccccgcctgcgcacacatggcgtgggaggttcccaggctgatcgacatttcagcagtggctgccgcaaaacgaaacgccatcgcgcacttccggacccagaccggcgaggtgccggaattgaacagcccgccggtgctgcccgcacatgtattgacccgattcttccggaactacgaggtattcctggcatga

SEQ ID NO: 494163 - DNA, 588 bp, Stenotrophomonas maltophilia
atgagcgcgcaaccgtacttcgatgaactgcatgagcaggaggatcccttcggctatcgcagccgatggtatgaagaacgcaagcgtgcgctgctgctggccagcctgagccagcgccagttcattcggggctgggagctgggatgctccaacggcgtgctgaccgaggccttggccgcccgctgcgagcgcctgctggccaccgacatcagcccacgcgcagcgttccgggcccgccgcaacctggcccacctgccgcatgtgcaggtccattgcgccagccatcccgagcaatggccgccgggccgcttcgacctgatcgtctgcggggaaatgggctactacctgggtgcagcagcgctacacgagctgcgcgccggcatcgattcggcccttcgcgacgacggactgctggtcgcctgccattggttgccttcgttccatgggcgcgcaagtcgcaccgacgtcgtgcatcggcgccttggccaaggcctgcacgaagccttccactatcgtgatgcggacttcgtgctgcagggctggacgcgcagcgcactatcgctggcccgcaacgagggcctgcgatga

SEQ ID NO: 494164 - DNA, 732 bp, Stenotrophomonas maltophilia
atgatcggcatcctggttccggcccatgacgaggcagccagcgtggagcgctgcctgcaatcgatccgaagggcagccctgcatcccgggctgcacggcgaagcagtgcaggtggtggttgcactggacagctgctcggatgccaccgcgtccatctgccagcagcagcgggtcgatacggtgcgcctggaagcacgctgcgtcggcgttgccagggcagcggccgccgctgagctgctcggacgcggtgcgagatggctggcgagcaccgatgccgacagcgaggtacctcccgaatggctggttgcccagcttgagggccggtgcgacgccttctgcggactggtggacatagcaaccacctccaggacggagaagcgcctgcgacgcgcgttccagaaacggcagcagtggggcgacgatcatgggcgcatccacggtgccaatttcggcgtctccgcccaggcctatctggcggccgggggatttgctcccctgcgctgtggagaggatgttacactggtgaggaggctgcaacgcctcggcgctgacgtaaggtgggccggcgctcccatcgtcatgaccagtgcccgcctggtgggacgcgcgaccggagggttctcggcctacctggccggaatggagggtgcgcgcccccgccacggcggcagatcggcggaaggtgggagctggaagcgcctcgaaaaccacgctgaattgggcatgatgtga

SEQ ID NO: 494165 - DNA, 429 bp, Stenotrophomonas maltophilia
atgccgaatcgagccatcgtctacgtcagcgaggccgtcagtggattctcgccggaacgtctgaaagcgctgatggacgatgccgcgcgcttcaatcggggcgcaggggtgaccggggtgctgctgttcgacggcgaacgcttcctgcagtacatggagggccctgccgatggactggatgtggccttctcccgtgtcgccggcgccagcagtcacatccacctgatcgaacttgcgcgggggcgtgtcggccagcggcggctgccgttctggcccatgcgttgcctgtccgtcactgcagatgagctgcgcgagatcgcctgtgccgactggaccagcttcatccagcgggcagcgaccgaacaggccgatgccacggcgatgggcaagctgctgctgattgtcgagccctacgcaaaggccgcctga

SEQ ID NO: 494166 - DNA, 348 bp, Stenotrophomonas maltophilia
atggaccctgtggacgacctcgccagggccgctgcccgcttcaacttcgaagcaggcgtgacgggtgtgcttctttacgatgggcaccgcttcctccagtacatcgagggaccggaagacagcatcaacgtggtgtacagccgtatcctcggtgcccgcagccattgcgaactgcttgagctgggccggggcagggtgtccggccggttctttccctattggtcgatgcggctgctctggaccgaccctgccgacatccgcagcgtcgctcgtggcaactggagcgggctctcccgtggtggtgcgctgcgccagctgggccaggtggtagccccacacctggcataa

SEQ ID NO: 494167 - DNA, 393 bp, Stenotrophomonas maltophilia
atgcaatcggaaatgaaccagcgcaggtgcaacctgctgctggttgaagaccagctcgatctggctgcactgatggaacaggcgctggaagacggtggcggccgggtgacccacgcctacagcgtgttcgatgcgctggggttgctggatacgcaacgtttcgatggcgcggttctggatgtggagctccgcgatggcgtggtgttcccggtggccgatcgactggcggaactcggcattccctacctgttcgtgtctgcggtctatgaccagctggtgccgctgcgccaccgccgggcaaccttcgtggccaagccgttccacatcgaccagttgcaggaagccgtccagcaggtcgtgggagacgcctgcgcgccccctgccacgcattga

SEQ ID NO: 494168 - DNA, 345 bp, Stenotrophomonas maltophilia
atgcctcgatccgccaccgaccccaccgccccctgcgcattgcgcgtggagtgcatgtccctggattgcggcggcgctgcgatcgtcgtggagctggatcgcacccccgaacgggcatggatgaaatcgctcaagcgcgccctgcaggaagatgacgtgctggagggtgcccaggccaagttcgatggccgctttgtctacgtcgtgggcgtggaaggtggcgcgcaccgtgcgcagcaccgggtgatccaggcgttgaaggcgtccgcaggcgcgcgcgcacccgcagcaagcccccgtcgcgacgccggcagcgctgtagtgtccggcgcgatgcccgcctga

SEQ ID NO: 494169 - DNA, 522 bp, Stenotrophomonas maltophilia
atggcagaccagaacaccgtccgcagcgagcgcctgctgaaatggctgcaggatgcctacgccatggagcaggaggcggagaccatgatgaaggccatggcttcgcgcatccagaactatccccatcttgccgcacgcatcggccagcacgtgctggagacgcagcagcaggccgcctccctgcgcgagtgcattgaagcgctcggcggaggcgtgcccaccgccaaggggctgttcgcgagcatgaccgcagcgatccacgccgccggcaacaccctgatggaggacgaggtcgtcaagagcatcggcatctcctttggcttcgagaacaccgagatcgccacctaccgggcactggtgatcgcggccgagcgggccgccgcgccggatatcgcggccgtgtgcggccagatcctgcaggaagagatcgccatggcgcgctggctggaagagcaccaggacagcctggtcggcgccttcctcaaccgtgacgaaacgcctggcgcccaagccaagcgttga

SEQ ID NO: 494170 - DNA, 909 bp, Stenotrophomonas maltophilia
atgttctttcaccacaagaagctgatgtacaccgtgcgcgtgcgcgaatccaacccgcagcttgccagcctcatgctggaacagtttggcggcccgcaaggcgaactggcggctgcaatgcgttacttcacccagggactcggtgaatgcgatccgggccgcaaggacctgctgatggacattgccaccgaagagatcagccacctggagatcatcggcaccatcatcgccatgctcaaccgcggtccgaaggccatccagtccgagggtcttgccgaagccgaggacatgcggctgctgggccagaacagcaccagccataccgaacagatcctgtatgggggcggcccggcgctggtcaattccagcggggtgccgtggacggcggcctacgtcgattcgatcggggagcccaccgccgacctgcgctcgaacatcgccgccgaagcccgcgccaagctggtctacgaacgactgatcacggtgaccgatgatccaggcatcaaggacgcactgcgcttcctgatgacgcgcgaaatcgcccaccagaagtccttcgaaaaggcattgcacagcatccagcccaacttcccgccgggcaagcagccgggtgaccccgcctttaccgacctgtacatggacatgtcgcagggcgacggcgccgatgacctgctgggcagctggaacagcggcgagctgtgggagcgggtcagcgaccgcgaggcccaggccgctgtggacggcggtgacggcagcgccacggtgggcctggacccacgcgagcaggcggcggtgcaggccatgaccctgcgaacgctttccgatcccgaagcacggccgacaaccggtgccgaactgggcgccgggccgggcgccggtgcgctcgacctgccgccacgggagccttga

SEQ ID NO: 494171 - DNA, 324 bp, Stenotrophomonas maltophilia
atggccaaccagaaccagaaccagggcagcagcaaccgcggcttcgcttcgatggacgaagacaagcagcgcgagatcgccgccaagggcggccgcgccgcgcatgagtcgggcaacgcccatgaattcagctctgaagaagcgcgcgaagccggtcgcaagggcggcgaagcggtgagccaggatcgccagcacatggccgacatcggccgcgaaggcggccagaacagccatggcggcggcaaccagggtggcaaccagggcggtcggcagcaacagcaggaacgtggcggcaacaacaatcgcggtggccagcagtgttga

SEQ ID NO: 494172 - DNA, 468 bp, Stenotrophomonas maltophilia
atgcctcttcgtgccattgcatatgtaagtgaagccacccgaaacctgactgcagaacggctgcagcagcttgtcacggacgcgatgctgttcaacgagtcggttgatgtgaccggcgtcctcctgttcgacggcacgcgcttcctgcaatatctcgaaggcccggagtccggtgtcagcgcggcgtacacccgcatcctggcggccggcagccacaacggtctggtcgaactcaaccggggcagggtggggcggcggcagttcccgcactggcgcatgcacagcgtgcgcgtggatgagctggcgctgggaaagatcgcgatctccgactggaccggcttcgtgcgcagcgcctccgcgctcgcccctggcaccagtgcgcttgatcgactgcaatcggtggcgcaggcgccgccaggcgccggcgatggccggttgctggaaccggacggaccggtggcacgatga

SEQ ID NO: 494173 - DNA, 768 bp, Stenotrophomonas maltophilia
atgagcgcagccgacgccccgggcacgccaggacaggtacgcatcggctgcgcaggctggtcgctgtcgcgcgcggcgcaggcggcgttcggcgcaggcgacagcgtactgcagcgctatgccacccgcctgccgatggtcgagatcaattcctcgttctaccgcccccaccaggcggccacctacgcccggtgggcggcgagcgtgcccgcgggtttccgcttcgcggtgaaactgccgcgcgtgatcagccatgaacgccggctgcgcgacgcgatgcagccgctggcgctgttccttgatggcgtgatcgcgctgggggacaggctggggccgctgctgctccagctgccgcccagcctggcgtatgagccggcgaccgtaacggcattcctgcacggactgcgcgcacgcacctcggttgatgtcgcctgcgaaccgcgccatcccagttggttcactgcggacgtcgacacgctgctgagcgaccatggcatcgcacgggtcgcggctgacccggcccgggtgccggcagcagcggtcccgggcggtgaccgcacgtggagctactggcgctggcacgggcagccgcagatctatcgcagcccctacagcgaacaggcgctggcggggctggcccagcacctgcagcgtgaagccgctgcgcagcgccgcgcctggtgcgtactggacaacaccgcgctgggccacgcgaccggcaacgccctgcacctgcaggcactgctgcaggagaacgcgcatgcctga

SEQ ID NO: 494174 - DNA, 735 bp, Stenotrophomonas maltophilia
atgcctgagggcccgtccattgtcctgctgcgcgaagccgccagccgcttcaagggtcacgtcgtgcgcggcgtctccggcaacagccgcatcgacctgtcaccgctgcagggacgcagggtcaaggcggttcgcagctggggcaagcacttcctgctggagttcagccaccacacgctgcgcatccatctgatgatgttcggcagctggcgcatcgacgaacggaagccagctcctgcacgggtgtcgctggcattcgacaacggggaactgaatttctacgcgtgttccgtccggctgatcgacgagccgttggacgacgtctacgactggcgggcggacgtgatgaacgacgcctgggatccaaagctggcccggcgcaagctgaaggcactgccggacaccctggtctgtgatgcgcttctggaccagaccatcttcgccggcgtcggcaatatcatcaagaatgaggtgctgttccgcatccgcgtgcatccggccacgcgactgggcgacctgccaccgcgcaagctcaccgccctgatcacccaggcccgtgcctacagcttcgacttcctggagtggaaacggcgcttcgaattgaagaagcactggcaggtgcatacgcgcaaggtgtgcccgctctgcggtggcccggtcagcaagctgtacatgggtacgacgcggcgacgcacgttcttctgcccagacgatcaggtactctacccgccgtga

SEQ ID NO: 494175 - DNA, 498 bp, Stenotrophomonas maltophilia
atggctatcaagacggcggaagatctgttcatccacgagctctcggacatctacagcgccgagaagcagctgaccaaggcgcttccgcgcctggcccgtgcggccgagaatccggatctggccgcagcgttcgaaacgcacctggaagaaacccaggggcagatcgaacgcatcgaccaggtggtcgaggtgctcggcatccgcctgaagcgcatcaagtgcgcggcgatggaaggcctggtcgaggaaggcaaggaggtgatcgacagcatcgacaaggggccggtgcgcgatgctgccctgatcggtggcgcgcagaaggtcgagcattatgaaattgcctcctacggcaccatcgccgcgctggccaagcagctgggctacaaggatgccctgccgttgctgctggagacgctggaggaagaaaaggcgaccgatgagaagctgaccctgctggccaagggcggcggcaatgccaaggccgcgcaggccgcctga

SEQ ID NO: 494176 - DNA, 177 bp, Stenotrophomonas maltophilia
atgagcgatgacaagaacaacgccggcagcccggaccgggaccgcatcaacgtcaatgaggattacgaactgcggtactggaccacgacgctgggcgtgtcctccgacgaacttcgcgcggccgtcgcggcagtcgggcccacggcggttgctgtccggaagcacctgggcaaatag

SEQ ID NO: 494177 - DNA, 2550 bp, Stenotrophomonas maltophilia
atgtccctggtcgagtatcgccgcaagcgtcgttttgaccagaccaaggagcccgagccgggcaaggcgctgccgaaaggccagcgcgccattttcgtggtgcagctgcatcatgccagccgcaggcactatgacttccgcctgcaggttggcgatgcgctgaagagctgggcggtgcccaaaggccccagttacgacccgaaggtcaagcgcatggcggtggaagtggaagaccacccggtggactacgcggcgttcgagggtgatattcccaagggccagtacggcggcggccatgtcgcccagtttgaccacggtgtatgggccacgcagggcgatccggaagcccagctcgccaagggccatctgcgcttcgagctgttcggtaccaagttgaaaggcggctggcatctggtccggtcgggaaagcccgcgcgccagccacagtggctgctgttcaaggacgacgacgaatttgccagcgatatcgaggcagacgatctgctgggggacgtcgctgaagcgccaccggaggatctgaagcgtgccggcgctggcaaggccgcgaagaagcggctgacggcggtacctgccagacgcgcccggcgaaagaactgggcgaagaaggccctggcgctcagcaaggcgaaaagggccgcagcgccgtccgggccgtttgagccgcagttggccaagctgggcgaagcgccgccccagggcgggcagtgggtgcatgagatcaaatgggacgggtaccgcatccttgctacggtggctgagggcaacgtgcagctgtggtcacggaacgcgctggaatggaccgccaaacttcccgaaatacgtgacgcgatcgcggccctgggcctgacttcggcggcactggacggcgagctgatcgccggcgccggcaccaaggaagacttcaacctgctgcaggccacgctttccggcgagcggcagggcgtcctgacgtatgcactgttcgatctgctgcatcttgatggcgtggatgtggccgatgcgcccctgcttgagcgcaagaccctgctgcaatcggtgctggaggggcagggcagcccattggccttcagttcgcatgtacagggggatggcgaccaggcctatcgtctggccggtgagcagcacttcgagggcatcatttccaagcgcgccgatcgcagctaccacagcggccgcagcgaggactggcgcaagacgaagcagctggccagcgacgagttcgcggtggtgggctacaccgcacccaaaggcagccgcaccggctttggttcgctgctgctggcccggccagacgcaacgcatggctggctctacgcagggcgcgtcgggtccgggttctcggatgaactgattggcgacatcagcaagcgcatcaagggcggcggcggccgcaagccaaccgcgtacgtgcccacgcaggacaccgatctgcgcgccgcgacctggttccaaccgcgtttcgtggtggaggtcttctaccgcggaatcggtgggcagcaactgttgcgccaggcgtcgctgaaggcggtgcgggcggacaaggatatcgccgacctcgccgattccgatcgcgccggagcggccccggcctcagcgcggtcgcaagcgcccgcgcggcgtgggcgccgggtggaaagggcgccggcaacggatcgtgcgccccccgtgctgtcgtccccgggcaagatcctgtttcccggcgacggctacaccaagcaggacgtgtgggattactacacagcagtgatggagcacctcctgcccgaggtggtggatcgtccgctgtcgatcatccgctgccccagtggcaccgcaaaaccctgcttcttccagaaacaccatacggccgggctggcgctggtcgatccggtaaggctgaaggaggaaagcggcatcaacgcccattacctggtggtgcgggacgcagccagcctgctggaactggtgcagttcaacgcgttggagttccacccttggggcagccacgccgaggcgcccgacagggccgaccgcgtggtgttcgatctggatccaggaccggatgtgccctttgccgaagtcaagaaagcggcaaccgatatccggaaactgctggcgcagctggagctggaatcgttcctgcgagtctccggcggcaagggcctgcacgtggtcgtgccgctcaacccagggtgcgattgggacctgaccaagcgttttgcgaagggtttcgccgatgcattggcacagtccgaaccgcagcggttcctggcaaccgccaccaagagcctgcgcaacaagcggatcttcgtcgactatctgcgcaatgggcgcggtgcaacggcggtcgcgtcctattcgttgcgcgcccggccgggcgcaccggtggcactgccgatcgcctggggtgatctggcgaaactcaagcgcgccgacgccttcacgatcaaggacgtgcccgcaaagctcagatgtcgccgcaaggacccttgggccggcatcgcggaagtgaagcagaatctcgcccgatgggcccgggcagacccgtag

SEQ ID NO: 494178 - DNA, 450 bp, Stenotrophomonas maltophilia
atgccgatcagggcagtcgcatacataagtgaggcgggcccggccgttgcgggtgacccgttgggcctgcgcagcgggaagctggacgacttggtcgatgatgccgcgcgcttcaaccggaatgccggcgttaccggcgtactgctgttcgatggcgcccgcttcctgcagtacatggaaggacccgaagatggcttgaatgtggcgtactcgcgggtactcggtgctacaagccacacgggactgatcgaactgcagcgcggcagggtaggcaaccggcgtctcccgttctggccgatgcgctggctgccgacgcaacccgagcagttgaagagtcttgcccgcgcggactggtcagggttcgcccagcggaccggtgacgatgcgccaaccgagacggcgatggatgtcctggccaggttggtggaaccctatgccgtcgcggcgtga

SEQ ID NO: 494179 - DNA, 231 bp, Stenotrophomonas maltophilia
gtgagcacgcacctggaaatcgacctgatgatcgcgcaactggaggaaatgctgcccacctgggcggcgttctatcccgagccgcagttcatccgcatgctcgccgaggcgctggactacatcgctgccagtgcggacccggatgcccgcctgtactgcgtgatgcgcaccgggcacctcgattcgtgcagcggcgagatcccctgggcggcgcgctatgggggccgctag

SEQ ID NO: 494180 - DNA, 1494 bp, Stenotrophomonas maltophilia
atggccgacccgtccccgcgcgccagcttatggtcagctgattccgatccgcacggcttccgcccgctcgccgggaccacgcgcgcggacgtgctcgtggtcggtgcaggaatgacgggcctgttgaccgccgcccgcttggccgacagcggcctagatgtggtggtggtggatgccggccccatcggcggacgcaacacggtgatgtcaaccggcaatctttacgctcccgtgtcccggctggcagacctgatcgcgcgttggggcggtgacacggcacgtcgtgtcgtgcagtggcggcaacacgcgctgcgttccatcgaaacactggtccaccgctacgatctgcactgtggcttcgagcgcgtggccatgcagtacggcgtgcaggagcgttcgcgcgaggccacggcgcagttcgaacgcgagctccaggcctaccagcgcgttggcctgcaatgcgagcaccgccaatccgggctgccgttcgccttgggccacgctttccgcgttcccgaccaggcgcagttgcatccggcggcgttctgcagggaactggcccgtcatctggtgggccgcgtgcgcatccacgactggacccggatcacccgcatcgaggcttcagccggagtggcgacggcccctggtgcccgcatccatgccaggcactttgtgctggccacccactcgccagcaggattcaacctggtgcaggccgagatggaggtgtaccgcgaatacggcgtagcggtaccggtggccaacccgccagcggcaggcattcactggatcgccgaccggcaccgctcgctgcgcggggtgcatggcgctgatggccgcgactggctggtgctggtcggtgagacacatcgcactggcgaaaccccggcgatggatccggcccagcatctggtcgccgacgcgcgtcgcaacttcagcgtgcagggcaagccgctgtgctggtccgcgcagcagttccgggccgcggatcagctgccctacatcggcagcagtgcgcacgacaatgtatgggtcgctaccggctatgggccggacggattgacctgggcgggcgtggccgcgcgcgcgatcacggagggaatcaccggaacgaccagcgagatcgagcagctgctcagccccatgcgctttactccgctgcgctcggctgcaggctgggcccgcaccaacgccacggttgcgcggcacatggtgggcgatcgccttgaaaccgcggggtcgcgcgctcccagcgagctgggccgcgggtgcggtgggctgctggacgtgggcggagagcgcaccgcgatctaccgcgatgatgatggccagctgcacgcaatgtcggcgctgtgcccgcacctcaagtgcgtcgtccaatggaatggccatgaacgcacatgggactgcccgtgccacggcagccgcttttccgccaccggggccctgctggagggccccgccaggcagggcctcacaccggcggcgctatag

SEQ ID NO: 494181 - DNA, 423 bp, Stenotrophomonas maltophilia
gtgatccggcgcggctttgcacgcgtcgcggcggccacggcgcggttgtccggcagtcttggggcattcgtcgcggcactgggggtgatcatcgcctgggccgccagcggcccggccttccacttcaatgacacctggcagctggtggtgaacaccggcaccaccatcgtgacgttcctgatggtattcctgatccagcatacccagaacgctgacaccgctgcgctgcacatcaagctggacgagctgatccgggtcagcaaggacgccaaccaggagctgctgaacctggaatcgatggagccggcccatcttgaagagatacgccagcgctacgaggcactggcgaagaccgcggcggacatcaagtccaagaaggagcgctgcatgccctgcgaagcggatgcaaccgccgaagcctga

SEQ ID NO: 494182 - DNA, 255 bp, Stenotrophomonas maltophilia
atgcaacgcgatcagaaagacctgccccacccggacccggaagcacagcgcaccgatccggtcagcccgcttcaggccaagctgcataaccatcgcaatcatgaagaggcgttgcaggagacgttcccggccagtgacccgatctcgcccttcgtcgcagccccgacggccgacgagcaggccgcgcgcctgggtgagcgggtcaaactgccagaccgccgaacggatgaggaggccggcggaggtgagcagtga

SEQ ID NO: 494183 - DNA, 2646 bp, Stenotrophomonas maltophilia
atgtccaacaccccctttggcgagtcgtcatgcgctgccgcggccagcggctgcatcgaggtccgcggcgcacgcgagcacaacctgaagaacgtcgacgtctccattccacgcaatgcgctggtggtgttctccggggtatcgggttcgggcaaatcctcgctggcgttcggcacggtcttcgccgaggcccagcggcgctactttgaatccgtcgcaccgtatgcgcgccgcctgatcgaccaggcgggcgtgcccgacgtggatgccatcgacggcctgccgccggcggtggccctgcagcagcagcgcggtgccagcaacgcacgttcatcggtgggcagcgtgaccacgctgtccagcctggtacgcatgatgtattcgcgtgcaggcgcgtacccggcccaccagcccatgctgtacgccgaggacttctcgcccaatacgccgcagggggcgtgcagcacctgccatgggttgggccacgtctacgaagtgaccgaagcgctgatggtgccggacccatcgctgagcatccgcgagcgcgccatcgcctcctggccgccggcctggcatggccagaacctgcgcgacatcctggtcaccctgggctacgacatcgacgtgccgtggaagaagctgccgaagaaggaccgggagtggatcctgttcaccgaggacacgccgaccgtgcccgtctatgccggcttcacgcctgccgagacgcgtgccgcactcaagcgcaagctggagcccagctacatgggcacctacaccggcgcccgccgctacgtgctgcacacctttgccaatacccagagcgcgctgatgcgcaagcgtgtctcgcgctacatggaaggcaagctgtgccccgcctgccagggcaagcgactgaagcccgaagcgctttcggtcacctttgccggtgtggacatcggtgagttcatgcggctgccgctggatcaactggccgggctgctcgagcccatcgcgcagggcgacttcagtgcacacagccacggcgcacgcaccggcaggagtgcgacgccccgcgatcgcgccaagcgggcagccactggccgtgcgacccacgagggcgcgcccgatgtgcggctgacctcggccctgtcggaggagaaacgcctggccgcgcagcgactggcgggtggggtcgtggcgcgggtacggcagctgcgcgagctgggcctggggtatctctcgctcgatcgcgccacgcccaccctgtcggccggcgaactgcagcgcctgcggctggccacacagctcagctcgttgctgtttggtgtgctgtacgtgctcgatgagccctcggccggcctgcatccggccgacagccaggcgctgtacgacgcgctggaccggctgcgcgatggcggcaactcggtgttcgtcgttgaacacgatctggacctgatgcgacgtgcacagtggctggtggacgtgggaccgcaagcgggcgagcacggcgggcgcgttctctacagtggcgagcccgacggcctgcgccgcatcgaggactcgcgcaccgcgcggtacctgttcgaccaggtgcctgcgcctgccagccgggaacgcagcgccgaccgctggctggagctgaagggcatccaccgccacaacctgcagggcgtggacgcgcagctgccgctgggagtgctgaccgcagtgaccggcatttccggatcgggcaagtccagcctgatggcgcaggcgctgcccgagctgatgctgctgcacctggggcacgagcccgtggacgacagcgccgacagcacgcccgaggacgggccaaccgtgatcgaagcgacgcggggccagcttgccggagccgtggacgccatccagcgcgtggtgcaggtggaccagaagccgatcggccgcacgccacgctccaacctggccacctacaccggcctgttcgatcacgtccgcaagctgttcgctgcgacccccgacgcgcgacgccgccgctttgacgccggccgcttttcgttcaacgtggccaagggccggtgcgagacctgcgaaggcgagggtttcgtaagcgtcgaactgctgttcatgcccagtgtctatgcgccatgccccgcctgccatggcgcccgctacaacgaggccacgctgaaggtgttgtggaacggccgcaacattgccgaagtcctgcagatgacggtcgaccaggcacaggcatttttcgccggtgaggaagccatcgcgcggccgctgcagctgctgcaggagatcggcctgggctatctcaggctcggccagccggccacggagctttcagggggcgaggcgcaacgcatcaagctggcgaccgagctgcagcgcagccaacgcggccgcacgctctatgtgctggacgaacccaccaccggcctgcatgcgttggacgcagacaggctgctggtgcagttgcagcggctggtggacgcgggaaacaccgtggtgatgatcgagcacgacatgcggtctgtcgcacaggccgactgggtgattgacgtcggcccgggcgcaggcggcgcaggtggaaccatcgtggcgaagggtacgccacgccaggtggcccgcgccaagggcagcaggacggcgccgttccttgccagggaactggcgctgtag

SEQ ID NO: 494184 - DNA, 804 bp, Stenotrophomonas maltophilia
gtgaacgaccctacccatcacggcaccgcactcatcactggcgcatcgtccggcatcggggcgatctatgctgatcgcctggcccacgccggccatgacctcatcctggtcgcgcgacgcgccgaccgcctgcgccaactggccgaagcgctggcccgcagcaccggccgcacggtggacatcgtcgccgcggacctgaccacctctgacgggcgtgccgaggttgaaaaggtcattcaaggccgagcggacatccaggtgctggtcaacaatgccggcatcggcgctacggcgcccctgctgcagtcggacatcggcgagatggagcgcatgatcacgctcaacgtgaacgccgcgatgcgcctggcctatgctgcagcgccggtgtttgtggcacgtggccggggcacgatcatcaacatcgcctccatcgtcgcgctggcaccggagctgctcaacggggtctacgcgggaagcaaggcgttcgtgctggcgttctcgcagtcgctccaccatgagctggccgacaagggcgtgcgtgtccaggtcgtcctgccgggcgccaccgcaaccgacttctggcacctttccggcctgccggtggagcacctgccacagggcatcgtgatgagcgccgaagacatggtggacgcgtccctggccgggctggcgcagggtgaacttgtgaccattcccgcgcttccggacatcgctgagtgggacgccttcgagcaggcacgcaaggcaatggcaccgggcctttcgcgtgcgcagccggcgccgcgctatgtgagcggcgcctga

SEQ ID NO: 494185 - DNA, 942 bp, Stenotrophomonas maltophilia
atgctcagtgttggatttgtcctgcccgccggattccagaccatggcgatcgccgcggcgtccgccttcgaactggccaatgccaccgaaggcgcgcgcctttacgatctgcacatgctgtccgaacagggcgggctggtgcccagctcgcttggcatggccatgcagacagcgccgcttgcgcagcagccgctggataccatgatcgtgaccggcctgctggagccagccccgtccagcggcgcgctgatcgatccgatccgtcacgcggccgcccgcacgcgcaggaccgcgtcggtgtgcaccggcgcgttccttctcggcgaagcggggttgctggacgggcgccgcgccactacgcactggttccacgcacgtgcgctcaggcagcgctttcccgccgcgcaggtggaggaagaccgcatcttcatcaccgatggcccgatctggacctccgccggcatgagcgcggggctggacctggcgcttggcatgatcgagcaggacttcggtgcggatctgtgcagggcggtggcccggaagctggtgatctaccatcggcgcggaggcgggcagtcccagcattcggtgctgctcgagctggatgcccggtctgatcgcatccagaacgcgctgacctttgcacgccgcaatctgcgcgccaccttgtcggttgaagaactggcgcaggcagcgcatctgagcacccgccagttcagtcgcgcgttccgcgaggaaaccgggcaatcccccgccaaggcagtggagggcctgcgggtggaggccgctcgcgtgttgatcgagcagagccgctacacgatggatgaagtggcgactgaaacgggcttcggtgataccgaacgcatgcgacgtgccttcctgcgcgccttcggccagccgccgcaatcgctgcggcgcaacgcacggggcggggcggactga

SEQ ID NO: 494186 - DNA, 1197 bp, Stenotrophomonas maltophilia
atgcacacactgaccgatccccacctgctgaatgacatcgctgagatcggccgtattgaagcagtgccgcgcatccttgaaaccgtcgcccatatcacaggctcaagattcaccgcgattgcccgggtgacagaaaccacgtggaccgcctgcgccaccctggacaccctggggttcgggctcgttccgggcgggcagctggtcctcgaaaccaccctctgtgacgagatcaggcggtcatcgacctcggtggtgttcgcgcacgccagtgcacatccgctgtattccaaacaccatacgcccaggatctatgggctggagagttacgcctccgtgccgatccatcggccggatggaagtttcttcggcaccctgtgtgccattgattcgtcgccgggcaactttgatgaggcgcatgtccaacgatccatggagctgcttgccgacctcgttggcaactacctcgacaaagaggatcagctgttggaggcagagacagccctttcaacggcacagcgtgtttccgatctgcgcgatcagttcatcgcggtgctgggccatgaccttcgcagcccgctgcaggccatcagtgtggccgccgattcactggaacgtgaggcaacatccgagcgccagcagcggatgctcgcgcacatcgccgccggcgtcacccggatggatggcctcatcggtgatgtgcttgatttcgccagggggcggctgggaggaggcattccggtctcgctccaggaaagccacaccttgcaggcggagcttgaacaggttgcagaagaagtggcgatcgctaccggtcggcaggacatcaacgtccagatgcggatcgaaggtggcgtggtctgcgacaccggcaggctgtcgcagctgctggccaacctgctgaccaacgcagcccagcacggcgagcgttccaccccagtcacgctgagggttcaggccgcatcccatcgcctcacgctggatgtgcataacgccggctgcattgcgcctgagcggctggggacgattttcagcccgttttcgcgtgagcagggcgagctgcccaggccagggcttggcctgggcatctacattgcatcggaaattgccaagtcccacggcggcacactggacgtgcagtcgagtgagagcgacggcaccgtgttcacattccagatgccgaccgcggcgcgtccatga

SEQ ID NO: 494187 - DNA, 954 bp, Stenotrophomonas maltophilia
atgaacaccttcgcccgtaccgtggccgttgccgccctcgccctctcggtccaggccggcctgtccgcgcaggccgccgaaccagccaagcgggctccggtcaccgccatcgcgcgcactgccagctacatcaccaccgccgacggcgtgcagctgtactacaaggactggggcccgaaggacggcccggtcgtgaccttcagccatggctggccgttgaattcggacagctgggagtcgcagatgatcttcctggccaaccatggctaccgcgtcatcgcgcatgaccgtcgcggccacgggcgctccagccagccgtgggacggcaacgacatggatcactacgccgatgacctggccacggtgatcaacacactggacctgcacgatgtgaccctggtgggcttctccaccggtggtggcgaagtggcgcgctacatcggccggcatggcaccggccgggtcaagaaggccgtgctgatcagctcggtgccgccgttcatgctgaagaccgccgacaaccccaacggcctgccgatcgaagtgttcgatggcatccgcaaggcacagatggataaccgcgcgcagctgtaccgggacatcccctcgggcccgttctatggattcaaccgtccgggcgcgaaggtgtcgcaggggctgatcgatgcgtggtgggcgcagggcatgcagggcggccacaagaacacctacgattcgatcgccgcgttctcggccaccgatttccgcgccgacctgaagaagttcgatgtccccaccctggtgatccacggtgacgacgaccagatcgtgccgatcgatatctctggccgccagtcagcgaaactgatcaagggcgccaggctgattgtctacccgggtgcgccgcatggcctgaccgacacccacaaggacaaggtcaaccaggacctgctgacgttcctgcaggaaaagtga

SEQ ID NO: 494188 - DNA, 570 bp, Stenotrophomonas maltophilia
atgagcaagctcaccaccgacacccaacagaagatcctggccacggccgaggcgctgatctaccagaacgggatccacgccaccggcatggacctgctggtaaagacctcgggcgtagcgcggaagagcatctaccgccacttcgagaacaaggacgacgtggccgccgctgcattgaaggcgcgcgacgtgcgctggctcgcctggttccggcatgcgtgcgagaaggcggacagcccggaagcacgcatcctcggcatgttcaccgtgctcaagggttggttccagtccgagggctatcgcgggtgtgcgttcatcaataccgcgggggaggtcggcgacgcggccgatccgatccgggaaatcgcgcggaatcacaagcagaagctgctcgattacacgctggaacttaccgaacaactggatgtggagcagccggcggacctggctcgccagctgctggtcctgatggaaggcgccatcaccctgtcgcgtgtgatgggtgattacggcgccgcagacaccgcgaaggacgttgcgaagctgttgttggaacaggccaagcgttag

SEQ ID NO: 494189 - DNA, 423 bp, Stenotrophomonas maltophilia
atgcagaaggtgcgccttgccgaggatggctggaattcccgcgatgccgacaaggtgtcgcttgcctattcgctcgacacccagtggcgtaaccgtgccgaattcaccaatggccgggaggaagcccggcagttcctggcacgcaaatggaacaaggaactcgagtaccgcctgatcaaggagctgtgggcctttaccgaaaaccgcattgctgtccgctacgcgtacgaatggcacgacgactccggcaactggttccgttcctatggcaatgagaactgggaattcggcgcggatggcctgatgcagcgccgcttctcgtgcatcaacgacctgccgatcaaggaaagcgaccgcaagttccattggccgctggggcgtcgcccggatgatcacccggggttgtcggagctgggcatgtga

SEQ ID NO: 494190 - DNA, 729 bp, Stenotrophomonas maltophilia
atggacatgcaggcagggggcggcgtcgatccgccggcaacgaccgattcgcaggaactgacattccactggctctatcagcgggtgcagggactggttgagcacagcatctacccgaaggcgggcagggtggagacgtgggcgttccgcatcggcatgggtgcggcgatcatcggcattctcactggccagcttccggatcgatggctgcctgttggcgcagtgctccaggtggttgttgcctgcctggcaatcgaaatcggagggttcattgtcggtggcgtcctggccgcccgcaggggcattcgccagttcagccagcctcggctctcgcacgcgcgggagatggatggcgatttcgcgcactggcaagcggtggtgaccgagcttcgcggatttccgcgcgtccagcgcgagcggcgcctcaagtacgtcagtcacctgcgcacaaacatgattgagcgcatgggcatgatgtatggcgggctgcagcggctcgggccattcccgctgttgattgccctctacctgcagttccgcggatggaaatggggcgactgggcgggcgctttcgatgttggattgctaggcgcactgcttatcttcgccatggtgctgctgtacctgctgggctggatgctgatcggccttcgcaccaggctggatacctacgtggcattgttggagggctctatccacgagcccgaaccctcgaagccagcgccttga

SEQ ID NO: 494191 - DNA, 669 bp, Stenotrophomonas maltophilia
gtgccaagttgtgatgaaggaatgaagttgacgcgtcgccaggtgatcgccggcggcgtcacgaccgtggcaatgtccgccgcaccgggggcgtcatcgctcgccgccgaactggcgacgcccccgccgcccaggccgccggtcatcagcacggtggccttcaccatcaacggcaagcggcgggagcttgagctcgacacgcggactacgctgctcgatgccctgcgcgaacatctgaagctgaccgggaccaagaagggctgcgatcacggtcaatgcggtgcctgtaccgtgctggtcaacggtgagcgcatcaatgcctgcctcagcctggcggtgcagcaccagggcgatgccatcaccaccatcgaaggactcggaacccccgatgacctgcatccgatgcaggccgccttcatcaagcatgacggctaccagtgcgggtactgcacgccggggcagatctgctcggcggtggcggtactggacgagatcaagcggggtgtccccagccatgtgcaggcagacgtcagcgcacggccccgggccaccaacatggagatgcgcgaacgcatgagcggcaacctctgccgctgcggggcctattccaacattgccgaggcgatggaagaggttgctggcgtgacctctgcagggaggcgctcatga

SEQ ID NO: 494192 - DNA, 951 bp, Stenotrophomonas maltophilia
atgagggccttcagttacgaacgcgccaaatccccggccgaggccgccaaggccgtcgccggtaccgagggcgcgaagttcctggccggagggaccaacctgctcgacctgatgaagctggaggtcgagacgccagcgcacctggtcgatgtgcaggacatcggcctggacaggatcgaacccaccgacgacggcggcctgcgcatcggcacgctggtcaccaataccgcgctggcctcgcatgagcgcgtgcgccgcgactacgcggtgctgacccgcgcgatcgtggcaggcgcctccgggcagctgcgcaacaaagccactaccggcggcaacctgctgcagcgcacgcgctgcccgtatttctacgatccccatctgccctgcaacaagcgcctgcccgggtcgggctgcggcgcactcgaggggttctcccggcagatgggcgtgatcggcacctcggacagctgcatcgcgacctatccgggcgacatggcggtggccctgcgggtgctggacgcctcgatccagaccgtcagcggtgacggcagtacgcgcagcatcccgattgccgatttccatcgttcccccggcgacaggccgcagcaggacaacgtgctgcagcgcggtgagctgatcacccacgtcacgctgccgaagcctctgggcggtcggcacgtgtaccacaaggtacgtgaccgcgcgtcctatgcgttcgcactggtgtcggtcgccgcggtcgtgcagcgagacggttcggcgcggttcgccttcggtggagttgcgccgaagccgtggcgcgtcgaggcagccgaaccgctgctgcgcgatggcgtaaaggccgcgacccggcaggtgttcgccggcgcccgtccgacgccggagaacgcgttcaagatcgcgctcgccgagcgcaccctcgcggccgtgctggtggaaggagagcgctga

SEQ ID NO: 494193 - DNA, 2205 bp, Stenotrophomonas maltophilia
atgccccttcaattcaacgcccccgccggcgacaacctgttcgacaaggccaaggtcgtcggcaaaccgacgccgcgcatcgacggtccgcgcaagaccaccggcaccgccccctatgcctacgagcgccatgacgtggcgccgaaccaggcctacggctacatcgtcggtgcgggtatcggcaaggggcgcatcatttcgatggatgcctcccgcgcacgtgccgcgcccggcgtactggcggtcatcaccgcaccggaaaccaagccggtcggcaaatcgaactggaacaacgcgccgttgttcggcggacccgaagtggcccactaccaccaggccatcgcctgcgtggtggcagagaccttcgagcaggcccgcgccgccgcggcgctgatccgcacgcgctacgagcgcggcaagggccgcttcgatttcccggccctggcaccgtccgcaccgctggcaaaggggcgtgacggcaagcccgaccggcaggcgctgggcgatttcgacgccgcctacgcgagcgccgcggtcaagctcgacgagacctatcacacctccgacgaaagtcattcgatgatggagccgcacgccaccatcgccgcctgggagggtgacacgctcacgctgtggacggcgaaccagatgatcgactgggccaggcagggcatggcggcgatcctcggcatcgatcctgccaaggtgcgcgtggactcgccctatgtcggcggcggcttcggcggcaagctgttcatccgcgccgacgcggtgctggccgcgttggcggccaagcaggtggggcgaccggtgaagatcgcgctgcaacgcccgttgatgcccaacaacaccacgcaccggcacgccaccctccagcgcgtgcggatcggctgcggaaaggatggccggatctccgccatcgcccatgaaaactggtcgggcaacatcaacggcgaggatggcgaaaacggcaccctgcagacgcccaagctctatgcaggcgccaaccgcctggtggccaactacatcgccacgctcgacatgcccgaaggcaatgcgatgcgcgcaccgggtgaagcaccgggccacatggcgctggaagtggcgatggacgaaatggccgagaagctgggcctcgatccgatcgcgttccgcatcctcaacgagcccgaggtcgtgcccggcgatccgtccaagaagttctccgaccgcaacctggtgcgctgcctgcgcgaaggcgcggagcgcttcaactggaacaagcgcaatgccaagccggcgcaggtcagggaagggcattggctggtcggcatgggcgtgtccgcgggctatcgcggcgcaccgacgatgaagtcggcggcgcgggtccggcttgacggccagggcggggtggttgtcgagaccgacatgaccgacatcggcaccggctcctacacgatcatcgcgcagacggcagccgagaccatgggcgtgccgctggaccaggtccaggtcaccctcggtgactcccgtcatcccgcctccgccggttccggcggccagtggggcgcggcaagctccaccgcgggcgtgtacgcggcgtgcgtcagcctgcgccgcaaggtgggcgagaaactcggcttcgacggcgacaccgcagacttcgccaatggccgcatccaggcggatgggcggaccatcacgctggcggaagcgggggcactgtcagcggaggacggcattgccttcggcgacttcaaacaaggctacgacgtcggcacgtatgcagggcatttctgcgaggtcgccgtgcatgcctacactggagagacgcgcattcgccgcatgcttgccgtatgcgatggcggccggatcctcaatccgctgtcagcacgcagccaggtcatcggcgggatggtgatgggtgcgggcgcgaccctgatggaggagctggtggtcgacaaacggcttggtttgttcatcaaccacgacctggccggctacgaggttcccgtgcacgccgacattccgtaccaggaagtggtcttcctcgacacgctggatccggtgatctcgccgatgaaggccaagggtgtgggtgaactgggcatctgcggggttggcgccgcgatcgccaatgcgatctacaacgcaaccggcgtgcgcgtgcgcagctatcccatcaccctggacaagctgttgcccggcttgcccgacataggctga

SEQ ID NO: 494194 - DNA, 1062 bp, Stenotrophomonas maltophilia
atggaccgacccgtagcctcgcccactctggaggtctccgccgcaggcggaggggagcccggcgatcttgccgaggacctgtccgcagcgccgggcttcctcgccgaaggcagcccgcgcggcgtgctcgagacggccttgacgcgcatgcgcgcgggggagcacgccgtgctcgcgctggtgctggaaaccgatggctccacctacgccggtgccggcgacatggtgctgttctgcaacggcggccaggtcggctggctgagcggcggatgcctggagcccgagctcgcgcgacgcgcggagcaggtgagcgcggcagggcgggtcgactggatcgagatcgacacccgcagtgacgacgacctgttgagcggatccgcgctcggctgccgcggccggcttcggattgcgctgctgccattgcgtgccatggcaggcatcgacgacgtgatcgaggcttggttgcgcgagggcgtgtcactccagcgcgaccttcgcacgtcggggcaggtcgttttccgtgccggccatcgcgagcaggcgtggcagctgcatccgatggagggtacgcagccctttggcgagggtgcgtggcgtttgccgttgccccggcttccgcgggccctggtgttggggggcggtcccgaaacgcccttcctggttccgctgctgcgcggcctggggtggcgggtcagcgtagccgaacggcgagcgcgctgggcctcagccgggcagtgcgcggatgcgcatcttcagaccagcccggccgaggcccttcatggcgactgttgcgacgcggcactggtgatgcatcacgatttcgaactggaccgggaggcgctggtggccctggctgataccaacgtcgcgttcattggactgctgggtccgcggcgaaggcgcgaggacctgttcaagctgctgacaccggatcagcgccaccgcctttcccccagacttcgatcaccggtcggcctgagcatcggcggccgagggccagaggcgatttcgctcagcatcgccgcgcagctgcagcaatggcgaagcgcgcacggcaggtga

SEQ ID NO: 494195 - DNA, 627 bp, Stenotrophomonas maltophilia
atggcgaagcgcgcacggcaggtgactgacgcgcatgcggtcgtcgtgcttgctgccggcgggagcacccgacttggccagcccaagcagcttctcacccggcagggcgagaccctggtacaccgcgtggtgcgattggcgggggaggttgcgccagcgcaggtactggtcgtggtgggcgcgaacgcacaggccgtgacatccagcgttgccgggctggatgccactccggtaaccaaccaccactgggagcgtggcctggcgagcagtctgcaggttgccggcgcacacctgctgcccacggtgaccgcggtgatgatcgtggcatgcgaccagcccgcaatcgagagctcgcatctgcaggcgctgctttcgggtgcccgcgccgcagcgtcaacgtgcgcgggcacccgccacggaaatgcgcttggcgttcccgcagtcgtgccgcgcgcctggttcaccgctgtcggtgcatccggtgaccggggcttcggagcgcgcctgcggcaacttcctgtcgatacggtgcatgtcctgcaggcaccggaactgggcctggatatcgatacgccagaagatcttgcgcgtgcgcgcgatgcgggctggatcgatgccgggaggtga

SEQ ID NO: 494196 - DNA, 501 bp, Stenotrophomonas maltophilia
gtggcgtggtgccgctgggcggccaacgcgctctgtcttgtggtggtggttgcggcacggacgcagtggccggcgacgccggcgccctcgcctgtcgcgttccaaaacatcaacgacgatcgactctcacaactgcgccgccaggcgatgcagttcgtggagtctcagccacgacagggcttccagttcgtcgagcggcgccgagatgccgagttccaggttcattgccggggcatacccgtgctgtggctggaggggcgctcgcaccatctgctgttgcaggtctcactggacgcggagcagcgggcgcccgccgttgtgcagcttggtacgttgcttcaatggcagctggagccggtgggctatctggagcaggtgctggctgacgtgccggaacctgttctgtcggatcgggtgctgcagatgttcgggggcggggtgcctgagggcgcgcgatgtggcccacactggtcacctgcgagccaggcattggcccagtga

SEQ ID NO: 494197 - DNA, 357 bp, Stenotrophomonas maltophilia
atgacccagccccactcccctgccccgcacccgattcgcgacacgcctgcgaatggccctgcgctggacccgaacaccctcatcgccctgctgcacagtatcggctcgggcgccgcctccgatggccagccgtggccggaacgccatcagatgcccggccgacgcatcgccctggcagataccgattgctctctggcgggccttcgggtggtgctggagatcctgctggccgcgcagcgcgcccgcgagaacggcgagctggagcagtatgttggccctcgcgtcatggagggcctgatcatggccggcatcggccttaccgcacacgccagtacgcgcctgcatccggaggggtga

SEQ ID NO: 494198 - DNA, 756 bp, Stenotrophomonas maltophilia
atgccctatatcggaatcggactccacatactggcggccatctacttcgcggtgcacgccatccgctcgggccagagcctctattggctcatcctgctcttctccttcccactgctaggcagcatcgtctacttcctggcgatctacttcccggaagcccgcaactcgcgcggcgcgcggcaggcaatccgctccgccaagcagctcatggaccagggccaggacctgcgcaacgcgcgtgccgaactggcgcgtacgcccaccgtgcagaatcgggttcgcctgggcatgacactgctggatgctggccaggcggaggaagccagaaccctgcttgagcaggcagccagctcgccgctgggcgacgatccctacatcctgaccggccttgcccgtgcccgcctcgattccgggcagcccgcgcgtgcggcggagacgctggacggcctgttcgcccgccatccggatgtgcgccgcaagccggaacagaccctgctttacgcacaggcactggcggctgcccaagcgcccggcacccgcgccgcgttcgagcgcgccgtcgaatgcggaaacgatgcggccgctcgctgcctgtacgccgaatggttgatggcgcagccgcagcccgacgatcgtgagcaagcccgcagcctgttcgccagcatcatcgacgatgcgcagcactggtcgcggcacgcgcgcagccacaatgccgcatggttggagcgaaccaaggtcgcgttgaagggctactga

SEQ ID NO: 494199 - DNA, 717 bp, Stenotrophomonas maltophilia
atggaacgtacgcagaagacgctaacgatggctgatgttgctggatggggttcggcgctcatcacgttcgggttgattcaaggggccttttatctgaaggcgtattgggggcacttcggcctggatccctttcagtttgtcgccgtaagcgagcttgcgctggcagggcttgcggggatcggcatggtgttgttcttcatactgattgcgctgctgcttggagggtgggtcgaggggaaggtgacagcgacgccgtccccagccaatctgctgatgtggctgaccttggctctttgtcttgttggaatgggcgccttgctttggtggtccaatgcctggccagttttgataggtgtggcgctgacgggcatatgtgcaatggcagtacgcctgtccccagtgttgccggccgccgtgaagaactcgccgtggctggtctatgcgctcgtgatgattgtctatgtcccgatctcgtcaaactggcttggcttcgaacgcgccaaggcgattacttctggcagcagcaagcacacggtcaatgtgaccattgatgagaaggtgcaaggcagcctgggcttagtggggcgtttgggtgacagctatgtgctttgggacccggtacagaaagctgcagttcttgtgccagtggaagacgtgagtaggctggagattgcgcaaaaatccgttccgcctgccaaatcagctcagtcgcgatag

SEQ ID NO: 494200 - DNA, 204 bp, Stenotrophomonas maltophilia
atgcagacatggtcagagggcactgaattcaagggcatgctcgtcttctccgactacatgcggcacaagtgggcctacgaattcttgatcgaagaccttatatgcatcttcagcgtatttgctgatgaatcgtctgcggccaccagtatcagctttgagtggaacgagaagaggcaagactacgtgactcacttcgctcgttga

SEQ ID NO: 494201 - DNA, 1743 bp, Stenotrophomonas maltophilia
atgattaaatctgtagccatagagaacattaggggcatcaaggactccacgtttcaactcgacattattcctaacaagccttcactccttgtcgctccaaatggattcggcaaaagctcgcttgccgcggcgttcgccgcgctcaagaccaagaggttagagcttccaaaagatcagttccaccttggagatgaatcgctcgccccaaaactgaccctcacgattaggaagaatggcgaaatttccaccctcgttgcagatgggggctgcaacggaattgcggcatcctttgatgtccatgtgatcgccagccggcttcgggcgaaggtcaccaagcacaacttaggcaggttcacgaccgcaacagcgtcactggatatcagcgacttggtgctggtccagaccattcccgccaaggcaaaacacgcctacgacgtaacggagatgcgcactcgctttgggccatccggcaaggccttccagaacctcagcaagacactcgggaacccagcgctagccgacggcttgattgatctgtatggcgtgatggacaagatgacgggtgtccgcattcaaaatgacatagaagaggtaactgcgttgcttcaggctcaggccggaaccgtcgacgaaatacgagcatgggctagtgatgccctcgcgctacgccttgaagcgatcgacgccgtcaaggcgttggctgatctcttggcgatggctgccggccccgcccaagcccgtatcgacgctctgctctcgggcctgcaagtggcgctgacctacctaggtaacaagaaggccttcaaggaagcgtgcaagtatctctcgtatgtcaacgaaaaggagagctttgaggacatcatcaaggcgttcggttccacatggaagagggtcaggcctgctgagcgcagtgggagtctcgtcgtctccttcccgccagccctgcatatatctaatggccagcgtgactctctgtgctttgcggcggagctgaggaagattgagcgatccatctcgtcgcgcgacatcatcctcgttattgacgaggtgtttgactacctggacgacgccaatctcgtagcggttcagtactacatcaccaggcttatcaagaaggtccgcgagaaacaaaggaacatgtatccattgattcttacgcacctgaatccttactactttaagaacttcacgttcgctagtcagaagatctatttcctaaagaagtccaaaccgaccatcaacaaggactttcgcgcccttatcgcaaagcgtgaagatccatccattaaagaagacattggccgctattatctgcactatgatccgtcgccggttgacgtaacggcacagttccaggctcttggcctgaacgagtcctggggagattcgatcgcatttcatgcttacacagaagcggagtggaacaagtacgtcaacgaatcggacaactatgatccatttgccgtctgctgctttgttcgtgtcagaattgagaagattacccatgacgcgatccaaggtcaggctcggaaagcggatttcctcgacaagttcatcacgaagaagaagctggattttgccgtcgagaacggtgtcgacgttgacgacacgatctacctcctgggaattatctacaacgagggcatgcacgttcacgaaaacgtagatgacagtagccccattgtttctaagctggagaatcggactattcgccatatgctcatcgagagcgtaagggagtaa

SEQ ID NO: 494202 - DNA, 1380 bp, Stenotrophomonas maltophilia
atgaatagctctcgcgccgtaaatccttctacgcctcggattgtcggcgcagagcatgagttctatccatacatatcgggctacggcgtgctgcagcggatcgttgcactgggcatgccaacaagtgagcaactcatgatcatgggggtgaggcgtaagactgggcgctccatgctccgccctttgcttctgccgggccgggtgcaggatacttttgcgtcagccatcgaagtccgtgacgtcacaacgaagaatctatggaatccggccgcgtggcttccagttcaatcacttcgacttctcgcgggtagtgagcttccatatatgcggtgccccgcatgcgcacttcacggctaccattgttcactatttctccttccttccatctctgcgtgcccttggcatggcgagaagctcatcagccactgcgaggcatgcggaaggacgctgggcaccagttttgaccactccggtggtctcgggacttgtacttgtggatttcagccaatcgacgcccacacagcgctactggacgtcaggcaatttcccgctcgtgaagtgtcgcagtgggtggatgactaccttcattgggcatcacgccagcgggcaggccgagtgattcacttccccagtgatgcgcaaagctggccttcagctctggcgcgcctgattgatagaacgactcctatgccgcccgtccaccaggacgatggcaatgctcacgtaaggtatgaggctttccagccatccgctgacgatccggagccaggggcgttctggggctgggcaatgattggcggcaactcgggcctcatgtgcgctccgctcccattgatggcctacgatgctttgacgcgggccactgcagcggcatgcgccagggtcggacttgaaggcctatctgtcctgagcttccgctcaacgcactacgacacccaaggacccactgaggtagagcggcacgagtcgttcctagctccctatggtgtttctgccagcggcgcgacttggctcaatctctcggttgtcgacccgatggtaacgttagcgtgcggcacagcgctggagctggccgctgcggcctttggtatcgcgaacgacaagccggataggtccccttccgtaatcgtcgcttcggtattggacagcattaagggaagatccgccttggtcgacgcgcttgtgtgggttctggcaaccgcttatgaggaaggcttggcgttgacgcttgcaagggtgttcaagctgaatccgaaggatgtactgccttcaggtgggtatccggtcatcgagcttcagggttccgcccgttccttgagagaagtccgggtcgcctgggtgacacctcgaaaaacagctagaatccagcagaaatcctaa

SEQ ID NO: 494203 - DNA, 1047 bp, Stenotrophomonas maltophilia
atggccgtccgtcgccttgaccccgaccatccacttttcattgagtctggctaccgtatcaacacgaagcctgtcgaacgcatggcggatttcgttctgtacaacattcagcagggtcatcatgggtgctctctttattcagagagcggggttggcaaatccacggcgcaagactatctagtcgaaaccgactggcgctggctcgtggaggacggacgccgcgcaggtgtggccagggcaatcgtcgcaacctcagatgcatgcaggagcccgctgagcttctggcacgcgctttcacatcaactgggaatgccgcgctggtcatcggccaggcctcacgagctgagggcacgaatacacaatcacatgcgcgccgcgtgtgggcacgccgacgtacgcaggtacgtattgttcatcgacagtgctcaacggctcaccaatcttgagtttcagtgcttagaagatcttgataacttgatgagcaaggacaagcttactctctttttggtctttgtgtaccaaagtgaccagcagggcatcgagcttggcgacatgtggcagcaccatccgtcacatgttgttcgccggtggtttctggactcagccccatttcttcctcttgcggcgcgagatgaggtcaggcatgccctgtcgcgctacgacggcgcagcatggtggccgacagaggacatgccattttctagatacttcgccaccgacgcatttgatcgcggatggcggctggaatctgaaacggagatgatttgcgatgctgtgtccgccctccggagggaggtgggacttcccgaacatagtggctggccgatgtgctccttcacatcgaccgtgcggaatctgctaacgaacgcttggtttcagcagagtttcgaacgcttcactccatctgacgtccgtgctgcgcttgtgcatgtcgggtacctgcgaaccgagttcattcgcatgcgcgagaagatgtccgacaaggcaatcgccatcattgagaagatacagaatacggcaaaccaggtagggggaagcaatgaatag

SEQ ID NO: 494204 - DNA, 1851 bp, Stenotrophomonas maltophilia
atggctaggtacgaaatctatgatcaggcgacactcgacgagtggtactccccacatccggttgatattgcaccagatcatctctccaagttccgcgtggccaaggaagcactcaccgccttgcttctgggccgttccaccatcaccgctatatcccggagatatggaatctgccacaaacgcctgaagcgcatggcaatgaaagcgcccacgatagcccacgatggcatgccgcacggatttcgcgtatgcattccatggggcagttactcgactgagctttccttcgaacccgcggaattgccgctggttccaggaagatttgcgtggcacaaagtctccgaagctgtgccaagtgttaaagccttgatcgatggctttgcaacccatctgccgccgggccgccctccaagcgcgttcgtaaaattgcaccaacgagtccttgcggagctgaagcagcacaacctggaggacaaattccccctgaacgatcctggcaaggggaagcgctcgctgcttgctttgctcaagcggcggcagtcggcagtagccgacgtggacctttatgaacctcaatcggcatcgaacgctcctgtcgctttggagcaagcagtacggatgggcctgttcgccagaacggagtttgacgcgcaccaaatcgatgttgaatgcaagatctccatcgatatgcccaatggcgcgcgtgttacgcgcaaagtgtcacggctatggcttctcatcgaaatagagactgaatccagggcggtaacgggatggcttctctgtgtcggccagagctatgacaatcttgatgtagcgctctgcttgtccaagtcaatggaaccctgggctcccagggacctgacgatcccggacctcttctacgcacctggcgctggaatgcccgtctatcaggcagcaacgccgatagtcacgcgctcggccgctgtcgcactggacaacttccttgcgcactcggcccatgcactcgaagcagcattctgcagggctcggggaggtgtgatgatcttcggaaagtcgcacacaccgcgctcacgacccattgtagagcaattcttctcgcgcttggaacgtggtgcgctgcgtaagatccccggcggttttgagcccgccaaacggctgggggaaaacaagatcaggatcagcaacttctctccggatgcccatcccatccagatgcaccttctcgaggagctcctggacgtcatcatagccaactacaacgcgacgcctcactccgcactcggacagatgacgccgctagcgtatctcacgaatcgcaaagagtcagcgtttgcgtttgcgccggaaacctgtggcctggatgctgcagatatggcttcgacaatcgtaagcctgcccgtaaaaggcaacaaggataatggggagttgccccatgtcacctacttgtatgcggactaccgatccccttcccttaacgataaatggggactgattggcaccaggattcttgcgcgcgtgaataggcgcgatcttcgttcaatcgtgctacttcaaagtgccaccgtgccattcggagtggctaccgcgcgagcgccttggtcgcgcgcgccgcatgacgagaggacgcgaaggatcatctgtcgttggtccaaacagcgcagtgatttctcaatcgctggcgtggagtgtgcaattgaagccttcatagcgcatcttcgatctactgcagacacgtcccaacccgcagtcgaccaacttgcgcgcttgcagcagttgcacttcggccgtctgcccgacattcggtcccagccagctcacatcccggtaagagtcccccggggaggcaaggtgaatcttgatgactag

SEQ ID NO: 494205 - DNA, 717 bp, Stenotrophomonas maltophilia
atgaccgcaggaaaaagcgcgaccgccaaaccgacggacgaagaccgccgtgaggggcatctgccccattcccctctcgagctagcacgcggcaagcgcgaccgccgcgaaatctttgtatttcagtccccgaagaatgggcggaccgtaacggtggccgacctggtcaacttttgccaggcgctgatgctcgaatttgacccccaggtggagatgtatgttgagaggccgcgtcgaatcacggtaggcgagaagcgcgaccttgagttgagcttctgggtcgggcggagggatggcacccagcactaccagtttgtaatccctacaaaacgggtggcttcactgagcgttggcttagtcaagcttcccgcagatgacgagctcatccacatggccttgaatcaagggctcgtattgcgacttgtccacgaaaactctttggcatctcgcgccagcgaggtcgctgttgcctacgaactacttccgcttgtctgggccaatgcaaagatcgcgggggccaggcagttggaagtgaggattgaggacatgctccagaacgttgagcgcctcaccatgagcgcattacaactgcagacgggccaggcccggttcgcagtggcttgcgcagtggcaagcctcgtctacaccggccgcgtacaactcgtggactatcgcccaggggatccggatgccctcgtggaggtgcgtcatggctag

SEQ ID NO: 494206 - DNA, 324 bp, Stenotrophomonas maltophilia
atgacggagcggaccaacgaatcaatcctggccccggaacgccgtgagatcgaaagagaattgacctttcatttcgggcctctcatcggctatgaaaacttgccgcgagctcttggctatcgctccagccacgcgctccgccaagcagaggcacgcggaaccttgcccgtgaagatattcaaagtgcccggccgccgcggcaaatttgcctttgcgatggacatcgccgactggatggttgggctgagggccgcaatcagtccgccggcagtatctggcaccccgcaagatgaagcggctgctctgaagcccaaccaggaatga

SEQ ID NO: 494207 - DNA, 912 bp, Stenotrophomonas maltophilia
atggcgctcaaagagatacccttttacggcgaggcgcgacttgcccgcatgcgtgcaagcacgagcatacttcccgccaaccgagccgtgccgtactgcctgcgatcactcagtgtcggattgtggtttgaatgcttgcgaagccgaatgggcctatccagcgcatacgcgctcggacagtcgatatccccggagcgtcccggctgccactccaatgtgtgggtgaaatatgcccatgcggaacacgtcccgtcccaggcgacgcaggcagcagccgaggcgcgctatcccggctcccgcatggttctatgttcaccggtctgggccgctctgaatgtccacgaggcacttggcggttgtggagaatcaatactcatgtcgctcagtgcacctgtgcaactggaagtgttcagcggagcgagcttgcgagccggcatgtttgtccgccgagaccgtcggttacgagagatcaccgagggcttgtgcgggctgggcactctggatagcctggcggcactagtggtgatgttgagggtcgcccatgagcagggcagacggcatgactgctttgccttggggcgtgcactgcacgattgcctgctactggtggggcaggatagtcccatccagcttattgccgaagagctgttctggtacttcagccatttcgtgcttcctttcacagggtgccggggtgttcggattgcatcgtcgcgacgccgcttgctcctgcagcatgaggttctctcccgcctcgtacttgagcttgaagacagcgggttcgactatctcccaggcatgcgtcacccgctcttgcgggtagtccgcaatcagcagcatgctccgtcttcgcgcttcttctcgcccggcgtcggaccctgcagcgcaacatcgcggcagatggcgcggtag

SEQ ID NO: 494208 - DNA, 525 bp, Stenotrophomonas maltophilia
gtgcaagaacctcaaaattctggcggccacccgccaaatcaaagcgaccgcgttagtgccgcttggcagcagctgaatttggtcttgggcttcttctcccgtgtagacacaaaactctcggtcggcctgggtatcaacctgggcatgcttgccatgatcgcgacgcggctgccgaaacttgatgaactaacggccctgatctcggttgtgggcgttttgttccttacaccgcttactgttagcttctggcacctgtggtacggatattttccggaactgcgaggcgggtcaaattcgctcatcttctttgaacgggtgtcgagcatggccgagcacgagttcttgcagaagtgcgcggagcgtacgctgatggagttcgaggaagacctcctgggtcaatgttggcgcaattccaagattctctcgtcaaaattcagctgtttgaagtacgcgtacattgccactgttctggcaatcgccccatggatggcactcatcgttgtgctgcctccgccggcaaagtga

SEQ ID NO: 494209 - DNA, 879 bp, Stenotrophomonas maltophilia
gtgacgccaaggcctttggagctgctgcagcgcgtggcaccggactacggtgccacgttgatcgtagaccctgtcggggggctggttgggatcacagtggttcgggccggcggagccgagtacgcatttagattgctcgtctccgttgcaggcgagcacgtctcagtgcgcgagatcgccgaccccggcatgctgccggggttctgtcccgatcggcatatcaacggtgaccgtagcttctgcctcggctggggagaagacaatccgagccggatccaagacgaagcagcagcgaggcattggtgggccacggtctaccagtacctgacctaccagatcggcgcgaacgcccgccgggtctttcctggagcggagaacggccgcgcgcacggtcgtgctgcgcagcatcaggccaatgctgagcaggcagccgaacgactgggtccggcattcaaggcagatgtgctcgcggggcagttcatggtccgcaaggattcgcgccctcagaagcggaggctcgagctctggcacggcaaactactccttgctcgggtgtcgacgcgcactgaaaccttggtcgggagacccccagtctgcccatgtggccgcgatcctgacggtgcgatcactgcatgtggcgaccacgctgcggccctggtcactttcatcttggaacagcaccgatgtgcgctggccgacacagctttccttgaggattgtgcggctgcaggagcgcgctgctgcggaacgctggacatctgcggtcttcgatctgccatcaaacgaacacaaaccgtatccctcaagacagagaactcaccccgtgcaagaacctcaaaattctggcggccacccgccaaatcaaagcgaccgcgttag

SEQ ID NO: 494210 - DNA, 1533 bp, Stenotrophomonas maltophilia
atgggacacagctggaaaaaagatcgcaccaagaagcgcattgccacccgttacgccgaagtccgcgacgtggacatccgcgattacaagcgggaaacctcgctggtggatattccagtcaatcgcgcctatcgcgtccaaggggcgcatgtctacatcgacatcgtcaatctggcggacatgcttagctgcactgacatcgaaggcgaaacctgccacaagcgggcccttcgattcctgaatcagcactaccgcgccgtccatcgcatcctcgttgaaagtgatgccatccgtgtggactttcacaaccagcggctgcatgcggttgtgaccaagccgtacggcgatgccaacgaacgcgcccggatcgagcgcgcggttgcgatcgcccagctcgccatcgatgtgctggctgaaacgggcgactcggacgcgcacatccccaatgcccaggttcgtgtcggcattgacagcgggatggcgttggccgtcaacaatggtcgtcgcgccagccaagaacctcttttcttaggctccccagccaatcaggcggccaagtgtgccgggcatggaggggctgaaggcatctacctgacgcacggcgcacgtgccgtgcttgaactgcctaccttgaccggcaacaaggaccgcaccacttcgctgaccgatgctcagatttccgcatgcgtcgaggccgctgcactcggcatttccaagtcgcgcatcatcgaactctggaaagatgaacaggccgagctccctatcggcgaattcaagttcagtcgaccgacgcctccgctttctgatctggacttctccctgctcagcgcggcgaactcaaggcgatttgatggcgtttcgatctatgccgacattgacggattcaccgacttcgtggacaagcacttagaggaggatcccgaacatctggttcgaacactgcacgtattgcgctctgagctggatgcggtcgtacacgaggattttggagggcgtcgtgtccgttttattggcgactgccttcatggggtgctgctggagggcacgtcacagacgacagatgcgcaggacacggtcagcaccgctgcccagtgcgcgggtgcattgcgcagcagtttctccactgccctagagcaactgagcgccgaaggcgcggaagtggcagagctgggattggccattggcttcgaacttggcccccttgccatttcccgcctgggcatgaaggggagccttctgcggtgtgccacggggcgagcggtgttggaatctgaagcccaacaacgactctgcgacggtgtggagacggccattggtgaaaatgcctacaaggccgccagcgccgcgatacggaccgtctttaccgacaagcgaaaggcggcgaacctagactatgccgcagcggtggaggaactcgccgcatccggggaccgcgtggcgaaggcaacactggaggcacactacgctgaagtggcacccgcagtggctcctgcgctcgcgcagccgatccgtcctcatgtggccgcgacgtga

SEQ ID NO: 494211 - DNA, 921 bp, Stenotrophomonas maltophilia
atggggactgggatcgtcgagcgcctcgcggcggatgatggcaggcgactgatcgccgccttggctgagttccgcctgctggccggcttggacgcggccgcagcccagctggcacaggccggggaattgctcgacgtggggacagggcaggcctttatcactcagggcgccccagagaccgacgttttcttcattgtctccggctccgtggacgtgctggtcaacggcaaagtggttaatacccgaagggctggggaccacgtcggcgaaatggcagccatcgaaccggcgcaactgcgggcggcaactgttactgcacgcgagccgaccgtagtgctaaaggtgccggaaatcgatttcagcaggattgcggattcacaccccgtcatctggcggcggctggccgcgaccctttcgcgccgtctaaaagagcgcaatcacatgattacccaacctcgcggacaggtccgggtctttgtgatgtcgtcggtggaggcgctccctgtcacgcggttgctggtacagcacttcgagcacgacccgttcctgacggtggtatgggaccacggggtgttccgcgccgccaactacacacttgacgagctcgagcgccagctggaacaggcagactttgccattgccgtggcccacgcggatgacatggtcatcagccgcggtgacgagtggcctgtcatgcgcgacaacgtcgtctttgaactgggtatgttcattggattcctggggcgtcggcgcgccttcttgatggagccgcgcgaagacaagctgaagcttcccagtgatctcacggggctcacgaccgtcccctaccgatacacccctggcccggacgcccgggctttgattgcaccggcatgcgaacaaattcgctcccgcattctcgaagctgggccgagggactga

SEQ ID NO: 494212 - DNA, 702 bp, Stenotrophomonas maltophilia
gtggcactgctggaagagatgacggccgccgtgcaggcgatagcacaaacccgatggtctacacggagaggtcaagttgtacccgatccagaagatgtgcgattgggcaatgacgcagtggagtttgatcgtgccactgttttgtacgcggacctgaacggctcaacgaatatggtcgacaccgaagcctggcagttgagtgcagagatctacaaagcgttcctgcactgtgcagcgacgatcatcaggaaagagggcggcaagatcacctcctacgacggagatcgtgtcatgggcatctgggtgggtgaccggcaagccacgccggcggctaaggccgggttgaaaatcaactatgcggtcaagatgatcgtcatgccagcgttgaaacagcagtaccccgactggacaggtaccgtgaggcatgtcgtcggaatcgacagcagcccaatccgagctgctcgcacgggtattcgaggcggcaacgacatcgtctgggttggacgcgcggccaatcatgcggccaagctcacggacctggaccttgccccgtcaacctggattaccgatgaggtgttcatccggttggctgatgagttgaagtacggtggaacgccgccgactctgatgtgggaggcgttccgctggaaccggcagggtggtcgccgcattcacggatcagactgggcttggcgcgtctaa

SEQ ID NO: 494213 - DNA, 1965 bp, Stenotrophomonas maltophilia
atgaagctagtcaaggcacggatccgaaacttccgttctgcagaggattccggaacgttcgatgtcggagagctgacctgcttggtcggtaagaacgaggcgggcaagactgcaattctgacggcgttgtttggtacccgtcccatcgccgaccagtttgcttacgacacggtgcgcgattacccccgccgcttcctcacgcggtatgaggaacgccacgacgacgaacccgcaccggttgccaccctgacctgggagctcagccacgaagaccaaaaggcggtcgccgacgtcctgggtgccggcgcgttaagtagtacgaccgttgacgtaacgacagattacagtggccacagcacttggagcattcacgtcgatcccaacgtggtgcgcgcgtttctgctcgaccagcacggtgtggcaggcgaagagcgggagaagttttccaagatattgctggatcgactcgtggtcgagatagatgcgcaccccgagccgtctgaccaattgcaggcggtcaagcggtccatcagcggcttccgcaaggggaaaccagtgctggcggccatcgatatcctgcagaaaaggatgccggcgttcttctatacctctcactttgatcgcatgtccggggagatatcgctggacaagctgtctcgtgacacccaaagcggcgcgacgatctccccgggtgaccagattttcctcgacttcctcgagtacgccgggacgtcggtcagcgaattgcagtccagcacacgcctggaagagctcaacgcacgttgccaagccgcctccaatgaaattaccgatgagatcttcgagttttggagtcagaacgacgcgctcagtgtagagatagcgcttgcccaaggcctctccgaggatcccgcccccttcaatagcgggactgttgccaaaatccgcattcggaatgacaaccacaaggtttcggtgcccctgtctgagcgcagcgccggattcgtctggttcttctccttcctgtcgcagttcaagcagatgcgaaagaggaaccccggtgcgatcatccttctggatgagcctggattgacgctacatggaaaggcgcaagctgatctgctccgctacatcattgagcgtctactccccgaccaccaggtcatctacagcacccactcgccctttatggtgccggccgatcgtcttgcggacgttcgcgtcgtcgaggacgttgtcacctacgaccagcgtcgccgccccaccgttaagggcacacaggtctccgcggacgtcctgagcgtcgatcaggacacgctgttcccccttcaggcccatctcggttacgaggttacccaaagcctgtttgtgggagcgcataccctgttggtcgaaggaccttcggatgtgctctatcttcaggcggcatcgcacgcgctcaagcaacgcaagcgccaaggcttggacagccggtgggtgatctgccccacaggcggcatagacaaagtgcaatcgttcgcctcgctcttctctggcaagggcatccacatggtcgccttgtgtgactacggcaatggcgataaaggcaaggtgcagcggctgagggagtctcagatcatgaagacttccggcgtcttggtagccacggatttcaccggaaaggcggagagcgacattgaggacttcttcgcacccgccgtcttcgccgacatcctcaacggtgcctacggtctgaagggaaaagggcaaatttccgcccggcagttcagccaagacggtgccctgacgcgccaggtcaaacaggccgaagcactgtttaatgtcatgggggcttccgttccgcccctggatcatttcactcccgccaactggctcatccagaatcagcacgtgctggccgcggaaactacggccatcaatgaaacgctggagcgctttgagaaggccttcgctgagatcaatgcggcgctaggggccggtgcgtag

SEQ ID NO: 494214 - DNA, 777 bp, Stenotrophomonas maltophilia
gtgcatgcgggcctgaagaagaagcctgggccgctggcgttctccagcctggtccaccgggtggcggtcttgtcggcggcccacaagcaggcccgccaagacaacccttgcgaggatcgcgccgtgaggaccctactgtccaaggggcgcagggcttctcacaaacgaggcgagcgcccggccaagaagaccgcgctgtcagccgcagatctgcgcgcaatggcggccacctgcgacacctcgctcaaggggaagcgcgatcgcgccctgctctactttgcctttgctagcggcgggcgccgccgcagcgaagtcgccgaggcgacggtgaatcacctcacccgactgcccgaaggcggctacacctatcgcttggatcacggaaaaaccttgcagtccgggccagtggttggcagcagccccgacaagcccatcctgggagaggcagccaccgcactgcaggactggctggacgtggccgagattaccgacggccccctgttccggcgcgtctggccacggtcattgggcggcgcgctcagcggcaaggcggtcgccgccatcgttaaggaccgggcgcggttggccggtctggacggggactttgccggccacagcctgcgctcgggctttgttaccgaaggtgcgcggcgtggggtggccctgccggcgctgatggcgatgaccgatcaccgctccgtggccagcgtgatcggatatttccagcagggcggcgtcggcagcaaccccgccgcgcgcctgatggatgaggactga

SEQ ID NO: 494215 - DNA, 222 bp, Stenotrophomonas maltophilia
atgaataatatcactgctgcgtcaggggaactcgtttcggggctggttccggagcggctggccacttccgccgcagaagcggtgcgagacatcctgcaggaggccgaagcgcctaacaccattcgcagctacgccggcgccctgcgctattgggcgggctggttcgaagggcgctatggcaggcccatcgccctacccgtccccccggcggcagtggtttag

SEQ ID NO: 494216 - DNA, 975 bp, Stenotrophomonas maltophilia
atggccaagggcatcagcgaactggatgtgcaccaggcagcggacgacatcatcgccgccggcgaacgtcccaccgtcgagcgaatccgagcccacttgggcaccggctcgcccaacaccgtcacgcgttggctggagacctggtggcagaccgtaggctttcgcctgcgccagcgcgccattgaggcggcggttccaggcatcccagagcgggtagctcacctgagccagcgtttgtggcaggccgcgctgcaggatgccggcgagctcgctcagacccagctggagtcgaccaggcacgcactggaggaacgcgagcgcctgctggaggaggaccgggtggccctgacgctggcgattgaggccagccagaagcgcgaaagggaggctcaggtccagactcaggccgccgccaccaccgcggagcagttggcggcacaggtctcccagatgacggcacaagtacaagacctgctgcgccaacgcgatggagcctatggacgggcggagcgactcgagcaggaactggatgccgtacgccgcagtctgggcgaggccgcggccgctcacgaagaagagaggagggcgctccaggcgcacgtcagggcagtggaggatcgtgcccatacggaggttgaccggcatcgccaggcgttgcggtcagccgagcaggagtgggggcgggagcgcatggccttggccacctcattgcgagagagcgagcaacaagccattgctgctgccaaccgcgagcaacaggcattgcgccgactggaaggcgtgaacgcgcgggctgatggcttggaggcgcagctgacgtcactgaaggaaaccactcggcaagttaccgaggcactccgacaagggagagcgaacacggcaacgccaagcaggcaaagcaagccacgccgcaccgcgcccagaagagtgggcgagccgacacaagaatccaatagcaggaaatctaagacttga

SEQ ID NO: 494217 - DNA, 606 bp, Stenotrophomonas maltophilia
atgaagcagggaagaactgacagagattgggcggtggtcgctgtgatgacctttgccgcaggagccgtcttgacttgggcactcatgagcaagccgagtcccaaatccgccacgttagcgcttgactggccggcgtgggtgcaagcgatcggcagcatcgcagccatcatcgccgcgggactgatccccctttggcacgccagagtcaggagacgggaggtcacacagtccctcatagagctgatttcctatgcgcgatttccagcgacactgatgctggcgcagttcgagggaggattcggcggcccccggctgatcttggcgcatctgacccagcttcataaggctttcgattcagtcaactatgttgacgtgccgaaccgatccttggcgattgcgctgcagcaatcagcaacggctgtgagtgcacttaaggagatccaggaactctttctgagaaaagaagagatgaaaaaggggcgggggagcgagatcgttaaaaagtacctgctcatgctcgatagagccgtcgaagaagcaatcaaggcaaccggtcagcggcctcgagacttcaactacgacacaatcgtgctgcctaatgaatag

SEQ ID NO: 494218 - DNA, 369 bp, Stenotrophomonas maltophilia
atgaaaatgaacggcattcgttggccggaaggctaccttcctggttacaccgaaaactttgtctcgaatgagctgatcgtcctcggccttgccgcagctgatgtttggccgttgcttgaagagccacgtctgtggccgacctactacggaaattcagccaatgtgcgcttccacgatggcgccggccctctgttgcgaaacggggatcgattctactttgaaacctttggcttccccgtggaggctcaatgcgtcgagcatgaggctcctacctccgagggtccgggccggatcgcttggcatggctgggccggtgagcccgggtctgccgatcgacttgacgttcatcatgcgtggattaccgcgtag

SEQ ID NO: 494219 - DNA, 396 bp, Stenotrophomonas maltophilia
atgccgccgaccaggattgctgaagacgaaagcgcaattggcgtgatgtgcacggatgtgtttgggcctggatggggcagcttccgcattgcacatctatccactggtgaccgggttggagtcgaaatcttccagttcaataacgccgagcgtcccgcgaacaacttcgagtactggaagtcgggcgtcttccacttctgtattcaggatccggacgttgaaggcctggccgctcggattgtggcagctggtggaaagcagcgaatgccggttcgagagtacttcccaggggagaagccctatcggatggtttacatggaggatccgctgggcaacatcctggagatctacagccacagctacgagcttacgtattcagctggcgcgtacgtctag

SEQ ID NO: 494220 - DNA, 609 bp, Stenotrophomonas maltophilia
atgccttgggttcagaccgatcaattacgcagattgcagacgatctgggctatgcaaactcaacgtctttcagtgagatgttcaagcgacactctggccggaccccagaccagtatagaaggggcctcagtccgctccagcgagaggtggagccctcctcccgctgaatcgaggcaggcctcgaagctgttgggtcaaccatttagctggcccagacagtggccattcggatcgatggatcatccagagggtgtcaaccaccggagatccacagtcaaccacctcaattgcgtcttgccgagcgaaggattcacgggcgtgtcgcggaatgacagtgaatcccagcccgagcgataccggctcaaggatgagcgcaacctgattggtgaagccgtgtataggaagcgcgcgtacgcctggatttcctgggaacttgcgggcgagaaggcgggtggccatagcctggccatctggatgatcaacgaaacccaacttttgaagatccgcccagctgtccgcgcaggcacctctcggaactaccagctcaagcgcctcctcggtgaagggctcagcccgcagccgagggtcatccggccgaagtgcaagtag

SEQ ID NO: 494221 - DNA, 246 bp, Stenotrophomonas maltophilia
gtgtcgaagtccatccatcgaaaagagtacgctgccctcattgaggctgttcgcgaggcgcggctagctgccggtctgacccaggcccaggtgtccagcatgctgggccgcagccagtcattcatcagcgacgtcgaaacaggcaagagaagggttgatgtggtggagctgagagatatcgcccgcctgacaggcctttcgctgggcaagttgatcacaaactttgagaagcgaatcaaaggctaa

SEQ ID NO: 494222 - DNA, 2958 bp, Stenotrophomonas maltophilia
gtgaccgaactggaccgctacctcgatgcggccacgcgccagaacacggtgcgcagctatgcgtcggcgctgcggcacttcgaggttgaatggcaaggccacctcccagcgacacctgacagcgtggcccggtacctggccgcttatgcgcagaccttggcgaccagcaccctccgccaacgtctggcggccatcgcctcttggcaccgcgaccacggctttgtcgacccgacccgatcgccgctggtgcgcaaggtgctcaaaggcatccagaccctgcacccgggccaggtcaagcaagccgcgccgctccagattcggcggctggtcgagctcgatgactggctggccgcggcgatcgctgcggcacatgcccggggtgatgggccggcggcgctgcgccatcaacgagaccgagcgctggtgctgctcgggttccgcactctggagctggccgccatcggcgcccgtgagcgggtcaatctgggctactaccgcagcatcagccacgcgctgacgcctgccacgcgcacgctcatcgacgaactgctgcgcgcaccggaagggtccaggttcaccggctggcaatcactcaagcgcgagcccggccggcccaccaacaaggaagttcggttctacctgcagcacatccgcatgctgcagcagttggccgaccagctgcctcccatcgatgtgccggtgcccaagctcaagcagttccgtgcaatggctcgggcctatgacgccagcgagctggccgaactggctccggacaagcgctatgcgctggccaccatcttcattcgcgcccagcatgccaagacactggatgatgcagccgagttgttcatcaagcaggtgcgcgggctggagaacacggcccagcagaaattgctggcctaccagctcgaacatgccaaacgggccgacttcctcatcggccagctcaaggaaatcctgcaggcctatcagctagacggcagcgatagtcagcgcgtggatgccatcgacaacagcctggaagcggaagtgtcgaccttgctggccgaatgcgaagaacatatggcctacgccgggaagaactacctgcctttcatgctgcagccctatggcgcggtcaggccgctgctgttcaatgggctggagctgatgaaacttcgggcgaccagccacgacgccggcatggagccgctgatcgcagcggtgctctcgctgcgcaaccagcgccgtgagctgatcgaggtcgcctccctcggtttggacccggaaaaggactttgactggatgtccaagctctggtgtcagcacgtgttcggcaagcgggccagtgcagccggcgccggctggatgcaccgtaagtacttcgagctggccgtgctggtgcaggtcaaggacgaactgaagtccggagatctcttcattcccagcagcgaacggtttgatgactaccgtgagcagctggtcgatgaagccaccttggcccaggaactggaagcctacggccaggtgtcaggcctgcccaccgacgccgagtctttcgtggcgggattacgtgcacaactgacctccctggccgatgaggtcgacgcgcgtttcccggagaacgtacatgcggacatcctggatgggcgcctggtgctgcggaaggggcaacgcgccgaagtctccagcgcgattaccacggtggatcgcctcatcgccgaacggcttccagaatccagcatcgtcgatgtcctgatcgatgccagccaatggctggatctgcaccgtttcttccgcccgatcgccggcaccgagagccaggtcgaagatctgccccgacgtgtgatcaccacgctattctgctatggctgcaacctggggccgacgcagacggcgcggtcgatcaagggcttcagccggcgccaagtcgcttggctcaacctgaaatacgtgaccgaggatgtgcttgagaaggccatcgtggaggtcatcaatacctacaacaaattcgacctgcctggctattggggcagcggcaagagcgcatcagctgatggcacgaagtggagcgtctacgaggacaacctgctgtcggagtatcacatccgctacggcggctacggtggcatcggctactgccacgtgtccgacaaatacgtagcgccgttcagccacttcattccctgtggcgtgcacgagggcatctacatcctcgacggtctgttggccaacacttccgacatccagcctgagatcgtccatggcgacacgcaggcccaaagctatccggtcttcggcctggcccacatgctgggcatccagctgatgccccggatccggaacatcaaggacctgacattctttcggcccgaaccgggtagggcttataagaacatccaggcactgttcggggacagcatcgactggcaactgatcgccacccatctccacgacatgctgcgggtggtgatctcaatccgattgggcaagatcaccgcgtcctcgatcctgcgccggctgggcacctacagccggaagaacaagctgtacttcgccttccgggaacttggcaaggccgttcgaacgctgttcttgctgcgctacattgatgacaatgagatccgcaaaacgatccatgctgccaccaacaagagcgaggaatacaacggcttcgtgaaatgggtgttctttggcagccaggggatcattgctgagaacgtccaacacgagcagcgcaagatcatcaagtacagccagctggtggccaacatgatcatcctccacaacgtggaaggcatgagccggaccttggccgagatgaggaaggaggggattgaactgacgcccgagatcctggccggcctgtcgccttatcggaccagccacatcaatcgcttcggcgactaccacctggatcttgaaagggaagtggcgccgctgagctacacagccaaggtgcttgaacagaccccatag

SEQ ID NO: 494223 - DNA, 414 bp, Stenotrophomonas maltophilia
atgaaaatcagtgaggctgccgacgccagcggatgccacttggagacgattcgctattacgagcggatcgggttgctgccgcgcccggggcgcacgggcaacggctaccgggtctatggcccggccgacatcgagcggctgcgcttcattgcgcgtggccgggacctgggcttcagcctggaggaggtccgcagcctgctgcagctggccggcgatgaggagctttcgtgcggggacgtggaccggttggcccgcagccatctggccgacgtgcgcgcccgcatggccgacctgcagcgcatggccagcgagctggaacgggtgattgccagttgccatggcgggcagcgggcggaatgcaccatcctgtcgacgctgcgccagacgacctcggtggaggccacgcgccagtga

SEQ ID NO: 494224 - DNA, 1959 bp, Stenotrophomonas maltophilia
atgccactgcccatcgccttgattcgctactgcctgattgccttgctgatcggctgggttctgcccgcttctgctcaggcggagcctgccgcagcagacctgcgccaaacctggcagatgctcgattacatcgcggtcgactaccccggcgcggtccaggccggtcgcgtaattgcccccaacgaatacgccgaaatgagcgagtttgccggcgccgtgcgcagtcagctggcagcattgcccggtggccagaaccagcaggagctgacggcccaggccgaccgcctggtccaggcggtggcagagaaggccgacccggcgcaagtggcaacgttggcgcgcgggctcggcacgacgctgttggcccgctacccgatcggcgctgttccggcgagcgcgccgaagacctcccaggccgcgtccatctacagccagcagtgcgcggcctgtcacggccccacaggtcacggtgatggccccgccgcgcaagcgttaagtccgccgccgatcgcgttcaccgatgccactcgcgccgcgcagcgaacgccgctgtcgttgtacgaggtcatttcccagggtgtgccgggtaccggcatggtcagcttctctgggctgtcagaaagtgatcgctgggcgttggcattctatgtgggcagcttggggtactcctcgcaagccaaggctcaaggtgaggcgttatggcgcaccagtgccgaggcccatacgcacattccctcgctcgaagcgctgacacgcacgcgagaggccgatcttgccaccacgatgcccgccgatcaggcaaacgcgatcatcgcctacctgcgttcgcagccacaggcagtaaacgaagcggtaccaggagccgatcgctttgcggtggcgcggcagcgactggccgccagccagcgcgcttacgctgatgaggacctggctcaagccaaaaagcttgcgctctcgtcctatctggatggtgtagagccgcttgaacccacgctggccacgcgcaatccgtcattgctgcgagagatcgagacggccatggcaggctaccgcgcgcagctggatcagcatgcgcccgcggctgacgttgccgggcaggcagcgcaaattgcccagctgtttgatcgcgcggacgtggcgctgcaggacacccgaataggcgccagcaccgcgtttctaggcagctttaccatcttggtacgcgaaggactggaagcgctgctgatcgtgattggtatcgtggcgttcttgcgtaaagccgagcggtctgatgtgttgccgtatgtgcatgcgggttggatctgcgcgttgttggcaggcgcagctacctgggcagtggccacttactttgttgatatcagcggtgcgaaccgggaagtcactgagggcgtctcggccttgttcgctgccgctgtcctgctcagcgtaggcatctggatgcaccaaaagagccttgcagggcggtggcaggagtacctgcacgccaagctgacgactgcgctgacacggcgctcggctgttttcctgttcatgctggcctttgtcgcggtgtaccgcgaggtgtttgagacgatcttgttctacatcgcgatgtggagcgatcaggcgtccaccgccatcctcgcaggcctggtggcgggaatcgcggtgttggctgcggtggcgtactggatgctgcgcatgagcaggcggctgccgattggccggttcttttcgatcagctcgattctcatcgcggtgatggcggtcatcctgatcggtaaaggcgtggccgcgttgcaggaagcgggctggatctctcaaacaccgctcgcgttgccgcgcatcgagtggatcggcctgtatcccacctggcagtcgctgctggcgcaggtattggtaggcaccgccgccatcgtggggttcctcgccaatgcccgttccggtgtgcgtagacagccaggcgcaaacaagcaatga

SEQ ID NO: 494225 - DNA, 618 bp, Stenotrophomonas maltophilia
atgagtgattgcgggtgccaccacgaagccaagaacaaggaggagcgacgcatcctctggatcgccttggtcctgaatgcagcgatggccgtgatcggcggcattgccggctggattgcccattccaccgggctgctggctgacgcgctggacatgctgtctgacgccaccgcctatgccattggcctggtcgctatcgggcgcacggcgcgcttcaaggccaacgccgcgtgggtcagtggcagcgtgctgctggtgctgggcgtaggcgtgctggtcgaagtcggccgccgggtgatgtacggcgccgagccggtcagcggttggatgatcggtaccgctctggtctcgctggccgtgaacctgaaggtgctccgtatgctcgcccccttgaagtctggcgaagtgcatctgcgagcgacctggctgtttacccgcgccgatgtggtggccaacgttggggtgattctggccggcctgttggtgtggtggctggccagcccctacccggatttcgtgatcggcgccctgatcggcctgtatgtgatcaaggaggctttcgagatcttgggtgatgctcgccgggcgcgtgccgacgcgcgcaaaacgcctgcatga

SEQ ID NO: 494226 - DNA, 1278 bp, Stenotrophomonas maltophilia
atgcatgtgcgattggcggccctggccgcgtggctactgttgagcgcggcggcaacgccggcgacagcagaagagctgatgaccttggacgacgcgtttgcacgcgtggcccaaacccaccccgagctgcgcctggtcgatgcgcgagccacggtgctcgctgccgagcgcgaccaggccgtgcagcggccaccgtggacgttgggggcggaggttgaaaatgcgctgggcacgggcgcggcccgtggcctggacagcgcggagttgaccttgagcctgagctcggtcctggagcgcggcggcaagctcgacgcccgccgcaccttggcccaaagccggattgatgcactggccgtgcagcgcgagaccgggcggctggacctgctcgccgagacggcgcagcgctatttggccgttgtcggtgccgaccggcaacgcagcctggcgaacatggatgtcggccagcgccagcggaccgtcgccgctgcccggcagcgcctgcaggctggcgcgtctcccgaatcggtgatgctcaccgcacaagcagcactggcgagagcagaattgacccgtgatcgggccgagcagcagcgcattgccgcccggcagcaccttgctgccctctggggcgaacgtgctccgagcttcgaggtggccgcggcggatcccatgaccctgccggcgatcgcgtccatgcagtcgctggccgaggaattggagcgcactcccgagttggcgcagtttgccgatgcccgccggatcgcgcaggcacgactgcagctggcgcgttcggcggcctcgccggacttgtcgtggcagctgggcgtgcgccgcctgcaggagactgacgacaccgcgctggtggccagcctgtccatgccactgggcagccgcagccgcgcgcagccggagatccgcgccggcgaagccgagctggaggttctgacgatcgagcgcgaggccaagggcctgtcgctgtattccacgctggtcgaagcccatggtcgctacaccgtggcgcaggccgaggtggcacggctgcaaggcgaggtgctgccgaagttggcccgggctgagcaggccgccgagcgcgcctatcgcgccggcgcgatcagctacctggaatgggcacagctgcagtccgaacgcacggccatggcccagcagcagctggacgtggcgctcgatgcgcagcgcgccctgatcgaaattcaacgcctgaccggccaggcgcttgtcgcgccgccggcggctgcttccaccggagagaccccatga

SEQ ID NO: 494227 - DNA, 951 bp, Stenotrophomonas maltophilia
atgaatcgcttttcctggaccgcactgggcatggccctgatgatgctggccgcctgcaacgcgtcggcccccaacgaagcgtccgaaggcggcgccgccgctgagggcgaagagcacggcgagcacgaggaagcgccgctggaaaccaagattgccgccaaagctgcgcaggcagcgggtatccaggtcgcaccggcaggccccggtgagattgctgacgagcatcaggtgcaagggctgttgaccccgattgacggtcgcatcgcgcaggtcacggcacgcttccccggaccggtccgctccgtgcgtgcgggcgtgggtgatcaggtacgggccggccaggcactggccacggtagagagcaacctgagcctgaccacctataccgtcaccgcgccgatcagtggcgtggtcatggcgcgcacggccgccgtaggcatggccgccgctgagggcgcgccgctgtttgaggtcgccgacctgtccacgctgtgggtggacctgcacatcttcggcgccgacgcccagcacatcggtgctggcgtgccggtgacggttacccgcttgagcgatggcgtcaccgcacagaccaccttggagcgcgtcctgcccggcaccgccaccgccagccaaagcaccattgcgcgcggcacggtggccaacaccgatggcctgtggcggccggggtcggcggtcaaggcgcgggtcaccgtggatcgccaatcggcagcgttggtggtgccgatcacggcgctgcagaccgcagaagaccaggacgtggtctacgtgcagcagggcgaaacctaccacacccggccggtgaagctggggcgccgcgacgccgaacgcgccgaagtgctggaaggcctcaaggccggtgaacaggtggtggtggcccaaagcttcctgatcaaggccgacatcgaaaagtccaccgtggaagaagaatga

SEQ ID NO: 494228 - DNA, 3192 bp, Stenotrophomonas maltophilia
atgctcgaacgcctcattgggctgtccatccgccatcgctggctgacgctagtgctcaccgctgcgctggttgcgctgggcgtgtggagctaccgtcacctttccattgacgccacacccgacatcaccaacgtccaggtccagatcaacacccaggccccgggttactcgccgctggaggccgaacaacgggtcacctttgccatcgaaacggccatggccggtctgcccaagctggactacagccgctcgctgtcgcgctacgggctttcgcaggtcaccgtcgtcttcaaggacggcaccgacctgtactttgcccgccagcaggtcgccgagcgcctgcagcagatcgcctcccagcttcccgaagggttggacccggaaatggggccgatctccaccgggttgggcgagatcttcatgtacaccgtggaggccgagcccaacgctcgcaagcccgacggcaccccgtacacggccacggacctgcgcaccctgcaggactgggtgatccggccgcagctgcgcaccacgcccggcgtcaccgaggtcaacaccatcggcggcttcgagcggcagatccacatcactcccgatccagctcagttggtggcgctgggcttcacgttgaacgacgtggtcgccgcggtcatgcgcaacaaccagaacatcggcgccggctacatcgagcgcaacggacagcagttcctggtgcgcgtgccgggccagctagccaatctggaggcaatcggcaacatcgtgctggaccggcgcgatggcgtgcccattcgggtgcgcgacgtcgctagcgtgggcgaaggcaaggagctgcgcacgggcgcggccacccagaatggccacgaggtcgtggtcggtaccgccttcatgttgttcggcgccaacagccgggaagtctcccaggcggccgcggccaagctggatgccgccaacgccagcctgcctgccggcgtccatgccaaggccgtctatgaccgcaccgcactggtggatcgcaccatcggcacggtgtccaagaacctgatcgagggcgcgctgctggtggtggtggtgctgttcctgctgctgggcaatgtacgcgcctcgttgatcaccgcggcggtgatcccgttggcgatgctgttcaccatcatcggcatggtgcgtggcggcgtgtcgggcaacctgatgagcctgggcgcgctggacttcggcctgatcgtggacggggcggtgatcatcatcgagaactgtctgcgccggttcggcgaggcgcagcacgcgctgggccgccagctcaacgatgaagagcgctatgacctgaccgcctcggccaccgccgaggtgatccgtcccagcttgtttggcctgggcatcatcgccgcggtctacctgccgatcttcgcgctgtccggggtagaaggaaaaatgttccacccgatggcgatcacggtggtgctggccctgaccggcgccatggtgttgtcgctgaccttcgtgccggcggcgatcgccagcttcctgcgcggccgtgtggctgagcacgacaaccgcctgatgcgctggtcgcgtgcccgttatacgccgctgctggattgggccctgcgtcggcgcgtggtggtgctggccggcgcggccgtgctggtggtgggctgtggcgtgctggccacccgcttgggttcggagttcgtgccgagcctggatgagggcgacatcaccttgcagcccatgcgtattcccggcaccagcttggagcagtcggtggccatgcaggaaacgctggagaagcgcctggcccagttcccggaggtggccaacatcttctcaaagatcggcaccgccgaggtggccaccgatcctatgccgccgtcgatggccgacaccttcctgatgctcaagccccgcgaccagtggcccgacccgcgcaagcccaaggccgagctggtggaagagctggaggcggcggccaaggaaatcccgggcagcaactacgagttcacccagcccatccagatgcgcaccaacgagttgatctccggcgtccgttcggacgtggcggtcaaggtctacggcgacaaccttgaccagttgacgcgcctggccagccgggtcgagcgggtcatgcgtagcgtccccggcgccgaagacgtcaaggccgagcaggtctccggcctgccgctgctgaccatcatgccagatccggcggcattggcacggtatggcctgaacccgggcgatgtgcaggaaacggtggccaccgccattgggggcagtgttgccggccagttgatcgagggcgaccgccgcttcgacctggtcgtgcgcctgcccgaagcgcagcgccaagaccccgctgtgctggcagatctgcccattccgctgccggcaagcaccagtgtcgatgagtccagccgtctggccgccggcgccaatggggggcctcgcacggtgccgctgcgggaagtggcgaagatccaggtagagcgcgggcccaatcagatcaaccgcgagaacggcaagcgccgcgtggtgatcaccgccaacgtgcgcgagcgcgatctgggcgggttcgtcggcgagttgcgcacacgcatcggccaggatgccgcgcttccagagggctactggatcgattacggcggcaccttcgagcagctgatctcggccacccaacgcctgggcgtggtcgttccggtgacactggcgttgatcttcgctctgctattcatggccttcggctcggccaaggatgcggccattgtgttcagtggcgtgccgctggcgctgaccggcggtgtgctggcactggctctgcgcgggattccgttgtcgatctctgccggtgtgggcttcatcgcgctgtcgggcgtggccgtactcaacgggctggtcatgatcgccttcatccgccgtctgcgcgaacagggcgatccgctagacgacgctgtgcgcgacggcgcccttggacgcctgcgaccggtgttgatgaccgccctggtagcctcgctgggcttcctacccatggccttgaatgtcggtgctggctcggaagtgcagcggccgctggccactgtcgtcatcggcggcatcgtctcatccaccgcattgaccttgttggtgctgccggtgctctatcgttggctgcatcgcgaccgagctccccgcgccggtagcactgctttggagtccccatga

SEQ ID NO: 494229 - DNA, 276 bp, Stenotrophomonas maltophilia
atgaacgagctcaacctggaacaggtccgtgcggcgatgtttaccgacccgggcgtgaaagcggtggacgacctgcgcctggtcgccggtgagcatggccgtgcgatcgcggccaccatcacggtcgcggcgccctcggtcgacctggacctggtacatgctgtgattgcccaggtcctggccgatcaattcggcatcgatcagatcatgctgtgtttcaacgacccgggcccggtaccgccgccgcccaccgcggcgccgttaaagaagatgtga

SEQ ID NO: 494230 - DNA, 1098 bp, Stenotrophomonas maltophilia
atgtccagcgtgccatcacctaaccgggtcctgctctcggcagccggctcggtcaagaccacgttgctggtccggcaggccttggagcgacctgggcgccgcatcgcgattgtcacctacacgctggaaaacctagaagagatccggcgctcgtttgaggcccacgcaggcgcggtccccgcgcatgtcaccttgcacagctggtatggctttctgctgcgccagtgcattcgcccgtaccaagctgcgctttgccctgagcctcgcatcgagaccatcctgttcgtagaaggtgtcaccaacaaccgcgccccacgcacccaggtggcgcgccactacctggcgggcaaccggatgtattcggaccgagcggccgatttcgctgtgcgctgcgatgagctgacccaaggccaggtcgtggcgcgattggcggcgatgtacgacgagctctacatcgacgaagtccaggatctggccggctttgatctggatctggtcgaacggctgttgaagagcgagattgccatcacgttggtaggcgatacgcgccaagccacgtatgccaccaactatgcgcaaaggtacagccaataccgtggtccgaatctggcagcgctgtttcagatttgggaggccgacgacttatgccggctggatcaccgcctcaccagtctgcgctgcgtccaggccctgtgcgatatggctgacacgctctatccgcagatgccgcggacccaatcaggcaatggcgaggtcaccggacacgatggcatctacctcgtcgctccaggggatgtggccgcgtacatgcaggagttcgcccccaccgtgctccggcatgaccggcggcaggcgtgcgacggactgccggcggtgaactttgggcagtgcaagggccgcacctacagtcgggtcctcatctttccgaacgggccgttgacgcagtacctgcgcacggccgatgcagcgcgtatcaccgcgccgccgaaatactacgtggccttcgcccgggcgcggcaaagcgtggcctttgtgtatgccggcgcgtgcgcgttgccgggtcatcagctctatgcgcctgccagcgcagacgcatag

SEQ ID NO: 494231 - DNA, 1581 bp, Stenotrophomonas maltophilia
atgccgatcgaacgtatcgtcatcgacaacttcaagtcgtttcgccatctggacctgcccctcaatgcccacatgaacctggtggtgggcgacaacgaggtcggtaaatccaccctgctggaggccatccacgcggtggtcaccggccagctgcatgggcgcaatcttgcctacgagctcacgccctacctgttccaccagcccatggtgcaggagtacttgggagcgcttgccacgggcacgccggcctcgccgccacggatctccatcgaagcctatttgggcgccgacgccgcgctggcgtcgttacgcggcaccaacaactccctgcgtctggataccgccggcatccggctgctggtcgagctcaacgacgactaccgcgaggagttcaacgcctacctgcagcagcaccagggcgcggtcagcctgccggtggagtactacacggtgcgctggtactccttcgccaacaatggcgtcaccgcccgtagtattccgttcgactcgaccatcatcgacacgcacggcatcaagaccttgtccggtgccgatcgctatatcgccggcatcatcgagcaggcactgacgcctgcgcagcgcgtctcgctgtcgctgagcttccgccgcatgcggcagagcttttccgaagaagcggatgtggcagcgatcaatgcctacttgaccgagcacaccggggacatcagccacagggcattgacggtaggcgtggacacatcgccgcgctcaacgtgggaaaccagcctgtcaccctacctggatgagctcccgttcatccaggccggcaagggcgagcaaagcgcggtgaagatgaagctggcgatgcacgcggccggcgcggctcacgtgctgctgatcgaggagccggagaaccatctgtcctattccagcatgacccagctgatcgacaagattgcggcccactccaccgcccagcaggtgatcatcgccacccacagcagcttcgtgttgaacaagctgggcgtggacaacgtgatcctgttcagcgcgcaaggccagatgaagctggaccagctgcccagcgatacccacgactatttcatgaagctgccgggccacgacacgctgcggttgatcctggccaagcaggcgatcctggtggaaggcccttccgacgaactgatcgtgcagcgtgcctacagtgaccatcacggcgtggcgccgatggctcacggcgtagacatcatttcggtcaagtcgttggcattcaaacgcttcttgcagattgccgatcgactgaggattcaggccaaggtgatcaccgacaacgacggtgatatcgcagttgtgcaagagcgctatgccgagcacatcaacgcgatctattacgattccgacgagagcgccccttcgctggaagagcagctgatcaaagccaactcgctggccgaactcaataccgtgctgggcaaggcctttgccgatgaggtggcgctgctcaagtacatgaagggccataagaccgatacggccttggcgattttcaatagcccgcactcgatcaggttcccggactatgtccagcgtgccatcacctaa

SEQ ID NO: 494232 - DNA, 1053 bp, Stenotrophomonas maltophilia
atggcgcgcgcaggactctataagagtgacgtccagaaggcgcgcgacgcgctgctggcccaacgcaagaagccgtcagtcgacgcggtgcgagtggccttgggcaacacgggctccaagaccacgatccaccgctacttgcgtgaactggaaggagaggaaggcggcggtccggcgaggacggtagccgttagtgatgctttgcaggacttggttgcgcgcttggcctcgcggctccaggaggaagcagaggccatcctcacccaggagcgtgagcgccatcaggctgagctccacagtcggcaacaggcgctttccggtgcccaagaggaggctgccgccttgagcagtcggctgcagcgcaccgaagcaagcctgcaccaagagcaagctgctcacgccctccttcaacagaatctaggtgacaggatcgcggaaatcgcccagttgaacgagcgcatcgctggcatgacggtgcggctggctgatcatgaggcgcatacgcgttctctggaggacaagcatgcccatgcccgggaagcgcttgagcactaccgcacttcaaccaaagagcagcgtgagcaagagcttcgccgtcacgagcatcaggtccaagagctgcaagtagccttacgtcaggccaatgaagccttgggcgcgaagaatcaggagctgttggtgctgaaccgcgacaatggtcaatggctggagcgccacgggcggattgagcgtaagcttgcccagctacgacaggcccacgaaggccaacacagcgaggtcgtggcgttgcgccagaccgcgacggactatttggcactgcaggagcgctggaagactgacgccaagaccttggataccatgcgcaacgagctagctcaagttcaagacacccttgcgcgggagcgtgagcgccgcgagagcgctgaagccgatgcgttgcgtgccaatgcacgtcttgaagcgctagagcctctactgaatcaactgacgccagcacaaaatgcggtgaagaaaactcggcgcggccatgcgcaagatgggggagccgactga

SEQ ID NO: 494233 - DNA, 741 bp, Stenotrophomonas maltophilia
atgacgccatctggggtcgccagcatcgaggagttgggccttcgtggcacccttttcctagccgcactgttagccgcgcagctacgacgcctaccggtggcgcccacacgccgctccaccttgctggtgctggacacgctgcgagacttggccttgatccaagttccctggccagcggatcgatggcagatccgccccgatgccgaggtcacgcccatcgaagatctgcaatgggctttcgcctggtctacccacgagcgcaggcacctgctcccggtgctggaagaccaactcggcgatatggcacacgatgtagacttggcggacgcgaaactggagctgtgggatgaacttgcactctgggagaccgagcagtttctggagcagcaattgctcaaacatcacttcgacccaggctgggcacgtgatgtggggttcgtctttcaatccggaccgcggggcttgccgatcgcgcggtggcgttactgctgctgggcggcggtacgccaaggtgcctcggtggcgatgcgtcttggcgtgcacgacagcgcccatgtgcgggaagccatctttcaggaggtccagaagcgcctgcgctacctgatgaccagttcgcccgagcaaggcatgttcaagccctatcatttggcaccggagtcctcagtagccaaactgtttgtagattgggtcgtccctatggaatgggcgtactggacaggtgagcgccaccccagccgctag

SEQ ID NO: 494234 - DNA, 1200 bp, Stenotrophomonas maltophilia
atgtcgaccctggcttctcccgcaacgacctcacgcccggtggctcccggcgtgctggccgccatctccacctcgcatgtcgtcaacgacatgatgcagtccctgatcctggccatctatccggtgatcaagggcggcttcaacctcagcttcacccagatcggcctgatcacgctgacctaccagctcaccgcgtcgatcttccagccgttgatcggcatggccaccgaccgccgcccggcaccgtactcgctgccgatcggcatggccttgaccctgtgcggcatgctgctgctcggctttgcgccgaactacgcggtggtgctgatggctgcggccatggtcggcattggttcggccatcttccacccggaggcctcgcgcatcgcccggctggcttcgggtggccgtcatggcttcgcgcagtcggtgttccaggtgggtggcaacttcggtaccgcgctggggccgttgatcgctgcggccgtgatcgtgccgtatggccagcatgccgcatcgtggtttgccggcgccgcgctgatcggcatcgcattgctgacctatgttggtcgctggtatgcactgcacctgggcacaccgcgtccggccagcaccgcgtctatggccccgcggcatccgccgcgcaccgtggccaaggtgctggcgatcctgctggtgctgatcttcagcaagtacttctacatggccagcatcggcagctacttcaccttctacctgatccaccatttcggcattccagtggcacaggcgcaactgcatctgttcgcgttcctggtggcgtctgccgccggtggtttcctcggcggcccgctgggtgaccgcatcggacgcaagccgatcatctggacctcgatcctcggcgtggccccgttcgcgctgatgctgccgcacgccgatctgctatggaccacagtgctggcggtgctgatcggcttcgtgctctcctcggcgttctcggccatcgtggtgtacgcgcaggagatgatgccgcaccgcatcggcatggtgtccggcctgttcttcggctttgccttcggcatgggcgggcttggcgcggccgtgctgggcatgctggcagacaggaccagcatcgaatacgtctatcagctgaccgcgttcctgccgctgctcggtatcgtcgcagcgtggctgccaccgtcgcggcctgctgctcactga

SEQ ID NO: 494235 - DNA, 798 bp, Stenotrophomonas maltophilia
atggcatatcgcaaaaaggacactccctgcccgatccgcgagaccgcgccgtggaacgaagtgccggtacaccgcccggtgaccagccgcgcccggcactacccgcccggtacccacatcgcgccacaccggcatcgccgtcaccaactggtcttcgccatgtccggcctgatggtggtgcgcgcagacggtggccgctgggtcgtgccctccacccgcgcgatctgggttccggccggcatggtgcatgcggtggactgcatcgccgaggtgcacatgcgcagcctgtacgtggaaccggactttgcaccgcaactgccggatggcgcgttcgcagtacaggtggcgccgctgctgcgcgaactgctgctggctgccagcctgatcgagtccgcgcacgtggacgacagccgcgacggtcgcgtggtgcgcctgctgctggacgagctgcaccgcatggacgtgctgccgctgcacctgccctcgcccaccgacccgcgcctgcagaggatctgccagcacatccagaagcatcccgccgacgacgccacgctgcaggactgggcccaggccctgcaggtggacgtgaagaccatccagcgccatttcgccggcgaactgggcatgaccttcgggcagtggcggcagcaggcgcgcctgctggccgccctggagcggctggcagtcggcgacaaggtcatcgatgtggcgctggcgatgggctacgacagccccagcgcgttcaccagcatgttcaagcgccaactggggcagacgcccgcggcgtttttccgctga

SEQ ID NO: 494236 - DNA, 1125 bp, Stenotrophomonas maltophilia
atgagcaagcgcgattactacgaagtgctgggcgttgcccgcaccgccaccgacgacgagctgaagaaggcctaccgtcgctgtgcgatgaagttccacccggaccgcaacccgggtgatgcggcggccgaagcctccttcaaggagtgcaaggaagcctacgaagtgctgtccgatggcaacaagcgccgcatgtacgacagccacggccacgccgcgttcgagcacggcatgggcggtggtggtccgggcggcccggacatgaacgatatcttcggcgatatcttcggcaacatttttggcgggggcggcggtgggccgcgccaggcccgtcgcggcgccgacatcggctacgtgatggagctggacctggaagaggcggtacgcggcgttgagcgccgcatcgagatcccgaccctggccgagtgcggcgactgcgatggcagtggctccgaagacggcaaggtcgaaacctgcaatgtgtgccatggccgcggccaggtgcgcatccagcgcggcatcttcgccatgcagcaggcctgccacaactgcggcggccgtgggcagatcatcgccaagccctgcaagacctgccacggcaacggccgtgtcgaggaagacaaggtgctgtcggtgaaggtgccggcgggcgtcgataccggcgaccgcatccgcctgcagggtgaaggtgaggccggtccggccggtacgccgccgggtgacctgtacgtggaagtgcgcgtgcgcgagcatgcgatcttccagcgcgatggcgacgacctgcactgcgaagtgccgatccgcatctcgcaggcagcgcttggcgacaccgtacgcgtggcgaccctcggcggcgaagcggaaatccgcatcccggccgagacccagaccggcaagctgttccgcctgcgtggcaggggcgtgcgttcggtgcgcagccgcagcgagggcgacctgtactgccgcgtggtggtggagaccccggtcaacctcaccaacgaacagcgcaagctgctggagcagttcgaagccacctttgtcggcgaggaagcacgcaagcattcgccgaagtcggcgacgttcatggatggcgtgaagggcttctgggaccggatgacgtcctga

SEQ ID NO: 494237 - DNA, 1923 bp, Stenotrophomonas maltophilia
atgggcaagatcattggtatcgacctcggcaccaccaactcgtgcgtggcgatcatggacggcggcaaggcccgcgtcatcgagaattcggaaggcgatcgcaccaccccgtcgatcgtcgcctacaccaaggacggcgaagtcctggtgggcgcctcggccaagcgccaggccgtcaccaacccgaagaacaccttctacgcggtgaagcgcctgatcggccgcaagttcaccgacgccgaagtgcagaaggacatcgcccacgtcccgtacggcatcctggcccatgacaatggcgatgcctgggtgtcgaccagcgatggcaagaagatggccccgcaggaaatctcggccaaggtgctggagaagatgaagaagaccgccgaggacttcctcggtgagaaggtcaccgaagcggtcatcaccgtgccggcctacttcaacgacagccagcgccaggcgaccaaggacgccggccgcatcgccggcctggacgtcaagcgcatcatcaacgagccgaccgcggccgcgctggcctatggcctggacaagggcgacaacaaggatcgcaagatcgtggtgtacgacctgggcggcggcaccttcgacgtctcggtgatcgagatcgccaacgtcgacggcgagaagcagttcgaagtgctggccaccaacggcgacaccttcctcggcggcgaagacttcgacaaccgcgtcatcgagtacctggttgaagaattcaacaaggaccagggcatcgacctgcgcaaggatccgctggccctgcagcgcctgaaggacgctgccgagcgcgccaagatcgagctgtccagcgcccagcagaccgaagtgaacctgccgtacgtcaccgctgacgcctcgggtccgaagcacctgaacatcaagctgacccgcgccaagctggaagcgctggtggaagacctgatcaagaagtcgatcgagccgtgccgcgtcgccctgaacgatgccggcctgcgttcgagcgacatcagcgaagtgatcctggtcggtggccagacccgcatgccgaaggtgcagcaggcggtgaccgaattcttcggcaaggaaccgcgcaaggacgtcaacccggacgaagccgtggcactgggtgctgcgatccagggcggcgtgctgggcggcgacgtcaaggacgtgctgctgctggacgtgaccccgctgtcgctgggcatcgagaccatgggcggcgtgttcaccaagatcatcgagaagaacaccaccatcccgaccaaggcctcgcaggtgttctccaccgccgaggacaaccagtcggccgtgaccgtgcacgtgctgcagggtgagcgcgagcaggcccgcttcaacaagtcgctggccaagttcgacctgtccggcatcgagccggccccgcgtggcctgccgcaggtggaagtgtccttcgacatcgacgccaacggcatcctgcacgtgtcggccaaggacaagaagaccaacaaggaacagaaggtcgagatcaaggccggttcgggcctgtccgaggaagagatcgcacgcatggtcgccgacgcggaagccaaccgcgaagaagacaagaagttccaggagctggtgcaggcccgcaaccaggccgatgccctgatccacggcacccgcagtgccatcaccgagcacggcagcaaggtcggcggcgatgtcatcggcaaggtcgaggcggccctggccgacctggaaaccgcgatgaagggtgacgacaaggcacagatcgaagccaagtcgaaggtgctggaggaagccggccagtcgctgttcgccgctgcttcggccgaccagggcggtgccccgggtgccgacgccggcaacgccggcaaggcgcaggacgacgtggtcgacgccgagttcaccgaagtcaaggacgacaagaagtcctga

SEQ ID NO: 494238 - DNA, 516 bp, Stenotrophomonas maltophilia
atgaaccacgaacatccagatatcgaatcccagcagactgccgccgatgcggccgccgccgccggcgtcaacgacgaagtggagcgcctgcgcgccgaggtcgagcagatcaaggccgatgcgctgcgtgagcgcgccgacctcgagaaccagcgcaagcgcgttgcccgtgacatcgagcaggcccgcaagttcgccaacgagaagctgctgggcgagctgctgccggtgttcgacagcctggatgccggcttgaaggcggccggcgatgacccgcatccgctgcgcgagggcctggagctgacctacaagcagctgctgaaggttgccgccgacaacgggctggtcctgctggacccgatcggccagccgttcaacccggaacaccaccaggccatcagccaggtgccggccccagacgccgccccgggcagcgtggtgaccgtgttccagaagggttacctgctcaacgagcgcctgctgcggccggcgctggtggtggtggccgccgactga

SEQ ID NO: 494239 - DNA, 1065 bp, Stenotrophomonas maltophilia
atgcacggttctcccgaccagcttgccccgcgtgcgcgccatctgctgcgcacgctgatcgcgcgttacatccaggacggtgagccggtcggctcgcagacgctggcgcgcgtggccgggctggaggtcagcccggccaccatccgcaatatcctgggtgacctggaagacctggggctgctggcttcgccgcacacctcggcagggcgcgtcccgaccgcacatggctaccgggtgttcgtcgacagcctgctgcagatgcagccgccgggcgaaggcgagctggcccggctgcgccaggaactggccagcggcggcagcacccaggccctgcttggcagcgcctcggagctgctgtcggcgatgagccacttcgtcggcgtggtcagcgccccgcggcgcgagcagttcgcgttccgccagatcgatttcgtggcgctggacgggcgccgggtgctggcgatcctggtgttcgccgacaacgaggtgcagaaccgggtcatcgagacccgccaggagttcgcgccgggccagctggaacaggtcgccaactacctcaacgcgcatttcgccggcctgccgatggccgagatccgcacccgcctgctgctggaactgcgtgatgcccgttcggagctggagcagctgctggcgcagagcatcgagctggccgagcaggccctgcagccggcggccgatgacatgctggtggccgggcagacccgcctgatgggggtgcaggacctgtccgacctggagcggctgcgcgagctgttcgagctgttctccagcaagcgcgagatcctgcagctgctggagcgcaccatccaggccccgggggtgcgcatcttcattggcgaagagaccgggatgatgccgttgcagggggtgtcgctggtcaccgccccctataccgccaatggccaggtgctgggcgtgctgggcgtgatcggccccaagcggatggcctacgaccggatgatcccgctggtccaggctactgccgatgtactcggcgcggcgttttcgccagccgggcgcactcctggaacatccgacgcttga

SEQ ID NO: 494240 - DNA, 1662 bp, Stenotrophomonas maltophilia
atgctcagacatctttcgatcaaggatttcgccgtcgtccgcgccaccgaactggagttcgggccaggcatgaccgtggtttcaggcgagaccggcgccggcaagtcactgatggtcgacgcgctgggcttcctgtccggcctgcgcgccgacagcggcgtggtccgccacggcgccgcgcgcgccgagctgtcggccgagttcgcgctggatcagctgcaggccgcgcgccagtggctggccgacaacgagctggacgacgaagaacaatgccaactgcgccgcgtgatccgtgccgatggcggatcgcgggcctggatcaacggccgcccggtgaccctggcgcagctgggcgacctggcctcgctgctggtggagatccacggccagcacgagcagcaggccctgctgacgcgcccttcgcagctggccctgctggatgcctatgccggcaacgaggacgagcgccgccaggtgcgccgcgccgctgcggcctggcaggccctggtcgatgaatcgctggcgctgtcgcaacagggcgacgtcagtgaccggatcggcttcctggagcaccagctgcgcgagctggaccgcgaggatctggaacccgaatcgattgccgcactcggtgccagccaccgtcgccaggcccacgccagcgccctgctgggtgcctgccaggcggccagcaaccagctcaatggcgacgacggcagttccgcgctggacctgctgcagcaggtgcgccacgagctgtcgcgcctgatcgaacacgacccgcgcctgggcgaggtggacggcctgatcgaaaacgcctcgatccagctgcacgaagccctgtcgctgctggaccgcgtgcatgacgacctcgacgccgacccggaacagttcgaggagaacgagcgtcgcctcggccgcctgcacgacctggcccgcaagcaccgtgtgccgatggacgaactgggcgcgcagcgcgagcgcatgcacgccgaagtggaacagctgcgtggtgctgacgaacgcctgcagcgcctcgccggcgagatcgacaaggccgctgcggcctggcgagtgcaggccgggctgctgaccgccagccgccgcgccgccgctgccgagctgtcggccaccaccaccggcatcatcgccgagctgggcatgggcggcggccagttcctgatcgagctcgaaccgcaggacgccggcaagcccgacccgcagggtgccgagcgcgtggaattcctggtggcggccaatgccggacagccaccgcgtgccctgcgcaaggtggcctcgggtggcgaactgtcgcgcatctcgctggccatcgaagtggccgcgctggacctggatgcagtgccgaccatggtgttcgacgaagtcgactccggcatcggcggcgcggtggcggacatcgtcggccagaagctgcgcgccctcggcgagaagcgccaggtgctgtgcgtgacccacctgccgcaggtcgcctccaagggccatgcccattaccgggtcagcaaggccccggtggaaggcatgacccagagcgcagtggaaaagctggacagcaaggcgcgcgaggaagagctcgcgcgcatgctcggcggcgtggaagtgagcaaggaagcgcgcgccgccgcacgcaagctgctgcaggtgtaa

SEQ ID NO: 494241 - DNA, 918 bp, Stenotrophomonas maltophilia
atggcgcgacccgacatcaaccgatccggcgaactggaagtgttcgtgagggtgatcgagaccggtggcttctccgccgccgcccgcaccctggacatgacgccatcagcagtgagcaagctggtggcccggctggagcagcggctgggtacgcgcctgctgcaacgctccacccgccagctgcagctgaccccggaaggctgtgcgttctacgagcgcggcctgcgcgtgctggccgacctggaggaggccgagcgctgtgccagtgcccatgccgagccgcgcggacggctgcgggtaaactccaacgtgccgttcggccagcatttcctgctgccgctgctgccggcgttcctcgaacgcaacgcgcaggtaggcgtggacctgaccctcaatgacgaagtgatcgacctgcttgagcagcgcaccgacgtggcggtgcgggccggtccactgaagagctccagcctggtggcgcggcggctgggtgcgacgcggatgatgatcgtggctgcaccggcctacgcgcagcggcacgggctgccacgcactgccgaggagctgcagtcgcacaaccggttggatatcggccatgcgcgcgcgatgcagggctggccgttgctgcaggacgggcgcgaacgcatgctgctgcccagtggcaacgcgcgcgccagcaacggcgatgcgctgcgccagctggtgctgggtgggctgggcatggcgcggctggcagcattccaggtgcagcaggatattgccgccgggcgcttgctgccggtgctggaggacgccaatcccggtgacctggaagaggtgcacgcggtgttcctggggcagggcggctacctgccgctgcgggtgcgcgcgtttcttgatttcctggtggagaacgtcgatctgacgcagccacaggggtag

SEQ ID NO: 494242 - DNA, 1308 bp, Stenotrophomonas maltophilia
atgaaccgcttgagccagctcaccgccaccgccctgctcgccctgtccagcgtcgccagtgccgcatccgccccgcactgggtcgccagctggcaggccagcccgcaaccggtctgggacgcggatttcctgttcccgaccctggttccggccacgctgcaggaccagaccttccgccagaccgcgcgcatcagcctgggcgggtcccggctgcgggtgcggctgagcaatgcctacggcacccagccgctgcggatcggggcggccagcgtggccgcgggcgcgggcgccaccccgcaaccgctcagcttcgacggccagcctggggtgttgatcggtgccggtcaggaacggctgagcgatccgctggcggtggccacggaagaccaccaggcgctgcaggtcagcgtcttcgtgccggggccgacgccggtgcagacgttccattgggacggccgccagaccagctggatcgccggcggcaatcaggcccgggcgcgcgacctgcagggtgccagttccactaccgcacgcctgttcctcaccgggatcgaggtcgaggccgccgccagtgcgcgtagcgtggtggtgattggcgactcgatcaccgacggcgccaccgccagcctcgaccaggaccagcgctggaccgaccatctggccgcgcgtctggcaccgcgcggcgtcgcggtggtcaacgcgggcatttccggcaatcggctgctgagcgacggcatgggcgagtcggttctggcccgcctgcggcgtgacgcactggatcagcccggcgtcgccagcgtcatcgtgctgatcggcatcaacgacatcagctggcccggtactgccttcgcccgcgcgcagccccggcccagcctgcccgagctgcaggccggctatcgtgccctggccgaacaggcccaccggcggggtctacgcatattcggcgccaccctgatgccgttcgcgggcgccctgcccggcacgccgctggacgactactaccacccggacaaggaggccctgcgccaacagctcaatgcatggctgcgcagcaacagcccgttcgacgcggtgatcgacctggacgcggcgctgcgcgacccggccgatccgtcacggatggccgccgcctacgactccggcgaccacctccacccgggggatgccggcaaccgggcgatggccgaggcggtggacctggagatcctgcttggttgcaaggggtcagagccctttgctggcgcaaagggatcagaccccgcagagcgcccggggccggccccctttcctggagggaaagggccctga

SEQ ID NO: 494243 - DNA, 417 bp, Stenotrophomonas maltophilia
atggaaacccacgacctgcgtaaagtcggcctgaaggtgacccatccgcggatgcggatcctggcgctgctcgaacagcgcaatgcccagcaccaccagcaccacatgaccgccgaggacatctaccgccagctgctcgagcatggcgacgagatcggcctggcgacggtctaccgggtgctgacccagttcgaggccgccggcctcgtgctcaagcacaatttcgagggcggccaggccgtttacgagctggaccgtggtggccaccacgaccatatggtcgacgtggacagcggcaagatcatcgaattcgaaagccatgagatcgaggagctgcagcgcaagatcgcggccgatcacggctatgagctggaagaacactcgctggtgctgtacgtgcgcaagaagcgcaagtag

SEQ ID NO: 494244 - DNA, 393 bp, Stenotrophomonas maltophilia
atgcgcaatctcctgttggtcgccgccgtcgccctgtccaccaccgggtgcggcatcatctacaagcaacccatctatcagggcaacctgatccgggaagatgccgtggccaagctgcaggtcgggcagagcaagcagcaggtcaccgcgctgctgggcaccccgtccatccccgacccgttccacgcccagcgctgggactacacctccagccagcgcgtgaaccgcctcggccgcaccgaagtgaagaacttcgtggtgttcttcgagaatgatgccgtgacccgctgggaaggcgactacttcccgggcaacgacaaggccctggcccagcagaccgtgcgccagttcggccgcaacctgccgaaggacaagaagaagaagggccgctga

SEQ ID NO: 494245 - DNA, 258 bp, Stenotrophomonas maltophilia
atgatcggggtcgaggtggtgctggcctggccggagcgcgtgctgtcgcgccacctgcagctggaagagggagcgaccgtggccgacgccatcgccgccgctgcgctggaaggtagtgccgactgtccggccgccgcggtgcatggcgtgctggcccgtccacagcaggcgctgctggacggggaccgcatcgagctgctgcgcccgctgctggccgaccccaaggacaaccgccggcgtcgcgcgctcggcggttga

SEQ ID NO: 494246 - DNA, 426 bp, Stenotrophomonas maltophilia
atgcctactatccgccgcagcgccctggtcgaacattcggccgcgcgcatgttcgacctggtcaacgacgtccaggcctatccgcgccgtttccgctggtgctcggctgcccagatcctggagcagggcgaggaccgcctggtggcgcgcctggacctgggcctgggctcgttcagtacctggttccagactgaaaacaccctgcagcgcccgcacagcatcgacatgcagctgcgcgatggcccgttcaagcagctgcacggccgctgggaattccatgcgctggccgaggatgcgtgcaaggtcaccctgaccctggagttcgaacccagctcgcgcctgctcggtccggccctggcgatcggcttccagggactggccgatcgcatggtcaatgatttcgtccgcgtcgccgacgagggctga

SEQ ID NO: 494247 - DNA, 504 bp, Stenotrophomonas maltophilia
atgagcaagaacagcggcaaggataaagcaaagagcgcgacggccaacaaaaccatcgcgttgaacaagcgtgcccgccacgagtaccacatcgaagagcgcttcgaggccggcctggccctgcagggctgggaggtgaagtcgatccgcgctggccgcggcaacatcatcgacgcctacgcctacgtgaagcacggcgagatcttcctgatcggcgcgcagatcaccccgttgatccaggcctccacccacgtggtggccaatgaccggcgcgagcgcaagctgctgctgcaccggagcgagatcgacaagctggtcggcaaggtcgagcgcgatggctacacgatcgtgcccactgcgatgtactggagcaagaacaagatcaagctcgaagtcgcgctggccaagggcaagcagacccacgacaagcgcgatgccgccaaggaccgcgactgggcgatcgagaagcagcgtgtgatgcgtcgcggcaaccgcgacgcatga

SEQ ID NO: 494248 - DNA, 432 bp, Stenotrophomonas maltophilia
atgaccgtccccatcggcgccatggtgactgccagcgccgatgaaacgcgcacgttgtgcgcgcgcctgctggccttcaaccaggcccacggcggcgattcactcgatgagactccagtccgcctggcctggcatgacgagcacggcgcgctgcgcggtggtgtgctggccgacgtctgtgccggctggctgcaggtacatgtgctgtgggtggatccggaactgcgcgggcaaggcatcggccagcgcctgctggcggaagcagaagccgccgcgcgccagcttggcgcccgcaacgtgatgctggataccttcgactggcaggccgaagctttctacctgcggcagggctacaccgtctatgggcggctgcccgattgcccgcccgggcacgagcggatctacctgcgcaagccattgtcaggttcctga

SEQ ID NO: 494249 - DNA, 573 bp, Stenotrophomonas maltophilia
gtgaccgatgcaagccaacaacgcagcctgcggcagctgatcgggccggtcggtgccgactaccagcggcgcgccctgccgcccggctgggtgtgggcggtgctggcggtgttgcttgcggccaccgcgctgaccgagctgccggcgactgcggccgcggcattggtggccagtgcggtggttgtgcactggtcgcagcgcggtcgcatccattggctgggctggcgcctgccgggcttggcagtgttggcggccctgctgtgggggccggaagtgctgtcgcaatggttcgagcacgggctggccgtggtcctgatgtcgctggccagcctcagcatcggcgtgcatgtatggcagtcccgacagatggcgcggcagctccagggcgcggctgattcgctggatgacgcccagctgctggccctgctgccggccgacgcggcccagctggcgcagcggtggcgcgccggcgatgaccggcatgcgccggaactggcagtggtgatgcacctggccgtgatgcacgcagcgctggcaccgcgcatgcgcgggcagggcgtgctggcagggtga

SEQ ID NO: 494250 - DNA, 618 bp, Stenotrophomonas maltophilia
atgctggaagctcttttcgtggcggccacgaatcctacgtcggcggctactgccgccgcaggtggcacgtacgattggaagtggctggtgccggtcgcaactctgcttcttggcttcggtctcaagtgggtccaggaccacttcacggaaaaggaccgtcggaagcacgacgagaaaatgcgtcgagatcagcgctacgacgcactgcggatgcggcggctcgacgctgagcgaagtaatttgctagcaatgcagcctctggttgtggcgctgttccgagccgggagccgactctacgaagcaaagaaccaagcaatggtgttagggtggtcgtgggccgacgctcctgtagatgcggagctcaagattgagccaggtcgcatagcctctgagcttgtcccgattcgggcgcgacttcattcatcaaatgtcgtcgatgagtttgacgaattcattgacttcatgtgggacgcactttctgccgacacgatcgacgaagctcgcggcaaatggcgcgtagtgcagaatgcattcaagatcgtttcaggggccattggtgaggccactcgccatcttgaagacgagaatcgtctgctcggcgatccgccggagctgtaa

SEQ ID NO: 494251 - DNA, 933 bp, Stenotrophomonas maltophilia
atgtgctattccgctcagatcaccgccgcctatcagaagctggtccgcatgaccggcgccacgatctccctgcaggagttcgctgctctctacgcccatgacccggggaagaagcggccgaagacaccgaaggcgatggatgatgcgttccgcgccggcgcgagcccggccgagctggcggtatgggctgagatcgaacagtggaaccgcgccgaggccgccgtcctggagcaggagctgttcgccaaccggaagcgcctggccgacgcggagcgcgcgctgcaggtgaaggaaaccaagaaggcccgggaagacgtgcggatcgccggcaacaagatcgatcgcgccctggccaaactgggtgacctcaagcgctccgagccgaaggaccgtgacagccggatattccccggggtctacgccccggtgatcatttcggagggcgggaggctggtcatcaagcccatgcgctaccagtgccgcctgaccgggaagccggccaactacgaccagcgcttccccggcacctacaacgcgcgccgggatagcctggagaaattctgggcgccggcattcggccacacccacgggctgatggtggtggagacgttctacgagaacgtggaaggtccggacggcaagaaccaggtggtgcagttcacgccgcgcaccggcgaaccgatgctggtggcctgcctgtggtcgcactggacggaccccgcagggaaagagcccgagctgctgtccttcgccgcgattaccgacgacccggagcccgaagtcgccgcggccggccatgatcggacgatcatcaacatcaagcccgagcacgtcgaggcctggctcaatccggacccggctgacctggccgcgatgtatcggatcttcgacgacaagcggcaccccttctacgagcaccagctcgcagcatag

SEQ ID NO: 494252 - DNA, 354 bp, Stenotrophomonas maltophilia
atggacaagaaggactcgcagttggtggccattggagaaggaaagcaggaaaaaggccagccgatggacggtggtgctggttttctttcccctgcaacaggcttggaggtggggcccaaggcatccagggggcggcactctcgccgccagacgctggagaagggcatggaagatgagcgccataaggctcaggtggtctcgctggaggccttcaaggcaggccgggtggggcagatccccccggagttgctggagatgtacgaccagctgacccgcgaccagcacgcactggtgcggacctcgatcgtgctcgtggctgcgctgcggaggcgactgggcctgccggacctctaa

SEQ ID NO: 494253 - DNA, 7950 bp, Stenotrophomonas maltophilia
atggcaacgttcgaaaaggtcgatgggaatccctttggcacaggagcagcaccagcaccagcaccagcaccggcccccacagccaccgacaaggttgcgcgccgaccgacgctgtcccccgtgcagggcgacccgttccagaaggtggccaagcgcccggagcgatcctggggtgaggcgatcaaggacaccgggctcggcattgcttccggcgccgccaatatcctcggtggcgctgtggagcagcggaactccatggagccgaccaacatcgtgcggcagggcctgcgcgcgctggacaggttgggggtcaagggcgcatccgagaccgccgcgctggtaccaggcacgccatccgagatcttcggcgggcgccgggctggctcggatagcgcgggcttgtcgagggcaacgcagctggccaccgactacctcggcgagagccagtctgaggcgctcaagcaggagaagcaggacctgcaggacaccaagggcttcttcgccagtgccggcaaggtgctgtcctcgccgcgactgatcggcaatttcctggccgagcaggtgccaaacgtagccgcgatgggcgccggcacgcgcctcgcggctgcgcgggcgggcgagcgagcattggcgggtgcgctggccaaggggctcggtaccgaggccgcagaaacggcagccaccgccgctggtcatcgcgcggcgactgccgctgccaccggcctgacgacgatcatggagacagggtcggcgggccagcaaacctaccagcaggcaatggcgcagccgcagtcggtctgggatgccaatccggaatacaagcgcatggtcgccgccggcggtgacccgcagaccgtcaaggaaaccatcgcgcgcggcgcatcgatggaagcgcaggcgatcaccgcaccgatcgcggcgatcgccggccgcgttgcggcgccgttcgaagccgacgtcttcacccggggcctggcgcgcaagccgaaggcgatgctcgcaggtgctgcgcgtgagaccgtggaggaaggcatccaggagggcggctcgcagctggccggcaaccttggccagcgccaggtcgacccgacccaggcagcgtgggaaggtgtccctgaagcggccggtaccggtgcggcgatcggcggcctgctcggtggcggcatggctgccggcggcgcgatcgccagccgcggcgacaaccaggccgcagtcgcagccgatgcggagcgggaacgcctagcgcgccggccgacgccgacgccacctccgctgccaccgccgccaatcccacagatgctggcgcttccgccgccggaagtgatgactgctacaccggacggcactatcacgcctggcagggtccgcccggaggttattgccgaacctgagatgcgctttccgcagggccgcggcatgtccgctcccttcgacgggacccgcgtcgctgcgcggccgcagccgacggtaccgttccctgacgcagcccccgactcgatcgccggcatcgccaacctggtgtcccaggcgcggcggcccactgagcctgcggataccgcaacagctccagcagcgcaggcagaacccgtcgccccgcaagcccaggaaggccaggcggccctggcaacaccggaagttccgggcgcggcggcgcctccggcgcctgcggtcgcgccgccgtgggtcgatgcccaaaccggtgaagcgctccgagagccgaccacgacggacatcaagcagctgctgcacagcggcctgcagtaccaggtcgaaacgcatggcggaatcaatacgccgaccctgctgcgctccatgcgtgaccagtacggcctgcccagcgcccgtgtgcgcccgctgctggacgaggtaaagggcgagcgtcggcgcggcctcactgcgccgccagccgatgccggcaacccggcagcgaatgaggccgccaggttgccggcatcgccggcgcagcaatcgctgagggagaccgcaccgtctgcagatctgcagctggatggtgccgcgccgaccgatcgatccgctccggagccgttggccagcgaattgcagcgcgcgcccggtgatgcggctgcgcagttggacaccggttcgtctcgcgcaccggttgctgggccgcgtgcagccggcgagacggagacaaccggtgtggccgggaccgctccggagcagtccgtggccgaggcgagcgctggccaggccaacgtgcccgcgcaggccgaagtgccgaaggtggccaccgcggctgctgaggcggcgacgaacccgcagaacgatctgcctgcgcccacggatgcacagaaggaagccggcaactacaagaagggtcacgttcgcatcaacggacacgacatcagcatcgagaaccccgccggcagccagcgggatccacgctggcccgcgctgaagaaccactacggctacttcaagggcaccgtcggcaaggacaaggatcacgtcgacgtcttcatgaccgaccgcgctgaggatccggcgctgccggtgtacgtggtcgaccaggtcaacaaggacggctccttcgatgagcacaaggtcatcatgggcaccgcgtcggagcaggaagcccgcgagacctacctggccaactactcgaagggctggacgggcctgggcggcatcaaggaaatgtcacaggagcagttcaaggcctgggtacgcgatccgaagaagaccacgcgccgcgtcaccagggccaagccgacggaggccgcaccggcaccgcaacccgctacgaacgtaggtgaagcggggcagggagtcagcacagcggccgaaagcgtcggtgcgacagcggaaactggtggcgcgttggccacggtccaaagcgaacctgcagctgctgcagcgccggcacaacctgcagcgcccgcaaccgtggaaacgggcccggtgtacacgcccaaggttcgcatcaaggctggctcccctgagtacgttcgggatgacatcgggacgctgggcgcgtacttccagcccggacggattgtcagcgcctacgccaacacacgggatcgggtgatcgagttccggccgccagggcaagacccgcgctggaaggtgaaggtgcaacaggtcgacagggaagggaatgcgattccggatgaggcaccgcgctggcacagcaccgttccgagcccgcgcgacctggactctgtcctggggaaacctgagcgcaaggcgaagagggaagcgaagacagccaggtccgtcaagtctgcagaggcgaaggaagacaccagggctacgccggcctcgaagcccgaggtatccaaggctgggcccgatgaggccagccgcgaggaccgcgcctccgctgcagcggacaatgcggccggatcgtcggatccactcttctcccgtcgtggttgggatgcggacttcccggacgtagtcacggcgcatcgccctgggcgtctgagcgggcatgccgactatgccgcggccaaggccggagacgacaccgccgccctgcgcgtggcgcgcgacgtcatcaccccggagtttgtcgaggacgtgcgtgctgcgctgcctgagggcagcaagcctctggtggtggccgtgcagtcccaggaagccacgggtaacaaccgcatcccgcgcatggccgccgaggtgctggcccagcggctgggactgcaggtgtccgaagacatcgtccaggccgccaaggtcaatcgtagtgccggcgatgccctgcaccggctggccaaccagcccccgttcaccggcaaggtggagaagggccgcgactacgtcctgatcgatgacacgctgacccagggaggtaccctggcccagctgaagacccacatcgaggacaacggcggcaaggtggtgctggccacggctttgaccggcaaggactattcgcggaaaatcgccctcaattcccagagcctggccgacgtccgtgaacgtttcggatcaatcgaaccctggtggcgcgaccagttcggctacggcttcgaaggcctcaccgaatccgaagcacgcaccatcctcaccctcgacaagggacgtctcgatgctgacgccctccgagatcgagtcgctgcaggccgagtaccgggcctccggccagtgggcgaaggagcagctggccaaggatccggagctgaagcatctgggcccagcgggcgggtaaaccgatccgcagctcctgccgccagcggcggcctggacttcgaccgtgcgctgcagctcaaaaccgacctgacccagcattggggcgaaaacgcgcccagcgtggtcgtggtgcgctcggccgaggacttcccggccagcgccaaggtcgatccggcgtatcgccgcgccgagggtatgtacgacggtcgtcctacggtctggatcaacgccggcaacattgccaccgagcagcgcttcgcgcaggtgctggcccacgaggcaatcgggcactacggcgttgagtccgtggtgggtgccaaggactggacccagatcgttgacgcgatcgacaagctggccgccgacggcaccggtaccgctgcgatgaagtcggtgctggcggatgtaaccaagcgctacggcaccgtcgatcgcgagaccttcgccaaggaagcgatcgccgtcatggcagagcgggggatccgcaacagcttcaccagccgcgtcgccgcggcggtccgccgcttcctgcgccgcgtcatgccgtcgctgaagtggtccgagaccgaggttcgggacctgttgagccaggccgacggcttcctgcgcgccggcatgtcggcgcaggcgcagcgggaaatggtgcggtcctactcgttcgcacagccgcagatcgacggccgcggcgaggccttcctcgagcagaacggtggtcgatttctccgccgcgatgatcagtggtacctcgccgatgagcgcggccggccggccgacttcctgacccttggtgccgcgcgcgctgaggccgagcgcaccggtggccaggtcctggccgatccggttgagagtgggccgcgtacctggagcgtggtgctgcccaacggcgccgaggtgacacgggccgcgcgcggccgtctcttcagcatgccgccggcagacgcgctcgcggacattgatgctatccagcagggcatccagggcgacgacgtactggcgcgtgcccggcagaagctgaaagacctcagcgtgagcaaggtgaaagacacgttgcggcccacctggctcggtgcgctggccacccggcacctgacggagctgggacgcgactatttcccgaccattgatcgctattcggactacctggccgaaatgcaggccgatcggaacaagctgcaggcggaggccgacacgatcgccgaggcggcgcgccagtgggccagcaagaacaaggcggaaagccggcgtctgttcgacctcatgcaccaggcgaccatggacggagtagacccgtcacgcgagtaccagcccctgcagttcaaggcgccaggagggcagggtctgcaggaggtcaaccgcaagaacgttctacatgcgatcaaggtgatccagcagcagatgagggaacgcagcggcgacaccaagacaaacatgatgaatgaagtgaagacgctgaaagcaatgctgaaggtcgaaccacgtcgccgcaggcagtacgtccccttggtcgagcagtggtcacagctgtcgccggaagcaaagtcgttctatctgcagttccgtgatgcctatcgatcgaggtccgacgcggtggaagaggccctgatccaacgcatcgaggacctgaagggtggtgatctagttggaggccaggtcatcagcgacagtagccgccgcatgctggtgaacaagatccgtgagcagttcgaatccgcgcggctgcaaggcgtctacttccccctgcagcgattcggcaagttcttcgtcgcagcggagaagggcggcacaagcactttcctgatgttcgaatcacagaacgagctggaccgagccgtgaaggacctccaagccaaggagtgggccatcaccgcccggggaatgaagatggagggcagggcggccgacgcgccgagcggcaccttcgtcgccgacgtgatcgaccaactgcggacggcgcacgtgtccgacgcagtccaggaccaggtctaccagctgtatctgcagaccatgccggagctgtcgatgcgcaagcaccagatccaccgcaagtcggtgcctggcttcgaccctgatgccgtgcgtgccttcgcctacaacatgcagcacgggtcgcaccagcttgcccgactgcgatacgcccacaagctgcagggggtgctgaccgacctgaaggacgcgcagaagaagattcaggcgtcgcccagcgtcgacacgcgaaagatcgtggcgggcgacgctctcctggaagagctgggcaagcggcacgaatggatcatgaatccgaccgactcggcgctgaccaacctgatctcgtcgttcggctttacctactacctgggcgccacgccggcggcggcgctggtgaacgtgacccagaccgccctggtcagctacccctaccttgccgcacggcacggcggggtcaaggccatgaactacctgctggccgccagccgtgacgccgtgcgaaccgtgggcaacatccagaggacgctgaccgaccccgacgagctccgcgcctaccaggcgctggaagtcgccggcgcgatcgagaagacgcaggcccacaatctcgccggcatcgccgagggtggcctgacgggctacaacccggcctggagcaaggccatggagatcatcggctggggtttccacaagaccgaggtcatgaatcgcgaggcgaccggcatggctgcctaccgcctggcgcgcgcggacggcaagtcgttcgacgaggccgtgaagttcgcccgcgatgccatcttcgatacccacttcgactacagcaacgccaaccgcgcccgcttcatgcagagcggtaccgccaaggtgctactgatgttccggcagtacagcctgaacatgacttgggcgctcgggagaatggtctggaatgcgagtttcggccaggccccggaggtccgacgattggctcgccgtaacctcacgggcctgttgggcatgagcgcactgttctccggcgccatgggcctgccgatgatgggcatgatcatgggggcgctcaatggcatccaggccaccttcggggatgacgacgagccgtgggatgcggagaccgagctgcgcgctttcctcaccggcatgctggggcagggcggtgcggatctgctgctgcacgggccggccaacaagctgaccggcgcgaacatttccggccgtgtcggcctggacagcctgtggatccgcgacgccgatcgggagctcgacggccgcggcatgttcaacaacctgctcgagcaggccgcggggccaatgggcggcgtcctgaagaacgtgctggtcggcaagcagcaggtcgacgagggccacatcatgcgcggcgtggagaccatgctgcccaaggggctcaaggacatgatcaaggctggccgttacgccacccagggcgtcaacaccctgcgcggcgatccggtcgtcgaggatctgtcgccctgggagatcctgctgcaggccaacggcttcgctccggagaaggtgtccaggcaatacgagaccacccgcgcgctgaagaactacgagcagcacatcctcgaccgccgcaagtcgctggtgaacgccttcgccatggccctgcgcaatggcgatgccagcgaccgggcttcggtgctcagcaagatcggcgccttcaacaaggccaacccggagctggcaatcacctcgagcggtctgcagcagtccatcaagaaccgggcccgctacagcgccagggccgaggccggcatcgtgctcaacccgaagctggccgcgcggctgaacaaagcagtgtcggagtaa

SEQ ID NO: 494254 - DNA, 1497 bp, Stenotrophomonas maltophilia
atggccatcaacgatcgagacgaactgaaccctgccggcgccgcgcccgggcagccccgcattgccgcccgaccgagccgcggcacggccttcggctcggcgctgcgcagcggtgtcgcgggaaccgccacgatggcgcggcaggccgccggcgcaggcctgcgcgcggccggtaccgtcgccgacgcagtgacggcaccaggacgcgaagcggccggcttcgtgcgtgatgcaggccgcgcagcggtcggcgcggcgccgtcgccacaacagggccagccgttgagggcgcccagccagctcaatccgattggtggcgccgccagcgcgctgagccgcatcgcaccggttaggctcggcggtgccgcgaagccgaaaccgacgttcggcggtgtgagctcgagcgtggactcgactgcaggcctcgctggttcgcgcctggctgggcggccggcgatcggagcagacttcaccggggtcagttccagcgtgagttccacggcgcccctggcgggcgctgcaggtgccgctgcgccccgggcgtccaccgcccccgcagcagctgcgccgagcacctacatgacgcaggacggccgcactgccacgttgccagcaggcattacccgcaccgtggatgccaacggcaattcggtattcaccggatccgccgcaaccatcgcagccagcggcggtgctgcggccgcgccggccggtggcacgctggcacccatggtgtccccccttgcggctgcacctgcagcgccgaccgtggtggctccgcggccaacgccgcagatcgtgcagcgtggtcgccagggcgggatcattgagaaccccgccgacaccacggtggacaagctcacccgagctatgggcagcgccagcctgaaaggcagcccgagcggccgcgccgcagtagcgcaggcaatcctgggcgaggccggcgcgcgccaggccgagcgcgcatctgcgctccgcacccaggatgaggccgatcttgccgctggccaggtcaacgcggtcgcggcacagggcgacgccaaccgcgcgctgcaggccggtcagttcaacgcacaaatgcaagacaacgccgccaaccggcaggcatcgctggaaaccgcccgcattgctcgccggccggagatctcggtggcggctgacggcagcatgggtgttgtaggtggcgacggtagttggcgggcggtaacaggcgccgacggcaagaacgtgcgcgccgcccaggcgccgcgtcagaccggtgagctcaccgatgccgaccgcctgaagtcctacaccgatcgattcaacgccatttccgggaacgtcacgatggacgaagccgcgaagacggcggccctggcgcagctcgatgcggatccactgtatgcggggctgcgcccgcaagaggccccgcccgtggatggagcgcgtaaggcaccagacgggaactggtacgtgcagaacaaagacggaagctactcgaaggtgaatctctga

SEQ ID NO: 494255 - DNA, 1890 bp, Stenotrophomonas maltophilia
atggcaactacctggtgtcctgacctatcggctgacgccgcgatcacgttggttggaagcgcgcatgacaagttcatggagctcggagcgaccacgtacaacatggccgtgtccaaccttcagggcctcaacagcgttcggctggatccgatcgacttcaacgtcgacttccgctttgccgatccgcaggccacgttccagcggccgcgccgccccgacctggatgaaggggcgctggaattccgcgctcctgatgtaccgctgcccagcgcgccaggcttcgtggcggctccgatctcgatcagcgaagcgcccgagctcgacgctcaaccaccgacgctcgctttcggagcgaagccgaccacgccgaacgtggtcgagccgacgctacctgtggatccggcgccgattgtgctgccggcggagccgacctacgtcttgccgcaggtgccgacgttcgaggcactgaacctgcccgacgtaccgaacattgtcttgccggagttcgaggcggagaagccgatcttcatcgagccgccgttcaacgaaacctggcagttcgaggccaccccatatgtcagcacgctggtggacacgctcaccgccacgctgaagccaatgatcgtcggtagccaggccctgccaaggatcatcgaggacgcgatcttccagcgcgcccgcagccgcatcgagctggacacccagcggaacgtcgaccaggcggtttcggagttcgccgcccgtggcttttccgagccccagggcatgctggccgggaggatcctggaggtccggcaaaccgggcagggtgccgttgccgaggcctctcgtgatgcggcgatcaagcagttcgaagaatcgctggccaaccagcgcatggccattgctcagggcgcggcgctggaagggacgctggcgcagctgcacaccgacgagcagaagctgatgctgcaggcggcgacgttccagcgcgaaaccgtcatcgccgtgctgaatgccaggatctcggtcttcaacgctcgcctgcaggcctaccagaccgatgcccaggtgctgcgcgatcgcatccaggcggagctggccaaggtcgaggtgttccgggcccagatcgagggggagcgggcacggggcgagatcaatgagcagcgggtgcgcctctacgagtcgcagctgcgcggtgtaaccaccctggccgacttctatcgcacccgcgtcgaggcggtgaaggtgcaggcggacatcaaccgtttcggcatcgacaagtaccgcgcgcaggtcgacgcctatgaggcgcgctggcgtgcccacgtcgccgagtggcagggctatacggccagcgtggagggcgagggcaagcgggcggatctgtaccgcacgctggtcgatgccaacgccaaacgtgtcgacgcctgggcggccagcaacaacatgcaattcgaggccgagcgcctgcgcatggcccagcacggggttgacctggacgtgtggcgcgccggcatcactcgttgggacgcgacgctgagcggcgagcgcgctcgactggctgctgtcggtcaggcgttcgacgcgaaggcgcggatctacagcgccgacgccggtgtggagcaggcggcctcggccgcggccgatcgcagtttcgagctcggactggcacgggaacgcgcagacgtcgacgtacagctgcagcaggcccagatgcgcatccagcaaatgctcggcctgctggcgcagtcggcggagatccagcgggcaaaggcgcagatctccagccagctcgccgccagcacgatgagcgccgtcaactacggggccagcgtttccagcggccgcagcaaatccaactcttgctcgcagaactacagcttccagggcgagatcgcggacgcatga

SEQ ID NO: 494256 - DNA, 348 bp, Stenotrophomonas maltophilia
atgaccatggcaggaccttgcttctggcgcgagccattcaaccttgttcaggactgcggcgaagatccgcaacccagcgactggatgctgaccttcaacaacggaatggtcgaagccgaagaggcatccgagctccccggattcgccgtaggcaccgacttcctgctgaagatcgagggcgacgtggacgggcgcaccctcgagatgcgctatcgcatcgacagcgaccgctatgcgccctactacatgggcgaacagaccagctacaacggccccgatggggctgccgccgtggcgacacaaggtgcaaatcgttgggacgtaacggtctacgtcctgtggagctga

SEQ ID NO: 494257 - DNA, 1482 bp, Stenotrophomonas maltophilia
atgaccatcgagttcctgccgctgcagcatgcggagatcgaggggcgtggccaggtcacgttgccactgagggccgtgggggtcggctctggggtcggcgccgccggcagtgccgtgctgcgcctgggctcgtctggacggggtcagatctacttcggcggcggcgtagacccggtggtacccgccaacggtgccgccgcgctgaacctgggcacgtcggggcagggctacggccgagacatcggcggcggagccgcggcgatcagtgtgcgcgctgcaggcttccagacggcccccggccgtggagcgggcggcgcgcgcctggcgctgtatggcagcggtcgacaggtcaccacgccgcttgcctatgcaggcctgtctgcccgaccgcgcatgatctctgcgttcggcgggcgctggtttgcgtcgccgcgttcatcgctggctatcggcgagacccgaagcagcctgccaacgcacgtgcttaacgaagtgctctccatcgacgagacccggcgcagcgcgctcctggccagctgcaggacggcggacacgctgagcctggaagacgcggcagcggtggtgttcatgctgctggtcgaagaagggattgccttcagcccggatattcgcgttgactcgatcaggctggagcgcgtcatcgagcgcctgctgatgctgggggcggccacgtcttacgccgatgcgttgaacgccctggtcggcggcctgtggttcggcgccctgaccgaggcgctgcgcacggagacggtcaccgatggactgctgggctcggaccttgtggccagcctacagcgcgcggcagagcgcgtggtggacggcatgctggctgatgcggcggcattcgaagccggtaccggcgttgtgatggtggatgagcagctgctcgtcggcgccgccggcggcgcgacggccgagctggcccagctgctgaaggacgggctgggattcgtgacccgcctggcgctggacaccggcgagtacgtggcatgggtcatgaacaccgaaagccgcgcgctgagccgctacacccagtacccgttcaacagcttcgccaagatcggcggtcgctactacgccgcggctgcggacggcctgcaccggcttgatggcgatgacgacgacggcacgccgattgctgcgcggctgcggctgggcctttccgcattgggaacgcgccgtctgaagcggctgcccgaggcgtttgtcggctacaccgccaccggcacgctgctgctgcatgtgatcacggtcaacgagcagagcggccagaaggaagcggccatctaccggatcctggagcgaccggcatcgagcgagcgagaaacccgctggaagctggggaagggaatcaaggccgtcgacttcgacttcgtgatcgagaacgtggacggcgccgacttcgagctcgcagccatcgacttcaggccgatctatcttgatcgccggaccaggggatga

SEQ ID NO: 494258 - DNA, 741 bp, Stenotrophomonas maltophilia
atgttgtccaagccgccagtctccaggtacgtcccggctcagccagcgaaacctgcggtgccgtatcgggcttcctataccgtctgcggcgcctcgccggcccagggctactggcggcaggagtgcagcgaaggccggatgccggcgccacgcaatggcgcggtgcagctaccgaagggcgcaatgatcctcggctacgaagagcagaacggggtcacctacgtgaggtacctgctctgcaggagcgtgttcgttcagacctcgccgcctggccccgtcacctgcacgacgtatccggagcagaaggcggagcctgcagtgccggccgttccgccgcgaagggaatacctctcggtcttcgagtgggacgccggcgccgacagcgcggacgagctcgatggtgatgtcgtaatgcggctgacgatgagtcgcgccgtgggtgtggtggtcgggctcgccatactggacgaggcggagctgtccgaccctgcgcgggtccgacatgggctgtacttccatcaaagcgagggaggccgcctgcaggcctgcgtactggagcgcgggcgccgcgtgtcgccgatccggctctatgacccccaggacctctgggaggtaatgcgcatcggcggcaccgtccattacctgcacaacggacagcgcttctacatgtcgcagcaagccagccacgggctcgtggtcgtgggttgtgcgatctacgcgaccggagatttcatcgaatga

SEQ ID NO: 494259 - DNA, 471 bp, Stenotrophomonas maltophilia
atgatgatctccatcccgctcgcacaggccctgcttgggcaggtcaagaatgccctcgacggcggcttcctctacgtgttcgctgggccggtaccggcatcggccgacgatgccctggatatggtcggcagtcacacgcagctggcgaaactctcggtcagcggcggcggcctgaccttctccgctcctgtcggcaatgtcctgcccaaggcaccgagcgaagagtgggaaggcctgatccagtttgagggtgccaatgccagcgccacgagcctttccccatcgttctatcgcttctgcgctgcagccgacgatggccgtggttccaccaccggcgtccgcctgcagggcactgcgggcgggcctgcctccaatgcggcggtgctgttcagcagcgaagtgatgacggccaatggcagcaacagcaccggcgtgagcatcttcaacgtggttgccgaccaggccagctga

SEQ ID NO: 494260 - DNA, 474 bp, Stenotrophomonas maltophilia
atggccgtgaacacttccacggggttcgaggcgtcgatccttggcccgtcggcattcgaggggatcttccgcgccggttgcatcgagatccgcaccggaccccagccggacaccgcagatatgcccgccaccggtgccttgctggcgcgaatcaccgttgacggcggcatctggcagccaggcgtttcggcctatggcctgggcttcgtgcgcaacggccgctacgtctacaaggatgctgcccaacgctgggtacttcgcgggctcgccgcgggtaccgcgggctggttccgcctggtcggtaatgcgcccgacgccggcgcagtctccttcgaatctccccgcatcgatggcgcgatcggtctggacgacgacagcccaggcgacttccagatgcgcctgcccaccctggccatggccaccgacaccagcatcgagatcggtgaatggtggtttgcgatccccccactctga

SEQ ID NO: 494261 - DNA, 1902 bp, Stenotrophomonas maltophilia
atgagcgggccgcggtacagcggatggacaccgatcgtggtcgttggcgatcgggaggttgcggcccagcacgtcccggaagcaaggaagctgctgggcttcgtgctcgaagaggccaaacggaatggcctggggatcgcgaacctgcgccgggagctgcaggacggcacggtgctgctggccgagaagatcggcgagctgccccgggtcaccatcattgccccggggccaccgccggtggaggaaccgccagagccccgcggcggcttcatcatctggccacgatgggacgtgcccaccggcgatcccgcgcagcgcgggtcgcaggtggatccaacaggcaatgaccccaccgggtggctggagttcgccggcagtcgtgtggtcacccgctactggcgccgatgggacgtggtcgaccagatccagggcgcacgctacgagagctacaaccggccggatctgtatcccgatgggttgtacttcttcgggaacatcgattggaaggacggcaaggacctggcgctgtcgttctacggattctgctcgaggtacgtgcacgacgttgccttgctcgacatcggcgcgcgctgggtgctgcagcagggccaggccctgttcgaccggatctcctaccgcgacgagctgcagcaggatcccccggaatacctgtcgtggcggatcaattccgcctgcgtgcgcaaaacgtcggccggagcccaggagctggtggtggcgttcaccaactacacccaaggccagcccaccaccgctcagtcggcgtttgtggccttcaggttgcataggaacgaggggacgccgcagaagggtgactgggtcatcgagcccggcagccatcgactgctgggaacgacacctggccagatcaaccccgaaggcagtacgtcggggaacaccttcaccgattcggccatgccctggttcttcaatggcgatggcacccgagcgattcggaccgtcaacagcgagcagacggccgctgtcgcgttggtcaacaccatgacccaagaggtggagatctccgacagcagcatcacccataccgcggtccaggctgcctacctgcagggcaactacgcggggagcggcggcaacttcgccttggtcgcccccacgcgtggcctggtcgtgtccgacttcgccggcatggagcggaaagacgcctacctggcgctgcggcggagcgaggggcggtttgctgtggaggccaacaactaccagggaatggtgcgcgtctccgtggtgctggagttcgatggcggcgagatctctctgatcgatcgagacttcgcggtgggcaatgaccgccaggactatcacctgctggcgtacatggacgtgcgccacaacctgttctcgggatggcggatccagggtgtcaacggcgcccacacgatccaaccgtttgcctacatgggtggacggatggtgtatggccagtccgagcctgtggcatgggatccgagctccggcaccgctgcgcctttcccgggtctggatacccgtgcgccgggcgctgtcaccgatggcctggtgtttggcagctactgggtcggggccagcggatccggctggggtccacgcacaccgaatcagatgggtgtgatctggaacaagcacccgcgcgagggcctgattgcgttctgcggttccgcgctgctggtgccgttgatgatggaccagcagggcgtctacgacttcctgggtttcccctgggccggcggctggaactacaacaaggggcgctactgcgtctcgatacctggcgcctacaccggcgcactgaattacctgacgggtcacgacctggggtcgttgctcggcgttaccgccgaggacaggcgcttctacccgctgaccgtcctacccaagcccatctag

SEQ ID NO: 494262 - DNA, 633 bp, Stenotrophomonas maltophilia
atgaaaatcatgaaggccctgcagaacctgggcacggtggggcgcgacgccattcgcgcaatccgccggcacaagtacgagctgtccgaggcgggcatctacattcccgcggcgcgcgcgaccatcggcggtatcttcaggcatgcccacgccaccgcaggcggggagttcggcccgtggcaggtggacccgaatcgactggtcaaggagggcctgaactacatcctcaacaccgcactcgggggcaccagccagcagacagccttctacctggcgccattcgcgggcaacgtgacgccggcagcggactggaagggatccaccttcaaggacgtggcgaccgagttcacggggtacaccaacgccagccgtctgccctggaccaccacaccctcgacggctgaggcgatcggcaatagcgccgcccttgccgccgcgacgctggtctactcggcaggcgggccctacaacctctacggcatcggcctgctgacgggctcggccaagggcgctacggcgaacatcctgatcgccgccacccgcttcgcaacgccgcgcaccaaccagctcgccggcgacaagctggcgctggaatacgtgctgtcggccaaggacgagggcgacgtcacctga

SEQ ID NO: 494263 - DNA, 1314 bp, Stenotrophomonas maltophilia
atgcccgttcgcgatgacgacctccgcccagcaggcccttggcccctgggcatcaacaacgtggccggagaaggggcgctgccgaccgatgagaacgggatcccgcgcgcgctgcgtgaggcggacaacgtcgacctggacgcagccggtcggccgcaacgccggcgcgggcatcagcgtttccggcccggtgccctgacccattcgctgtggagccatgaccacctgcagtacgggttcttcgtcgatggcggtcagcttcatgccctgcatgaggacgaacgcgtggaagcgcttggcatcgacgtcggcctggacccgctgagctacgcgctgattggcgatcgcgtcttctacagcaacagcagttcctgcggtgtgctcgacatcgacctgcaggtgcattcctggtcgcctgagcacccagccggccagccggtactggcgccgtccgcagcaagtgcactggcgcctgggcagtaccaggtcgcggtgacgttcatggatcggctcggccgtgagtcgggtagcacgctggccgcagtgatcgacattgccgagggcggcgggttcgagctgagcgacattccgctgccagtggcgccggacacggcttcggtcgcggtgtacgtctccgggccgaacgaccaggtgctgcggcagtacgtcatcctgccggccggcacccgctcggcgccggtgctgtcttccggcgagggcagggccctgaccactcagttcctccgcccgctgccgccgggccacatcgtgcgtggtgcgcacggccggcagttcgtagccagtggccaggaggtgctgtggtcggagccgctgcgatacggcatgttccggccgtcgaccaaccgcatgcgcttcaacgcaccgatcgacctgatggaacccatcggcgagggactgcaggatggcgccggcctctacgtcgctgccggcgcgcggacctactggtacgccggcgccgacccgaaggacttcagccaggcagtggcgcgcggtagcggcgcggtgcctggctcggccatggtcgtcaatggcgacgtggttgggctgcagtcggcggcgccggtgctggtctggctcgcccgcgacggctacttctgcattggactgccgggcggccaggtgcaggtgctgaagaagggcgaggcagtcgtcgacgatgccgatcatgcagccctgctgctgcgccagcaggacggcctgagccagctcgtggccgcgctgcgagcacccaagggccaggcgctggccgtcaccgaccgggcagtcgcccacgtcatccaccgagacccctga

SEQ ID NO: 494264 - DNA, 681 bp, Stenotrophomonas maltophilia
gtggaggcgcgcaccctcagccagttgatcgaggaatgccgggaagagctcgacgacgacgtggctccctacctgtggagtgacgccgtgctgacccggcacctcaacgaagctgtggaagaggcgtgcattcgggcgcggctgctcgtggagagcggccgccccgatatttgccacatcaatctggagccgggccgggccgactacccgcttcatccgaccgtgtacgtggtccagcgcgcggtgctggccagcaacctgtccgacccgctctgcaggaccaccagcgccgccctggacggacggcaccaccactggcgtaccgaggcagggcgcccggaatacctggtgcgcgatcgacaggcgcgcgaggtgtcggtgagcccggtgcctgcggaagtcgatgtcctgcagctcacgctctggcgcgtgccggaggccgccgaggcgatggaagacagcgaggacgagccggtaatcgatgccatccaccaccggaagctggtgcactgggcctgctggcgggccctgaacaagcgcgattcggagcagcgcagcaccgcggacgccgaccgacacctcgcactgttcgagagctacttcggcgagcggcccaccgcgcgcgcgctgcagcagctatcgatcgatcccgccaccggcacccaacccatgtggttctga

SEQ ID NO: 494265 - DNA, 558 bp, Stenotrophomonas maltophilia
atgctgattgcatgcaagttcaagcgcccgaaggcgcccgttgagctggacggcaacgtgtacttcttcgtgccgatcgatcccgccaatgccgattcggagcacgtcgccgacgtcgagaactccgaccacatccagcggttgctgggcatcccggaggcctactacatcgcccgggcccagagcctccagaccgccaccaagccggtaccgccggtcgcccccgttgcagagcaggattcgccgccgccgcctgctggcagcagcaccggtgccggtaccgacgccggcggatcggacaccacgaccggcaccgacgccggcagcaacgaaccgccggccggcgccagcgtggccgccaccctgccgccggagatcgttgaggccgcggcccaactgaacggcctgagctggcagaagctgaaggccgagttggccaagggcggcatcgccaaggttgtgatcaaggctgccctcgacctggagctggccaagccggagcccgaccagcgcagcaccaccctgaaggtgctgagccaggcgctcgaggaagcctga

SEQ ID NO: 494266 - DNA, 447 bp, Stenotrophomonas maltophilia
atgtccacgaaactcgcaattggccgcaacagcggcgcatcgtcgccggccgccggcctgctggtggtcaacgactacagctggccggttgaagccggtgcggatggcgatctggtgttgatcggcgagctgccggccaaccacaagctgcacagccagggctcgggcctgttcgccaagctggacgccggcggcaagctggccgcgcagaacgtcaccgtgttcatccccgacgcgatcgacggcgcctctgcggccggcaataccgtcattgcgccgaccgcagtggttgccgataccgcggccttcgtcccgatgtccctgcacctgatcgccgaggccctgggctccaagccggtgaaccgcccggtctacgtgaagctcaataccgcccctggtgctcagcagggcgagctgatcctgcgcctggctgccttcccggcctga

SEQ ID NO: 494267 - DNA, 1110 bp, Stenotrophomonas maltophilia
atggcacagacgatcgtgggtctgaacgaccccaaggcccggaagctgtggtctgcggacctcatggtttcggtatccaaacagtcctactggacgcgcaagatgatgggcaaggggtcggagacctcgatgccggtcatgctgcagaccgacctggaacaggaagcgggcgacaccatcagctacgacctgtccgtgcagctgtccggtggcgtcatcgaaggcgaccagaaggccgagggcaaaggcgagaagctcgacttcttcaccgacaaggtcttcatcgaccaggcccgtaagccggtcagctgcggtggccgcatgagccgcaagcgcaccgtccacgacctgcgcaaggtgggccgcaaccgcctgaccgaattctgggcgcgcttctacgacgagctcttcttcatgtacggctcgggagcccgcggcatcaacgaggactacaacgtcccgctgaactacgccggtcgcgcaggcaacccgttcgagacgccggacagctcgcacatcctgttcggtgacggtgccagtaaggcatcgctgaccgcggccggcaagatgagccgtgtcctgatcgagcgcgccaacaccaaggccgcttcgcagggcggcggttcgacccaggtggcggagatccagccgatcaccattgccggcggcgagcacttcgtcaccgtcatgcacccgttccaggcgcatgacctgaagacctccacggatccgggcaactggctggacatccagaaggcggccgcggctgctgaaggtgccagcaacccgatcttcaaggacaacctgggcatgatcggcaacacgatcctgcacaagcacaagtccgtggtgcgcttcggggactacggcgccggtggtaacgttgcggcggctcgcgcgctctacctgggccggcaggccctggtgctggccttcggttcgccgggcaacggcctgcgcttcgactggtccgaggttccgctcgaccacggcaacgacatcgagatctgcgccggcgccatcttcggcatcaagaagacgcgcttcaacggcaaggacttcggcacgatcgccctggataccgccgcggccgatccgaacccgcagtaa

SEQ ID NO: 494268 - DNA, 216 bp, Stenotrophomonas maltophilia
atgcccaagctgcacaccaccctggagcctggcgacgtggtcctgatcccatcggggtcaggcgcgtcgatcacgttcaccgagaagagcggcaagcgctcgcgcgtgatcatcgaatccaacaccccggtgaccatcacccgagccggtgagcagcaacctactggcggcgcgctgcagcgcgtggcgcgccggccaacgcccacaacgggctga

SEQ ID NO: 494269 - DNA, 996 bp, Stenotrophomonas maltophilia
atgcagcagcctgacaacgcgggccagcagtcgctggccgcgaacgaactggaaatgaccgagggcgagcgtgcggcgctggccagtgctgacggtgccgccgccggtgatgcccccgcggcaaccgcgaccagcgatgcgccggcaaccgccaccgcgaccgccacgccggcggccgaaggctcagctgccccagcagcggccgctgcagcgggcggcgcggctcagcctgatgccgcggccactgctgctgcggcagtcgctgcggaaggggcgacccctgcagcgccggcggcgtccgagccgccgccggccacgccgttcgtgccgacctatgccgccgacgaacgtgactatggcaaggaaatcggcgagatcaacggcaagctccaggccctgaaggagaagtacaaggccggggacgtcgaagatgaggtgtatgagcagcagtacgaggatctgcgcgacgagcgcagccgcgtcgagcgcgcccaggacatcgccgccctgcagcagcagctcagccagcagaatgccgaccagtcctgggcgtacctgcagcgccagttcctgtcccgaccggagaatgccgcgatcgccgcaagcccgatccgcttcgccgcgtgggagcaggcgatgcagtcggtggtcaacgatgccgcagcttctggtcgccagctcaccgactgggacatcctggccggcgcgcgcgatctgctggtgaccgagggcctgctgcaggcttccgctgccgcgaccgccccaccggtggcgcaggcgccggcaaagccggaccgcagcgcaccgctggccgatgtgccggctacgctgagcaccgtgcccgctgcggctgacccgacttcccgatcgaccgccgatgctgctgctggcatggacaacatcgaggacatcgagtcgttcctggccgggaagtcggagagcgagcgcgatcgcatcctgcgtgatgtgccgggctccttcgtcgcggacaactga

SEQ ID NO: 494270 - DNA, 2172 bp, Stenotrophomonas maltophilia
atgcagacgatcgagaacttgcggagcgagccggcctacgaccccggcgccgccgacgtggccaccgcagcgcctccagatgttgagggccacccgctggacagcctggagaaccgacgcctccacgcgaagctgctggactactggtacaccgccctcgatgcgttctacgacaaccgcatcgagcagatgctggactacgacttctacgaccacatccagtggtcggaagaagaccgcgctgtcctggctgcccgccaccaggcgccgctgacctacaacaagatcaagatggccatcgactgggtcatcggcaccgagcgccgcacccgcatcgatggcgtagtgcaccctcgcgccgaggacgacgtcgacattgccgcggtgaagtcggagctgatgaagtacctcagcgacaccaaccgggtgccgtgggcgcgcagccaggccttcaaggacgcagcgatcgccggatgcggctggaccgaggaatcgatccggaccgatcgagcggacgagccggtgatggttggccacattccgtggcggcagatgcggcgggatccggtcagccgcgcattggacctgagcgactgccgctttctgctgcgggagaagttcgccgacctggactattccgaagcgatgttccccgatcgcatcgagctggtgaaccgggcggctcaggaccactacgacggcgacaacggtgccttcgacgaagagctggacctgccccaggtcttccgccgctacgacagccgcggccataccgtgaccggccgtcgcatcaccggccgggcctccctggatagccggtgtcggcttcgggtccgtctgatcgagtgctggttcaaacgcccagtcgcgcacaagcggctgtggggtggcgaattccggggcgatcgcttcgacccgaacaaccccgaccaccaggcggcgctggcagccatgaagggccaggcttcgccggtctactcgctctccgatgccgtggtcgaggaaatgtggtgcgcgattttcaccgagggcggcctgctgcagctcaaacgcagcccgttccggcacggccggttcccctacaccccgtactggtgctatcgccgcaaccgcgatggcatggagtacggcctggtccgtggtgtacgcgactcgcaggaagacctgaacaagcgcatgagcaagctgctctgggccctgagtaccaatcagctgttctacgaagaaggcgcaatcgacgaggaccgcgtcgacgaggtgaagcgggagatcgccaagcccaacggcgccattcccctgaagaatggcggtctggccaggatcaaggtggagcgcaacctcgatgtggccgaggcgcagatcaagctgctggagctggacgcggcgcacatccatgacggctccggtgtgaaccgggagctcctgggccgcgagaccaacgcggccagcggccgggcgatcctggccaagcagcaggaaggcgccgtgagcaccgcggagctgttcgacaactaccgcctgggcatccagctcagcggtgaaaagcagttgtcgctcaccgagcagttcatgaccgaggaacggcagttccgcatcgtaggcgagcgcaaggggctggactggcgcgttatcaaccagctccgtctggacactctcaacaacgtctgggtggtcgacaacgacatcagccgcaaccaggccgatttcatcgtcgaccagcaggacttccgcgagtcgatgcgccaggccttcgccgagcagttcttcgacatgctgggcaagctgcctccagagatgtccatccagctgctggacctggccttcgacatgatcgatatgccgggcaaggacgaggtggtgcagcgcatccgcaaaatcaccggccagtcggacaacgatcaggacgtcgacagccccgaggcgcaggcgcgtcagcagctggaagcccaggaccgcgaggtcgccctgcgcgagcgcatggccaaagtcggactggacgaggccaagcgcgaagagatcatggcgaaggccaaggctttgcagatcaagaccaagggtgacgcgctcaacgttgccgagctgatcgagatcctgctccccctcgctccggcggccgaccgcctcctgagcacccaacagacccccgaggaaaccgctcatgcagcagcctga

SEQ ID NO: 494271 - DNA, 474 bp, Stenotrophomonas maltophilia
atgagcgccgaggtcgagctcgcccctgatggcttcgtatggtgtggcaagaagggggacctcaccctctacctgacccacatcgtgcgcgatggcgacgacgacgcggccctgtatatccggaacgaaaaccgccgcgtcgagggtgtgaaccccgtgaccgggatgatcgcctacggtagcccggcctacgtggttccgttccgcgacttctggatcttccgcccggaggacagggatcggggccggcaccaccacatcggcgacatggtcgctcgcctgcagaacgcctcggttgccctctacggcctggacgtgcccgcctaccggcaccgcatcctcgacgccatcctcgaattctgcgatgacgtgaagaacttgcggccgccggcggagcagacccgggagcagtggctcgccgagatggcccggatggggatccagatcaagatcaacgggcagaaggtgaactga

SEQ ID NO: 494272 - DNA, 189 bp, Stenotrophomonas maltophilia
gtggaagaccttgacgtcgagcagctggccattcacctgcagcaggcccgcgcctacgcgcggtacctgccagggggcgagaaccacggcagcctggttgaggaccacgtcctgtcgccggaccaggccgccgcggcggtagtggaagagctggacgcagccctggggctgctgggagcagaagcatga

SEQ ID NO: 494273 - DNA, 279 bp, Stenotrophomonas maltophilia
atgagcgtttccccccgcgagcggaaccaacccaccacggtcgagctggtcgacctgctgtcgatgctggtggccgccgctgatgaagggcaactggtatgcgtcgctttcatgttgcggtcgccggagggcgacacgatggtggactatcgcggcggccacgagctgagcgagctcaccgctcgcactgtcctgcagcgcattgcccaggacgtcgccggcacccatccggcgatcgccgcgcagattacctccgacctggccaggaaggcgaactga

SEQ ID NO: 494274 - DNA, 1554 bp, Stenotrophomonas maltophilia
gtggaggaactgagcgaccaggacgccagccgaatcatcgagaagctgggtgatcggtggtggcggctgaacaacctgtattacatcaccgacaagttcggtcgacgggtgcagttcaagctgaatgaggtgcaggccgatctcgacgacaacctgcacacgttgaacctggcgctgaagtcgcgccagcatggcatcacgacttgggcctgcattcgcgccctggacatggcgctgttcaagaagaacaccaaggccggtgtggtggcccacaccgccggcgacgccgcgaagttcttccgcagcaaggtgctgtacgcctacgacaacctgccggactggctgaagaagatccggccggcagtccggcgcgacatgcgcgacggcgtcctggagctggccaatggctccagcattgaggtctcggtgtcccaccgcggcggcacgctgacgttcctgcatatctccgagtacggcccgatgtgcgccatgtacccggagcgggcaggggaggtggcctccggcgcgctgaatgcgatcgcctccggcaacatcgtggtgatcgagtcgaccgcctatggcgccgccggcgacttctacgagcgctgccagacggcgatcgagctggaccggcagatccgcgccggcaccgccaagctgacggcgatggattaccgcttccacttctatccgtggttccgggatccgatcaacgagctcgacccggacggcgtcaccctgaccgccgaggacgaggcctacttcgccaaggtcgaggcggagatgaactacacgctgcggcccgagcagaaggcctggtacgtcaagaaggcggccgagcagcgcgacaagatgaagcgtgagcaccccagcacgccggaagaagccttccaggcgagcaccgagggtgcgtactacggcaaggaaatggccgccgccgacagcagcggacggatcaccgacctgccgatcaacccgcaggtgcccatccacaccttctgggacatcggccgcagcgacgcgacgagcatctggttcatgcaggagaacggcccctggctggacttcgtcgacttctacgagaactccggcttcggcgtggcgcactacgccaaggttctgaaggagcgcggctacctgtacggcaagcactactggccgcacgacggtgccaatgaggactggtccgccaacgagaacagggtgcaggtggccggcaagcttgggatcaagccgattgttgtggtgccccggatcaacgacatcaccgagggcatcgacatggtgcgcaacatgctgccgcgctgccggttcgacagggtccggtgcggcccacccaaggcaggcgagggccgcggagggctggaagccctgcgccgctacaccaaggtctggaacgagaagaccgaaacgtattccgacctcccattccacaactgggccagcaatcctgccgacgcgttccggcaggcggcccagggctatgtcagcagcagcggccgtcgcgtcggcgagtcgcgcggcacggccaacgacaactggagaactgcatga

SEQ ID NO: 494275 - DNA, 609 bp, Stenotrophomonas maltophilia
gtggccggaaagatcgacccggcgacggggctgcaggaccagcaacggcggttcgcggacgagtacctagtcgatttcaatggcaccgcggcctacatgcgcgccggctacagggccaccggtgccgcggccagcgccgccgcggcgaggctgctggccaaccccaaggtgcaggcctacctggccagcaggaaggaagagctgctgctttcgaagcgggtcgatcaagaagcggtgctggcccggctggcgttcatggcgctaggtgacatccgcaccctgttcgatcagcacggcaacctgaagccgatgagcgagctcactgcggaagaggccagcctggtccagggtgtggaggtgttcgaagagtgggaggggcgaggcgacgagcggcgcgccgtcggcctgaccaagaagatcaagctggtcagccgcctcgatgcggtcaagaccttggggacgcacttcggcatgttcgctaagaaggtcgagcacaccggcaagaacggtggtccgatcgagagccagacgcggatcctgggcgacgtgatggatctcatcgacgggtccgacaccggccccgggcctgcgacctcgcggagcaagtaa

SEQ ID NO: 494276 - DNA, 465 bp, Stenotrophomonas maltophilia
atgtaccgactgaccgataaccccgacatactgttctgcctcgaaactggtgctttcattccgcgcggtaactacctgtggccgaccgagtggctggagtcgaacacaccgttgccgatcccaccgccctacgagctgcactcgcccgagcactaccgcgccatccgcgcagcggcttgggcatggatgactgagttcgtgcaggagcgcctatacgacacgatcgagagctgctgcagctactacgacagcacggtcactcgctaccggctcgaagcccgcgcaatggtcgcgtggcgcgatgccgtgaatcaggcgctggaagcgctcgtcgtgtcgccgcccgctggtatcgagacctgggaacaggtccgcccacttctgccgcaaccggaggctttcagctggccgtccagcgtcgagctcccgctcggggtaggtgacggccccgcagtgcaactttga

SEQ ID NO: 494277 - DNA, 1065 bp, Stenotrophomonas maltophilia
atggctgcccgcactccactgatcctcaaccaggccacggcgcgtgtcgaagaattggccgtaggcgacttcattcccggtgccctgatcggtggcatgttcggtcgcaacctgatcatcaatggcaacttcgacttctggcagcgtcgtgatacctacactcaatccagcaacggtcagggttactgcgctgatcgctgggttgttgctgctgcaaattgcacccaccaagcacagcgcaatgtaaacattccgggcgatggtccgcatccgggagttatccgcttccatcgtagtaacgttactggcgttagttcggtctcatctgcctacatcggtcagtatattgaaaatgtgcagacccttgctgaccgagacgctgtcgtctcgttctacatgtatggtccaccaagtggtgcaaaagttggtgttcgtttgattcaatcattcggtactggcggtagcgccatagtttctaaggaacttggtgtattccagttgcccgcatctggttgggccaaggtagaacttacgggtaagttatcgagtcttgcaggtaagaccattggcgctaacagcagtctgtatctcgtgattgactactgcgctacggctgcactatatggtggtgctttggttggtcaaaccggtgtgttcggtatttcacgggtacagctggaagaaggtactgctgctactcctttcgaacagcgccatgacgctgtcgagctggccctgtgccagcgctactaccaaaagagttatccaatcacgaccgccccagggtcgaacacaaacgaaggtcgatacgtgtggggcaacggtctttgtactaaccagatcacccgattggtggttccattcaaggccaccatgcgtgcggccccggcagttacagtttatggcgcccccatcggagcggccggcacgatttcccaggccgacggttcgaatgtatcgggcgtggcagaggcaataggccagggggcattcaacgccgcatggaacaataacaacgggcagtggggtggttggttccattggaccgcagacgcggagttttga

SEQ ID NO: 494278 - DNA, 204 bp, Stenotrophomonas maltophilia
atggcagcgcgccgtccgcttgtcctcgatacgagcaatcgcaccagggagctgcccgccgatgacgtcctggtcggtgttccgctgcaggtcgcgatcgggctccgggcgggcggggtgttcaacatcgcgctgacctcgacctacacgatgacgatcggcctgcgggctggcggcacgttcaacgtacaggcgacaacctga

SEQ ID NO: 494279 - DNA, 528 bp, Stenotrophomonas maltophilia
atggccgacaagaccctgcagctcaagaacaacatcatcacggaggtcgaaggcatcaccgcgtcagctggcgccgccgacgctggcaagatcgcggccctcggcacggacggccgcttcgacgactcgctgctgccggccggcattggcgccgacaccaagatctatccggccagcgaggtgctggccgccggcgactacgtgaacatctgggatgacgccggcacagccaaggtgcgcaaggcggatgccagcgccgccaatgccggcaagcgcgcccatggcttcgtgcgcgccggcgtgggcaccatcggcagcgacgccaccgtttacttcgaagggccgaacagctcgctttcgggtctgtcccccggggcgacctacgtgctgagccacaccacgccgggcggtgttgtgccgctggcgtcggggaccaccacggcgggtcacatcctgcaggtcctgggcgtggccaccgacgtgggcgagatcaacgccgagatcggaaatccggtggtccgggcctga

SEQ ID NO: 494280 - DNA, 549 bp, Stenotrophomonas maltophilia
atgcctgtgattcgagccagcgagggcgcggcccgcgtgatcgtggtcgagcgccgcggcgccgtcgccatccgcgatccccgcacgccgatcgtcgcgacggcccggccgacacaggtcgaggcaatccaggcagacacgcggacggtcgaggttgcagcgcgcggcgcgcagggcccggtcggtccggccggccgagacggcacctcgcccgaagcgacgtacctggtcggtgagccgatccatggccaccgcgtggttcgcctggacaacggcaaggcctaccaccccgacacgacggtgctggagcacgcgcaggcctgcatcggcatcgccctgcagtcggccaacaccggcgaagtcgccgtgcgcctggccggcacgatcgaggaagccagctggacctggggtgacggcgcagtgtggtgcggcgccgacggcgcgctgacccaggctccaggcacagccgggtggctgctgtgcgttggccgtgcactcaacgccaccactctgatgatcgacttcgactcacccatcgcgcggatctga

SEQ ID NO: 494281 - DNA, 405 bp, Stenotrophomonas maltophilia
gtgagccggacgcccgctagctttagcctcacggtcgtgcgcggcgcgacgtgggaggacgacttcacctacaccaacccggatgggagcccgttcgatctgaccggctaccaagcgcggatgcaggtgcggacgctggcgggccagttcgggctgaccgaggccgacaccttgatcatggagctcagtaccgcggacggctcgctggtcatcgccgatccgttggacggcacggtctcgatcaccgtgccagcggtggccaccgaggtgctgaacccggcgaacgcacgcaaggtgaagcactgctacagcctggagctgttcaaaccggcgggcgcggatccggagtacgtgatcccgctggtggccggcaaggtcactgtccagggcgagacgacacgctga

SEQ ID NO: 494282 - DNA, 285 bp, Stenotrophomonas maltophilia
atgcagaaccagcaggcaggcacaaccccactggcggagccgcagaccccgatcgaatccgccgtgaaggacctggcgtgcacgcaggtggacctgcagctcgctgtcgagaagctggcgcggcgtcttgcgccagtgctggcggcaagcaagccggacgcggcaccgtcgacgggccgggcactcggtgcctcgccgttgctcgaagagatcttccagcggcgggacgctgcggcggccaccctggacatcatcaacgagctgcacgctcagctgaccctgtga

SEQ ID NO: 494283 - DNA, 297 bp, Stenotrophomonas maltophilia
gtgaactggcgcctcgcaccgatcttcatcatcgtcctggcgttgactgcctgcggacacgagttgcgccgcgtgccggcgcagtgtgacgcgatgtgcttccgtccgtgcgtcgatgccggcgaagacacgggcgtgcgtgtgacggccgatccggcagccgctgacgcctgggacaacatcggcggggacgtggtcggccagctggccgacaagctccgcacctgcgacgtgcgacggaaggcctgcgagcagtgcctgcgtcggctcgacgccaagaacgtaatccagctttga

SEQ ID NO: 494284 - DNA, 576 bp, Stenotrophomonas maltophilia
gtgacccagaacccatcgatcgggcggatcgtccactacaccctgagcgataccgacgcgctccgcatcaatgcgcgccgtaccgatggcccggccatccaggagcgcctgctcgacaacacctggccggtgggggcccaggcgcacgtcggcaatagggcctccgccggcgacgtactgcccgccctggtcgtggcggtccagccggacggccaggtcaacgcccaggtgttcctggacggcaatgatgtgctgtgggtgaccagccgcgacgaggcgagtgaggaatccggcagccaccccggccgctggcactggccgacccacgctgaagcatcgcgaggaccgaaggccgctgacctgttgttgcgcgcagcggccgcgtttcttgacaccctccccgccgcagagcgggcgactgccgaggtgagcacgcgcgactatggacatgtgcttcaagtgcactggacgagcggcatccagcggtggcttgcagagcgtcgcgggagctcggacgcagattgggtgcgctgcggaccggacggacgagtgaccccaatcaaagttggcggctga

SEQ ID NO: 494285 - DNA, 543 bp, Stenotrophomonas maltophilia
gtggctgacagccagctcaccaccaagcagcgcatcggcttcgccgccgcgccgctggcgctgatcggcgcgctggtcgctgccttgggcacgaacgactcggcgcacgaagggcgccgctacacgccgtactacgactcggccggcatcctgactgtctgcgccggcatcacgggcccggcggtggtgaagggcaagcgctacaccgacgatgagtgcaccaggctggagacggcctacgtgcgcaccatgctcggccacatggggcagtgcgttcgcggcgagttcgagttccatgagatcaaggcctggggccacttcgcgtacaacatcggcaccccggccttctgcgccagcaccgcggcgaagcggctcaacgccggcgagcgccaggctgcttgcacggagatgtggaagtggcggtacgtcacgatcggcggcgccaagcgtgactgcgcgctgccgcagtggagctccaagtgcggcggcatcatcgatcgccggcagtgggaaatggccacctgccaaggccgcctgcagtga

SEQ ID NO: 494286 - DNA, 255 bp, Stenotrophomonas maltophilia
gtgagcatcaaagagcagatcacaacggacctggcggtcgcaggttcgaagatcggagcggccgtcagcgtcaccgctgcaacctactcgccgggctacaccctcagcgactgggccctgatcggcacgattatcttcaccgtcgtccagacgctcaccgtgctgatgaaaaactggggtgactggtcggcctggtggacagcgcgcgtaggcaacgccaggcgcttctgggcgtggatccgccgccgtggctga

SEQ ID NO: 494287 - DNA, 435 bp, Stenotrophomonas maltophilia
atggtaggacaggtagtttccctagatggacggtcgctagtgtcgcctgatgacgcactgcgtatcgcagcagctttcctcaaggcggacggatccacgcgcggccaggtgatcactgcctgtgtcgcatgggagtacgctctgcggctgagcgtggatggggttcaatcggtcgaacaacgcgtcaaggtttggccggctaaggatggtgggctcccctaccgtttcgttcgcagtgttgcgatccaaacccccgaaatgacggcgccgaactatggcgtcggccaagcaaacacggtcttcgacgctctgacggaggcaatgcacttgacgctggcgccaatcgaacatgctcgggcaaatggacaccgtttcagcggtagctggctctggttcgatgcaaactactcagatttgccaaggtcggacgattga

SEQ ID NO: 494288 - DNA, 504 bp, Stenotrophomonas maltophilia
atgattgagaccgtagccggcttgacagatctgcagatcaagtttttcacggcgcttggccagatcctggtcgccgtagcagtgggcacgattgcttggcggcaatggcgtactgcacaacagcaggctgaaactgctcgcaagaagcttcgcctggatctgttcgaacatcgcattcagacgttcgaccggattcaggaattgctggagatgaacctctccggccatgtcagcgaaaaagcgtcgcaagagctttgggatctcgccggggcttcaggaagggtccgttggcttttcggcccccgaatccagcagcgcttcgaagaagaggttttgggaagcctcaacgcagcgaccagggcagatcaagccgttgacagggcgcagtccttggatgagttgaaggtagcaagcaaatcacgtgaacgggccaatgaagagctgggcaaggcattgcggagcgttccagacatttttgccagctcactcacattgcttgactag

SEQ ID NO: 494289 - DNA, 924 bp, Stenotrophomonas maltophilia
atgaacgagattgcagtcggtaccaccgcgctcgctgccgcgcgcgagctcgaagtggcgttcctcaaggggaagaagatcccgtcctgcgccaactgcaacggcaaggcgagggtgtgctggcctggccgggagtcgcagctcgtacacttccagtgtcggcactgcgggccgcagggagccatcttcgatagcagcgcgccagtccggtgtggccgctgtggtaccgccccgactggcctgttcccgcgtggcgcacagatccagtgctgcagctgcggggcatcctcagccgtgttcgttggccaggatcctgccggcgtcctggcggcggcgctggatgcctggtgccgacgtgcaccggttgttccgccggcggcggacgacagtgcaggccaccggcgccgcggcgcagccccggatggattcgacgacgagggcaagggcgatgtcttggagctgctatcgcgcctgctggttggggggagctaccggatgccagtggaggggcgcagtaccttggcgccgctgggcagcagcgacatcgccggcgcggtcggctacatgcgcaacccgctggaaaagcacaccgcactggctgtggcgacgcggatgggccccgccgcgatcgcacgactttccctcgccgcctaccgtcaggtggccaaagacgtgcgtgcaatgcggccgcggcctctggatctcggcaagcccgccgatcgctggcgccttcgcttggtgatctacgacgcagcccacgaactggtgtggccggagcggcgccagcccttcgccggcctggccaagtccgccaagatgcgcaagggcaactacatcaagactcacaagtgcgccagcgctgtcctgcaggaagcgcttcacggcggtcgcaaggggtttagaaaggcgatgtggcaaatctag

SEQ ID NO: 494290 - DNA, 828 bp, Stenotrophomonas maltophilia
atgaaacctgcagagctcaaggcgcggttcccgacggaggctgcgctgtgcacgtgcctgatcgactgcctggccgcggccggcggctgggagatataccctgagacggccggcttcgacatcctcgctgtctggaaggccaccgggcaccagctcggcattgaggcgaagctgcagctcaacgccaaggtggccgatcagatcctgccggcgcactggagcaacagcgaccagcggggcccggacttcagggcggtgctggtgccctgcacgacggaagcgaactacggcattgcacggatgctcgatgcgctgggtgtgcaggtcctggtgccggacagctgcaccggccggtggaagacggagcccgggcagcagatccagcgcgaggtgcatcggcatggcctgcaccaggccgccccatgggaccgggcatccggcgatctccgcgagtgggggcccacggcatggttcgactggaaccccaccaagcgctgtgagctgcctgagtttgtgccgaaggtggccgcaggtgtaccggcgccgctgcagttgacgccatggaaggtcggcgcgctgaaggtgctggccgatcttgaactcgatggcttcacgacggcgaagggtgtccgggcccatggcgtggatccgcgccgcttctgtgcgaccgacggatggctgaagcaactgggcggcgggaaatgggcccgcggaaccctccccgctttcgaggaccagcaccccgaggcctatgcccaggtgctggcccaggcgcgcgccgcgcgcgctgcagcggatcccaagaagaccctggaacagacgccatga

SEQ ID NO: 494291 - DNA, 339 bp, Stenotrophomonas maltophilia
atgagcggctggagatccagtggccgcgtaggcggtaccggcgtcgacctcagtgcggtggccaccaccgacctgctgcgggagatcgaacggcgctgctcagctggtagaccctcgaaggcccagccgccggtacaggaacggccgttcccgacaaaggcgctctgggccgaagacaaggtgaaccaggcacgtgcgcggcttgccgagctccgcgcgctgccggcgccggcgagcgaggctgagcgcaccgcccgttccgcccaggacgctcaactggtcgccgacgtcgtcaagtacgacggcatggccaaggcattcgcgaggaagggtcaatga

SEQ ID NO: 494292 - DNA, 432 bp, Stenotrophomonas maltophilia
atgagcaaccgtgggctccgctacaaccgcatcgaggacatgccgcagggcatgcagcagctgctgcacaaggctggccaggctgcgcctgtgcgtgggccagccgagcaccaggtgcgtgcaacgatggagaagcggccgaagtacggcaatgtggtcaccacggtggacgggatccgcttcgactcgaagcgcgaggcccgctactacgagcagctgaaactgcgccagcaggccggcgaggtgcacttctggctgcgccaggtaccgatccacctgcccggcggcaccaggtacgtcctggacttcctggtgttcctgcgcgacgggcatgtcgacttcgtggacgtgaagggccgggagacgaaggaattccgcatcaagaagcgcgaagtggagcaccactacccgatcaaggtgttgctggcatga

SEQ ID NO: 494293 - DNA, 540 bp, Stenotrophomonas maltophilia
atgatcgaccaggagcaactgcgcagctaccaccggtcgcaggtgctgtatgccctgcaggaggccagcgaaccgatgacggcctccgaagtgcacgaggccatgacgaccctggcgctggccatgggccaccccagggaatgcgcagcgatcaccccagccgctgtggccgggatactgcgtggcatgctcggcgagcaactggtcacccagggcgacgacagggcgaatcgccgttatgggcgtgccgagccgacctggtcgatcgcagctggccaggcgcgggtcctgcagccatcggccccgggcaggagcacggccgcattggctgccgcgtcaccgatggcggggcagggcacccagcttcgccagatcaccattgatcagcgcctggcattcctgcaggccgagtgcgccgcgctgctggcggacgtgacgaaggaacatgcggcgttcgagctccgagttcgaaaccagctggaggcgttcgaagcgcgcgctgcacggttgctcggtctaccgcaggacggtggccaatga

SEQ ID NO: 494294 - DNA, 591 bp, Stenotrophomonas maltophilia
ttgacggcccgggctacgcgcacgctgtgggtgcgcatggctgagatctacggctatcgatggaccagcgcctacggcgaggatcccagcggcggcgctgccgcgacctgggcgaaagggcttgccggtctcaccggggagcagctggccgcgggcctgggctcgagcatcgcctcggccgacccatggccaccgaccctgccggagttccggctgcgctgcctgggtgtgccgagcttcgccgctgtccgcaacgacaccggccgccgggacggcttcacgcgcctggtgtggcagtacctggacggccatcgctaccgcacatcgagtgccgacaagagcgatcgcctgttgcgcgaggcctacgaccaagcgcgcgaatacgtgatgcgcggcgggaagctaccggaagagccggtggcggtcctgggccaggccgctgtggccacgccggtaccggccagccctgaagcactccgccgtgctgagcgcgagatcgcggagatcttcggcaagggatctgcagagccaggcaacgacgaccacccgccggcgacgggcaagatggcagcggcagggctggatcgatga

SEQ ID NO: 494295 - DNA, 1047 bp, Stenotrophomonas maltophilia
atgagcaacaaaatcacggagctctgctggaagctgcagatgccgccgcccgcaaaggcgttgctgatggcgctggcgtggcacgcggacgacttcggcatggcctatccgggattcaccacgttgatccagaagacctgcctgagcaagaccgcgctgctcagcgcgatcgcgtggctggaagacaaccaggtgctgaccatccgccgcggcggcagtgatgccggcggcaccaagtacagcaaccggtacagcctcaaccttggccgcctggacccagaggtgttcgcgtcgaagccacggcgtgcatccaaaccggttcgccagacggaccggtccgagaacggcgaaggtgttgaccggtccggcacgcagaccggtacgaatgccgaaccggtacgcgatacggacgggttggaagagactgaaggctccgaccggtacgcgggaagtaccggtgcgcaagaacgaccggtacgtctcgcgaactcgaccggtacgtctggcggacctgaccggtccgtctcgcgtactcaaccggtccgcgagacgaaccctaaaggtcatgaaaggtcagtaaaggtcattgaaccgtcaaacgcgcaggcgcgcgacgacgacgcggcggtgccacagctcagcgacgacgaggtcaagcgcgagctgatgggcatcccccgattgccgccgggtctggacccgcaagtcctggccaggttcgtgcggcaccgccgcgtgctggggaagccgatgacgatcagcagctggctggaactgcagccgcgcttccgccagctcacggccgacggccacgacctcaaccgctccctgcgccagacgatggctgcaggcctggcactgcccgtaacaccgaaacccgaggggaccgaccatgccaacaattcaggctctgctgccgaacgagtccgacgtcgcgcagaggcagacgagctccgtgacgccgctgcagaggcagacgccgccgccggcacagcaggcgcccttgacggcccgggctacgcgcacgctgtgggtgcgcatggctga

SEQ ID NO: 494296 - DNA, 528 bp, Stenotrophomonas maltophilia
atgccctggatcgatgaaacctggctgcaggacgcactggcggccctgaaggccacgtgcgatgtcgacgcacacacccgcaacgcgatgatccagttcctgctggacaacggcttctgggatcaggagaagctgaaggactgggccagcgcggttgccaagttcaacagctgcctcaacccgaacaaggccgagttcttcaagatcggcgagctgtgggcgctgatgcgccgcttcggccggcaccagctcttcctggccatggccgcggatctcggctatgaggtccgcccgatccccactgagcatcgccggcaggagctgctgcagcagctggtcgacgtccaggcgcagtgtgcagctgccgtggagcgcgtcgccggccagctggaacgcctcaacacgccggcgccggagccgcgcccaggtgccatccatggacagggtcgcgcgcagttcagcacaagcccgagcgattggagcgcgcccaccaggggcaacgccgtccaaagcgtgggctgcccgtaa

SEQ ID NO: 494297 - DNA, 321 bp, Stenotrophomonas maltophilia
atggattcaattgcggaactggagctgcgccagcagctggcgggctgccaggctcaaatcaatgcgctgcaggagaagctggagatcactgccggcagtgcgttggcgacaaacgtcgccctgcacgggctcatttcggcccttccagatctcgacctcgccggaagagcgctcgcaaccgtgcgacgagacttcgaaggcgcctctgacccggcgactgcggagctggcaatgtcgtttgaggcgacatttgacaacctgcagaagaccatcgagaaccggaagaacgttctggcgcgcaaggctcaatctccccagtga

SEQ ID NO: 494298 - DNA, 363 bp, Stenotrophomonas maltophilia
atgaccccatccgaactggaagcccgattcgcccaatacgacgagcgcattgccgcactcgaggatgcccacgaggccgacacttgggtcctccacgcgctcattggcagtcatcccaatttgggcgacctgctgaagctggtgcgtcgatccatgcaagcaatgcgcgaaagactcgcaaacggaggcccagccgcttcctgcgagcgggtcctccgccagctggccgatacagaagagttggttctgaaggtgatcgcgattcgccagcacagcgtgcgcagccagacggaatcggcgaaacaacaggctcaggagtcacagcggatccagcgggggccggaaccggagcggggacgatag

SEQ ID NO: 494299 - DNA, 258 bp, Stenotrophomonas maltophilia
ttgaacagcactgaagaagtcgctttgcacgcccaggtcacgttcatgcatcgggcccttcgcgcattggtgaagacgcatccgaatccagacgcccttgccgaggcctggcagcaggaagcctccgatgcgctggcgcaccttgggatccagcagttggcgcttgatgcgccccaggatctgaaagacgagtatcagaaggcgttttggcagtggaacgaggtgattcgcgatcagcagccgcttcgcgaggactga

SEQ ID NO: 494300 - DNA, 321 bp, Stenotrophomonas maltophilia
atggacgccgataccctcttgcatcaaaccgtggtgcgcctgcgtgcgcatgaagggaagtacgccgagatcgcccggcagaacccggacatcggctattcgtggctgacaaagctggcgcacgggcagatcacgaacccgacgatcgccagcctgcagcagctgatcgaggcgctgaacgccttcgaaggcttggagcggggcggcctggtcgaagtggtggcgcaggccgatccggttatggatccggttatggaacagcgcgccgaaccgagcggcgacgtggacgccggtcgcatcgtgccgctggagacagcctga

SEQ ID NO: 494301 - DNA, 336 bp, Stenotrophomonas maltophilia
atgaagcacctgaacctctctcaggcagagctcggccgcaaagccggggtcgcgcaaactctgttgtcggggctgctgagcccggatggcgcctccaagaacccgacgtcttcaaccgtcgacaagctcgccgacgccttcaagatcacaccttggaagctcctggttcaggacatcacgctggatagcctcttggacgacgaggtcgaacgcctggtggacgccttcgccacggtgccaccagagggccggtcggtaattctgcgggtggctgatgctgaagttcgctattcccaggtgccggcaaccgttccgatcaaggacacagggacatga

SEQ ID NO: 494302 - DNA, 300 bp, Stenotrophomonas maltophilia
atgcagacgggcgcggatgtattcattcaccgccatacgcgcgtcatcaccttcagcctgccgtcccaatggcgtgaccacgcgaacaagctcgtcaaggaacgtttccaggcgcagctggtccagtccgaaatggatgcggcgctgctgaagctcgcggtgttctggacctgcgcgatgcaaagcgatcctgctcgggcagagcaattcgccgacgccatgtatgacctccgcactgccgcgggaggcgggatcacgcctggcctgtccctcgaagtcaggggattcaccggccactaa

SEQ ID NO: 494303 - DNA, 489 bp, Stenotrophomonas maltophilia
atgtctgcactgtcttcgtcgctgtacctcgcactgggggctctcggagccaccggcattggcgccttcttctcctcatcgtccccttccacagacgaacccggccaggccgtccgggcaccagctgcactggtgatcaccagcccgcgcatctgcgcggcgctggaggtctacaccctggccaacgagaacgactggggcctgcgcaccaccatcgcgcaggcagtgctcaacggcttcaacgacgccggccgtgtgccggactgcgccgccggcgtctccgccgcgctggccaaggacttctccccctatcgctggcagctcgcgctcgacgccgtcgacgcggttgtcgccggtacctattccgtttcccccgacgcctgcgcccgggccaataccgtcgtccccctgtcgacggaagccgcctcccctgtggtggcccgggcgcagtgcgtcatctatgacctggctttcgtggaggtgcactga

SEQ ID NO: 494304 - DNA, 432 bp, Stenotrophomonas maltophilia
atggccgccaccgaacgtcgctgccgcgtctgcagctgcaccgatcagcaggcctgccccggcggttgctcctgggccggccccgacctctgcagcagctgcgccacggccgccggcgcgggcgccgaaggcaccatggcggtcgtggtgcgccagcgcctgctgatcgccggcagcagcatcaagctcagccgtaccgaggccgtggtgatgcaggtcctggtcggtgcgcccgatcgcctcgtggaagtcgacgcgctgcatgccgcgatgtacccgggcagcaagccgccgtcgcgggagtccaacgtcctgcaggtgctggtgtcgcgtgtgcgccgcaagctcgctgccgctggacacaagcacgccatcgagaccatccgcctgcgcggctaccgcttcgtcatgccgcaagggggtgccgcatga

SEQ ID NO: 494305 - DNA, 273 bp, Stenotrophomonas maltophilia
atgaacgccccgtgcaagatcgctgcgatccggcacgcggtgagctcgctccacggagccgctgacgacggcgctgatacccgccgctacgccgacgcgctgcaggaagccggagctgccattgatgcgttggtggcggccgacgaggactacgaccaggcgcgcgatcggtggctcaactcgccaagcgatcacgaatcgttcgaagcggcgcgcgaggcctgggcgcgacgcgcggttgccctcgcccgcgtcaaaggcggtgccgcatga

SEQ ID NO: 494306 - DNA, 129 bp, Stenotrophomonas maltophilia
atgagggcggaagagatcatcgccgaggccaccgcagtcctgttccggcgggtgctggccattggcggcacggccggcttcctgctgggcgtggcggtagggtttggatcccgggcggtgctgtcatga

SEQ ID NO: 494307 - DNA, 249 bp, Stenotrophomonas maltophilia
atgaccatcgtgaacatgacggtcgacgccgagatcgacctcgacgacctggtcgagaacctgggaccgaacagcaaggaatacctcacgaacctgctgaaggtcgacggcgaagcagcgcgctcgccagatggccgcaccttcgaacagatcatcgaagcggcgttcaatgaggcgcgggcaatgccctcagtaccgcgggcgttcgtcgagctgttctgggtagtgcacgggagggccatgtcatga

SEQ ID NO: 494308 - DNA, 264 bp, Stenotrophomonas maltophilia
atgacggcagacctgcacctcctggggcacggcgtcgacgcgatcctgcagcacgacctggaccgtatgccgccggcgatcacccccgcggcgcgcgtgaagcgctaccagcgcgcggtgtcgattgcaccgccggaccagtggcgcgcgctgcggatccgcttcggcacgatcttccagatcgcctggagcgcggggatgaagccggacttggccacctgggcgcgcaagttccagcgcatagcagaggcctgccgaccgtga

SEQ ID NO: 494309 - DNA, 159 bp, Stenotrophomonas maltophilia
gtgaggctcttccacgtccacatcccgggcgtggctggaccgcacagcgtcatcgcagaagccgagcaggccgcgatcgacgacgcgctctacaccctgggcctttccgagctgcccgaaggcagcagcgtcacttctgaatcgaccggagacacctga

SEQ ID NO: 494310 - DNA, 903 bp, Stenotrophomonas maltophilia
atgttcttccgcaacctcacgatgttcacctacccgcagctgcagatgttcgactggcaggacggcctgcaggcgcgtgccctgaagccggtcggcccgctggaaatgtgctcggccggcttcatttcgccattcggccgcgaagagaaggaactgctgtcgcacgaaatcggccgctgcatgtggatggccatcggcgccgaagagaagatcctgccgccggcggtggtgaacaacctgctcgagctcaagctgctggagatcgaagaacgcgacgggcgccgccccttcggccgcgagcgtgcgcgcatcaaggacgacctgctgcacgagctgctgcctcgtgccttcgtccgcccctcccgcacggatctgtacctggaccaccagcgcggcgttgtgttcgtcgacaccagcagccgtaagaccggcgaggccgccatgagccagctgcgcaacgtggtcggcagcttccccgctctccccctgaacgccgaggttgcgccgagggcgatcctgaccggttgggctgccggtgggcccatgcccgacggcctcagcctgggcgaggaatgcgagctccgcgatccggtcgagggcggcgcaatcgttcgctgccagcaccacgaactgcgctgcgacgaggtcgacctgcacctggagaccggcaagcaggtcaccaagctcgccctggtgctggacgaccacctctccttcgtcctcggtgacgacctgatcgtccgaaagctccgcttcctggacggcgcagtggagcagctgcagcacggggatgaagacggccggcgcgccgagttcgatgcccgcttcgccctgcagatcgccgaagtcggccggctctacgacctggtccgcgagcacttccgcctcaccacctacgcatga

SEQ ID NO: 494311 - DNA, 246 bp, Stenotrophomonas maltophilia
atgaatccgcatcgtctcagcactggccgctcttccctcgccaccctgatgattgccctactggcccagccgacgcgcgccgcgcgcgccgtgcctgtccgtcgcatgccggcccgccatcgcaccacctgggcaccggccggcggtggccgggctgagcgtgctcgccgcctgcgccagatcgaagctggcaccttgaccactgccggcggcctggttccgacgtacacggacgagcagccgtga

SEQ ID NO: 494312 - DNA, 717 bp, Stenotrophomonas maltophilia
gtgagccgcctgcgcgccttcctctgcgccctattcggctgcgcgcgcgactggccggatatggagtcgtgcggtcgctgcggcagctacatggacctgcagacgccgccgcgcaccatcggccgccgcgtgctggatcgcgttgcgaccgctttgatccagcgcggcgcccgcacaccctacttccacctggtcaacgccgatggcacgccgtacatggaccgcttctggctgctgcgtatcggccacgccggcgtcgacgaccgtggccagccccggccctggttggccctgcgcctgcaccacatccgcagcagcgaccacggcggcgtcttccacgaccatccctggtccttcttcagcctgattctgcgcggcgggtacttcgagcatcgccccttcgacgggccgctgccggcggtgccggacgcggtgccgtcggcgatcgctgaggaaccgtactcgtcgacctggtatagcgctggccagctgctgttccgccgtgctgaaggctggcatcgcatcgcgctagccgaggacctgcaggccgaaggcacctggacgctggtgctgacgctgccgccgcgcgcctacagctggggcttccgcatccgcggtcagaaggtcgagcaccgcgagtatttccggaaggaagcggtccgccagcgcgcgcggcagcagatccacgcaccgaagcgctcggaatggaatccatga

SEQ ID NO: 494313 - DNA, 723 bp, Stenotrophomonas maltophilia
atgacgcggaagtcacaccccaacgcgcgccggccgtggacggtcgacgaggacgagacgctgcggctgaactggccgcggttccccgcctttctgatcgcccacgtcctcgagcggcccaaggccgcggtgtaccgacgagcagcgctgctgggcctgcagaaggccgaggacttccacacccagccgatggccgcgctctggaacgggacgcaggaaccgggatcgatcgcgtcacggatcaagcctggggccacgccggcgaacaaggggctgcgccgaccgggctggtatgcaggccggatgcgggaaacccagttcaaaaagggtcggccggccagcgaagcgcgcaactacgtgccgatcgggaccgagaaggtcgatccgaaacggaaggtgctgatgcgcaaggtcacagacgacccagccctgttcccagtcaatcgctggcgcccggtgcacgtgatggtctgggaggcggcaaacggcccggtaccggagggacacatcgtggtgttccggcccggcctgaagacgctagtcgccgccgagatcactgctgatcgccttgaggccgtcaccctcgccgagaacatgcggcgcaacagctaccacaaccggttcccgccggaactgaaagaactcgtccacctgaagtccagcatcacgcgccggctcaggaggcgaatcaaggagcaagaagatgaagaacaaggtcagtga

SEQ ID NO: 494314 - DNA, 258 bp, Stenotrophomonas maltophilia
atgaagaacaaggtcagtgacgtccgcgatcacctggtcgccatgctcgaacgcttgggcgacgacgacctgagtgccgaacagatgggccaggtcatcgagcgcgccaaggcctcgaccatcgtggccaccacctacatcggcgcggtgaaggtcgagctcgacgcgatccggttggcccatgaaaccggaaacctgaccgcggcagttgccgagccccagcagctccccacgttgccgaccggccagaggcgctga

SEQ ID NO: 494315 - DNA, 366 bp, Stenotrophomonas maltophilia
atgaccgctgatcgccccgcactgatcaacagctgcgacatggccaagggccccgacctcacctccgtggcggagatcgtaaacggcagggtcatcaacgttcgtcatgtcccgcgtcaggatcgatacgacccgacaacccttgccggtgccatcaagctgcgcgcctgggactgcgggatccccctcacacgccttgcgccactggtgggaatgaagcctgattcgctgcgccagcggctgtcaaagacccgcgggaaaagggcgttgcaaccctggcaggtgtccaagctcgcacgcgcgctgggccttgaggaagccgacctgcaccgccttgccgcgaagcacgagggctggaaggtatga

SEQ ID NO: 494316 - DNA, 210 bp, Stenotrophomonas maltophilia
atgagcaccagccatcgccaagatccgctcacgaaaaagtcgcaggtgctgctggctctgcgcgccggcggccgcatcgccgcgggtcatcggcccggcctgctgcagctgctcggcgccgacgaccgccctatacccgcttggcaaaccgccctgaaggccgcgcaggcctcgtccgcacagtctggagatacccatgaaccgcagtga

SEQ ID NO: 494317 - DNA, 759 bp, Stenotrophomonas maltophilia
atgaaccgcagtgacgtcctcccccgcttcctcgccgatacggccagtcatgaactgcggatcgtggtcgacgacggcgtgcaccggcacctgcagttccgtcgccccggaacctattgctacggcttcgacatcgtgacctggcccgggcacctggcgatctccggcgacatgggcaccgccgtcttcaaccgcctgcacgacatgttcgagttcttccgcaccaagcccgcccaccatgaagaggccggcggcctgttcgtcaacgatggctattgggccgagaagtgcgtggccaacgacggcgagaagaaggaattcagcgctgacctcttccgcgcgctggtgacccgcctgttcaaggaatacgtcgaggaacgcgtggatcccgacgacctggcggatccggacgcgactccggaatgggtggcccggctgtggcaggagctcgagctcgaagtgctgaacgactcggaagatcacgatgccctgagcaacgcgatcagtgccatgtcggacttcaggccgaacgacccggactacagcgacttccggatcaccgatgcctgggaatacgcatcgtccctgcagcagtacacgttccacttcctttggcgcctctacgcgatcgcccgcgcgatccgtgcctatgacgatgctgccggcgctgctgaacctccaggattgcccgacgacattgctgtgccttcgccactggcggaggccgcccacgctctcggccaagcggtgggcgaatga

SEQ ID NO: 494318 - DNA, 450 bp, Stenotrophomonas maltophilia
atgagcctcccttacgagaacgccaccagcggcaacaacgcgatcaatgacatccagaagatgcttcgctcctttgggtgccaacgcttcgccacgggcgaggactacgagaccggcgaactgttcatccaattcgagcaccgcggccggcaggtgcagctcaaggccagtgcccgcggctatgcagctgcgtggttgcgggaacatccctacggcccgcggatccgcacaacgcgggccgaccatgaggccaaggcactgaagatcggcggcgtcgccgtctactcaatcttgcgcgactgggtgaaaggccaggtcacggcaatcgagataggcatgctgaccttcgaggccgcgttcctgtcgcacatcctgctttccagcgggcagacggtgatcgagcacgtgcagcagcagaagctgctgccgcaggagaggcccaatggctga

SEQ ID NO: 494319 - DNA, 561 bp, Stenotrophomonas maltophilia
atggctgacacctcagcgcgcgatcgcgccaccgatcacaacatccacgcggatctggcaagggaactgcgcgcgatcgccgccgtccccatggatctccgccggccggcgctgcggcacctggccgagaagatcggcaccgccgcaatggtcgatctgttcggcgagttcattggcctggccaaccaggtcgctcgcaacgcccgcgagcaggccgaggacttgctggtgctgcagggccatgtgtggccgcacgaggccgagcgtgtgaacatgccctgcatcctgggcgccctcaacggcatcgtgctggccgccggcatcgaccctggcccgctctgcgggggctgtgcgttccgcgccggcacagtggccaaccagtgcctcccgaccacggaggacgccgactactgctccaccccgggcgagcgccccttcctctgccacgaggccgtcgacgagcacggcaacgccatcagcgcctgccgcggcttcgcccagcggcgcgccgccttgaatgctgccgagcgcagcaccgaacaccaggagcccgacgcatga

SEQ ID NO: 494320 - DNA, 270 bp, Stenotrophomonas maltophilia
atgaatacctctgactgcctgcccgtgcactaccacgtgcacctggacgtcgccggcgcactgacgaacttcaccgaccaggatatggaggggcttttccagcgcaacccgcccggacagccggtgactgcagccgaagcccgccgagtgctgaccgaccacctggccaacggccgcagggtcatcccgctcgcgccctgcgagggcttcgattacagcgggactggatgccctggccacccaggagcagctgaggcagaccatggctga

SEQ ID NO: 494321 - DNA, 231 bp, Stenotrophomonas maltophilia
atggctgatacaggcattgctgacggcactgccacccggatcctgcagctgctgcaggaggggccgggcctggccggcgagctggccgcggaactgcagctgccttcgaacagggtcagcagctacctgcaccagctggccaagaccggccgagtgcggcgcgcgcctttccacggccccgacgagcggcagtcggtcctttggagcctgcaggtggtgccccatgagtaa

SEQ ID NO: 494322 - DNA, 279 bp, Stenotrophomonas maltophilia
atgagtaagcacggaccctcgtcacgaggattgtcgagggccggatcccccgcgaacctgcggccggtccgattcgtcacgctcaagcagttcgaggcactgaccggctacacggtcgatgccatcaactcgaagatcaagcgtggcgattggctggagggcgccgtgttcttcaaggcgccagatggaagaaatctgatcgacctggaggggtacgaagagtgggtaatgcacggcaaggcggcgtcaggccagctacacagagcagcatcgcaatag

SEQ ID NO: 494323 - DNA, 1170 bp, Stenotrophomonas maltophilia
gtgggtaatgcacggcaaggcggcgtcaggccagctacacagagcagcatcgcaatagacttctactaccggggcaagcggtgccgtgagcggatcaaactccctccgaccgcacggaaccttcggtactgcgagaacctgctggggcagatcaaggtcgagatcgagaaaggcaccttcgactatgccacccacttccccggcagcaaacgcgcggtgcaggtggcggagaagccagcggccctcgacaccctggagcaggtgctgacacggtggctggcacagaaggagcctgagctcgagcacagcagcctgatcggctaccgccgcatcgtcaagaacatcctggtgccgcgctgcggagcgatcgcgctgcgtgacttcgaccgcatcgccctcaaggagctggtggccaccttcgacgagtcgacctcggccaaacgtatcaacaacgtactgggcccgctccgcggcgccatcgatgaagcggtggccgacgacctgatcccgaacaatcctctcgacgggttcaaggtgaagcggcgtgccaaggccaacccgcgcgaagaggtcgacccgttcaccccggaggaagtccaggcgatcctggccgcctgccgcgaggaccaggtccgcaattactgccagttcaacttcgccacgggcctgcgcacctcggaaatgatcggcctgtgctggtcggacatcgactggcgcaagggaacggtcaagatccggcgcgcctgggtcatgggcaagatgaaggctccaaagaccgagtccggcgtgcgtgaggtgcagctgctgcagccggcgatcgatgcactgaaggcccagcgtgcccataccgcgaccgccggcgagttcgtcttccatgatcccaggacgaacgcgcggtgggggtctgatcagagcatccgtgccggcgaatggcagcgcgcgctacgcaaggccggcatccggtaccgatacccgtatcagatgcgacacaccttcgcctcccaggcgctcagcgccggcgaaaatgtcatgtgggtcgcgcggcagatgggccaccgggactggacgatcacggccaagaagtacggccggtggatcccgtcgatggtccccgatgctggtgcgaaggccgcggcagtctggaccttattgcctggcaagatgggctag

SEQ ID NO: 494324 - DNA, 699 bp, Stenotrophomonas maltophilia
ttggacggacagctagacagcgaacctgatgcgcccattgaggacttgggtgagtttgggagctcgggctggtatcgacggatcagagcagatctctatgctgccgcgaagcgcctatttgcctttcagcgggaaagggaatgcgagcgccactttctcttagcggcaatccgtaggacgctttccctggagatggcgttccgccaagctgttgactcaaagaacggtcaaatggctatgaccattgtcaggttgaatcttgataccttggccaggacatacgcaatttactgggccgagcagactcctggtctgacggcggaagagtttgctaggagtgtcgcatcgggtgtgagtatcaaggatatgaagcttcgtggggcaaaggaaaaggccagcgatcgatggctgatagatcagattaagcccttggcagattggatccccgatgtctatcgacgaacatcgggtgctatccatttctctgaatttcacatcgcgcagatgctgcagcagtccgaaaacaagggcacggaaggggacggttccgtgcttataagactggctcttgggccgacggatgaagtgcgaagcccaacccattaccgcgaggtttcccaggcctttctccacattacgatgatgttgaccgcattgctaaagcataggtgtgagctagcccatcttgccaggcaataa

SEQ ID NO: 494325 - DNA, 852 bp, Stenotrophomonas maltophilia
atgaatctgacaagtctactaaggacgtccaattcgagtgctggccaggccgttgaaggtgtgtggcagaacattcgctggctgcctgatgcggccacaggtgaagtattgaaccttggcgtccggttcagggcaggcaatggacagagcatagtgcgcctgatcgactcattcgatagggtcaaatgtctttatgacgcaagcgtggcaagcgatgcgcagtttctcgtgagggtcgtcggtgacgcgttggcggctggattcgagataccagcaactggcatcttcctcagcgaggaaaagtatgcctccggaaccaacgcccgtgcagttgtcgatgacctatttttccgaaccgttccgctggcccgcccgcgcgcggaggcagagcgcggtggaaagtggctgaagacggagccgaatgacgccatcagaagtgtcgtctttgacgagctacggcgcatctccggacttcgcgctgagaccatcatccgcggggagaaccaattcgaggttagggagcccgggaagactcactacctagatattccactccagtccaatcgggcgctcggtacgatcgtctcggcaaggttcgccaaaaggaaggatgccgagctaaggctcttgcgcgcagacaacgatctgcagattgcaaagcgtgtctaccaaggagatcggatgctgatgtacgtggttcgacatgattcaggagctgcggcagccgagcggtttgatgagctgctggatgatttctcatggaaattcagcagggtcggagtagagatgaagagctactctgatcctctgctcgttgccgaagacgtcgtcactgacatgttggccgcctaa

SEQ ID NO: 494326 - DNA, 834 bp, Stenotrophomonas maltophilia
atgtcggtcacgcaattgctgggaccaagcagctacctgtcttaccttggtaaggcgggtgacggctgtgacgccaacacgcacaaggcgagggtggagtttgagcctggcacgccagtcgatgcctatgtgaaggtttatgacgaaggtgacgcgcccaagggtctggtcaatgaactgatcggctacgtcttggcgaagcatgctgacatcgatgtgccggtgcgatccgcgatcatgctgttgtcgaatgcccagacgggctacctgcctgatgggttcaggccgatgaaggacgcgagcggcagcgtcgtggcgtggtgcgtcgaggacgttggcggcaacactccaaagcaggcctttagatggacagaagagcagggactagaagcacttcgtgatgacctaaagaagtggcagaagctggttgatgtggttgcactggatgcttgggtactcaatgaggatcggaatctcggaaacctcgtccgcatagcgcctgggaaatatgctgtcattgatcacggccgtgtctgtacggggaacgcgtgggctgttccgttggacagagctcgtgtgagtcacacgaataagctggctctcgccgcttgggactctcatgacgtcgagcaggcccctgcgaaagtcagatccggagttctcagtgcatttgaggctcatgcaaccgttcttgccaaggcggatctcgacctgttggagtggctgccccgtcttgtggaggggctagaggaacaagacgtgaaggatttcctgcagcagcgcgcaacttccgtcccgaaacactacaagacagcattccaggtgctgctatga

SEQ ID NO: 494327 - DNA, 486 bp, Stenotrophomonas maltophilia
atgaaaaccgccacaaccacgctcgtcctgctcctcaccaccctcgccgcagccccagccacgcacgctgcggcaccggccatcgcgccccccggcaccgccacgctggaagcgctgctggcctgcaaggccggctcgaacttcagtgcggccgacgccatcgatgcgctgcaggccgccggcctggccaagaaaccgggcggcaccttcgagccggaggacaagccggtcgcgctgtttggcggcacggtcaccagtgccgatgtaaacgtggccgaaggcgagaagagcctcttcgtgtacttgaacggcgtcgattccaagcgcctggccaaggcctggtcggtgaccgaggtcaacgagcatgccaacaccgaagaaccgtcgtacgtgaagcgcattgacaagcgccacaccctgcacgtgatcgcgggcgacgactacgagggttattcggctgcggtgaagtgccagatcagccgctga

SEQ ID NO: 494328 - DNA, 462 bp, Stenotrophomonas maltophilia
atggcctggctggaaacccgcattcccccgcccgtggtgatgctgctgttcgccgctgcgggctttgcagcacgctggctgtggccgggtttccaccttcgggtgccggtgccggttctgctcgcaggcgtgacggtgacgctgggtgtcgtgctcaatctgctgcccaagctgtctttccagcgcgccggtaccaccgtcaatcctctgcgaccttcggcgtcgagcgcgctggttaccagcggaatctaccgccgcacgcgcaatccgatgtatctgggccaggcgttggtcctgcttggcgccatggtgtacctgcagaacctgatcgcgctgctggtggtgccgctgttcctggtgtacatcacccggctgcagatcctgccggaggagcgggcattgatggcccgctttcccgaggcgtacgcgcagtaccatcatcgcgtgccgcgctggctgtag

SEQ ID NO: 494329 - DNA, 2022 bp, Stenotrophomonas maltophilia
atggctaccacgggcatgggcttcatcggccgcacgaccctcatcatcaccgtgctgctcaccctggggggctgcgcgacgctgcgccagttcgggccgtcggtgcaggtcgcctcggtcacgcccggccagtacatcgcgctcaagcgcggtgacatcctcacctccggcaagctcagcgcggcgaccaccgagacactgcgcgtggccgggctcgatgagggcgtctgtgccaagcccggcctgccctgcatcgaggccatggaaagcagcatcgtggtgcgcgaggaagacaagcgctccagcctggccgagctgtggctgcagcatgcgatgaccctgccggcgccgaagcgcgagtactcggcatccggccgcgccaagaccgcaatcaccgaactggatgccgacttccagccacgcctcgatgcgtggatgcaggtcgcgcgccaggcctatgcctatctgttcttcaccgagcgcaccgccaaccagcgtggtttcgaggaccgccagacccaggtgcgcgactactacaacctggctgtgcaggaagcctcggtgcagctgtacaacgcgtacgccaccgggcgcgtgcacagccaggccagccatttccagctgggtcgctggaccttcgtgctggccccttcaggcgaagcatcgccgctggacacgcgcacccccaccgagctggtaccggcggcctcgctgtcattcaccggtacgctgcgcagcgtgcatcgccgcgatggcttcggtgccgagctggtggcggtgatggacgatccggctggcagcacggccaccccgccttcggcagcgacgcccgctgcgcaggcaagcaccccggccgcgcagagctggagcgagatgccctcgccttcgatgacggtgctgctgcgcttctcgggaaagaacctgtgggaagtgctgcacgacgacgagccggaactggagatccacgatccctaccaggtctcggaagtaaccctgcacggccagcaggtgccgttggcggccaacttcactgcgggctacgcactgtggctggcgcgctccaacttcagccagcagtcgctgcgctcgttgtttggtggcaagggcggcatcgacgcgccgcatctgtacatgatgcagccctacgacccgaaccgccgcgtgctgttgatgatccatggcctggccagcagtcccgaggcctgggtgaacgtggccaacgaactgatgcgcgacgacgagatccgccaggacttccaggtctggcagttctactacccgaccaacatgcccatcgcgatgagccacgatgcgatgcgccacacgctggccgaagtgctcaagcacttcgaccccagcggcaaggcgcaggcctcgcatgacatggtgctggtcgggcacagcatgggcggggtgatcgcgcggttgatggtctcttcctccggcgaccacctggtcgacactctgctggccaccgcgcagatgacgcccgcccagcgcgagctgctgcgcaccaagggcgcgccggtactgaccttcctgccggaaccggaagtatcgcgggtggttttcatcgccacaccgcatcgcggcaccgacgtggccggtacccgcctcggccgctggatcggccgcttggtacggctgccgctgaccgtgctggaggacgtggcgacgctggccaacgacggccagatcgaccgcaatgacggcaagcacggctaccagatgaacagcatccagaacctggacaaggacgacccgttcgtccgcgccgtggccgacctgccgatgtcaccgaaggtgcactaccactcgatcatcgcccgcgccaaggccgatggcccactggaaaaaaccgatgacgggctggtgccctactggagctcgcacctgccacacgccgtttcggagaaggtgatcgtgtccggtcacagcgtgcaggaagccacgccggccatcgtcgagctgcggcggatcctgcatgaggacatgcaggaacacgggcgtacggcaaagtaa

SEQ ID NO: 494330 - DNA, 1224 bp, Stenotrophomonas maltophilia
atgcaagggatgtcgaatgaaggcagcgccattgctgccgagcgcttggctgcgcgggtggagcgcgaaggaccggtgctgaaactggaaaccggcggtatcggggtgttctgcccagagctggccggcaaggtcgacaaggagaattccgagcacctgttcgtggtcgagtcgctggccgacctgttccgccggcacgaacgcgtgcgctggaccgaagtgcgcagcctgatcgcgacccgcagtgctgagcttaccggagcgcagaccctggaggcgctgcagtcgcgcatgcggcaggcgttggacgcactgtgcgggcgcgagctggatgccacgccagccgtgtggaaggtgatggcgcatccgctggtgccactggtgatcgacgggctcgacgcgcgcggtaccgaggccatcgaacgcgccctgcatctgcgctacaccacccaggtcgagcaggtcatccatcggcgtcatctgctgcgcaacttcctcatcggtcgtggcgaatcgcgggcgatcgccgccgaactcaggcgccgggtccgcagcggacgttcgccgctggactatgcacagtcattgttgacccttcgcgagcgcatcggcctggacaaggtcacctacctggtcaccgtgcagctgatcgccatttccggggtgcccggcatgatggccgcctgcctgctgctggcgatgcagatgcatccacactggcgccagcgcatcgaggaggaattcgcgccgctctcggatgcggaaatccatgcgctgccgatggccaggattccctgcacgatgcgcttcctgaaggaagtgatgcgactgtattccacacccttcaacaaccgccgggtggccgcctgcgatctgcaggtggaagggcaggccatcgccgagggcacggtgttcgagctgagttcgttcatccagcatcgctcggcgaagtactgggatgatccgctgcagttcgatcccgatcgttggctgcccgagcggcgcaagcgcaccgccggcatctatgtgccttatggcttccccacgcgctcctgcgtggggtcggcggtgggcaacgcgcaactggtactgctgtgtgcgctgctggcgcgcgaattccgtttcacccccagcgccgactaccggcccgaggtgcgcatggaaggcttcgcgattcccgcggcgctgcacggcacgttctcgcgccatacggccggtgcctga

SEQ ID NO: 494331 - DNA, 873 bp, Stenotrophomonas maltophilia
atgaacacgcaagagcccagccgccagcccagccccgatccggccgagcgcgatgccttcttcccgtcgccgtactcgctgtcgcagttcacctcgccccagagcgacctgtccggggccgactatccggatgcacgccgcgacggccgctggaaggtgctgatgatcgccgccgacgagcgttatctgccgaccgccaatggccacctgttctccaccggcaaccacccggtggaaaccctgctgccgatgtaccacctggacaaggccggcttcgacatcgacgtggcgacgctgtccggcaacgccgtcaagttcgaatggtgggccttcccgcgcgaggaccgcgagatcggcgccctgtacgaacgctatgaggcgcgcttccgccagccgttgcagctggatgaggtggtggccggcctgggagccgattcggactatgccgccatcttcattccaggtggccacggcgcactgatcggcctgccggagagcgcggcggtgaaggccacgctgcagtgggccatggccgggcagcgccacatcatcacgctctgccatggcccggcggcgctgctggcggcgggcgtcgacgaagccgacggtggctcgctgttccgtggttaccgcatctgcgccttccccgacgcaatggaccggcagacaccggagatcggctacatgccggggcagctgcgttggttcttcggtgaacgactggcgcagcagggcgtgcagatcgtcaacgaggggattgatggcagcgtgctgcaggatcgcctgctgctgaccggcgacagcccgctggccggcaacgcgcttggcaagctggccgcacgtacgctgctcgatgcactggcggggcgctga

SEQ ID NO: 494332 - DNA, 705 bp, Stenotrophomonas maltophilia
atgcctgcgctggtgcccccgctgctggaactggaacaggcgcggtcactgcccgcggtgggcggcgtgctgcgcgccgccgcctcacccctgggctacgatcgactgctggtgtttgccaccgggaccgggctggaacgcgacgcgcagcgcgtgtactggatcgagggtgactggttcggcgacggcagcgataccgcactcgcccgctacctgcatgcctgcccggtcaaccgccatgtactggacagcaatgcgccgttcttctggagcaagcgccagggcgtgcgcggcgaacgctatcaggtggtgaagcagccgcgcggcgatggcctgcatgggttgcaggtgccggtgttcggcccgaccggcctggagggtgcggtcagtttcgccggcacctcgattgatgcatccgccagcgcgcgcctgctgctggaaatggtcggaacgtcagccttccgtgcggcgcgccagctcgccgaggcgcccgcggatgttcgcgcaggcgcgttgagcgcacgcgaacgcgaggtgctgcgctgggtcgccgctggacggcgccaggcggagatcgcggccacgctggggctgtctgcacgcacggtggagaaccacctgcggcgagcgcgacaacggctcggcgtggccaccaccgcgcaggcggtgcgcgcggcaggccgccgtggcgagattgaagactga

SEQ ID NO: 494333 - DNA, 1227 bp, Stenotrophomonas maltophilia
atggatgagcgtgcagcggatgcggaagtggtttccatcgacgacctgctcgaacgcgtgcgtcgcgaagggccggtactgcgcttcaacaatgatgttgtcggcatctttgatccggccctggcggtcaggatcgacaaggccaacaccgaccagcacaccgtaccggattcactgattgattttcttgggctgcgcagtggcagggaccccgttgcgtggcgcgaggtgcgggcgttgctgagcgagcaggccgggcggctggccagtcccggccacatgcgcgacctctacacgcgcatgcatggcttccttgcccagcgcgcggacaggccgcatgacctcagcgaactgagctggtggacgatctcgcagtcgctgttgccgatgctgatcgacggcctcagtcgatccgacgtcgatgcgctcatcggtgagcagaagacccgatacaacgccatcgtgctgcagaacttctcgttctggcggcggatcatcgacttccatctttcccgccgcgcggcgcgcacggtgtcgcggcacatccggcgtcgtgcgcgccagaccgtgccacgcgaggacttcctgcaatccctgctgccgctggtgcagcgggtcggggtggaccgcgtggcctatctggtgtcgatggtgctggccggcatgtcgggcctgccgggcatcacggcggccagcctgctgtacgcgatgcatcgatttccgcactggcaggcgcgcatccgcgaggaaacctcggcgctgagcctggagcagttgtatgcgctgccgatcaagtcactgccgtgcacgtcgcgtttcgtcaaggaaaccctgcggctgtggccgggactgttcgccctgcatcgtccggcctcgcacgatatcgacatcgagggcgtgtgcatccgcaagggcggggcatacgagttgtcgtcctacttccagcatcattcgccggagtactggcagaacccggacagcttcgatcctgatcgctggttgccggagcgacgccaggccaacaagggcgcctacgtgcccttcggattttcctcgcgggcctgcatcggcagtgcggtcggccacgcgcagctgctgctgttctgcgcattggtgacccgcgatttcgagttgacggtgcaggatgagcccacgccgtggatgcagctggaaggcttcgccattccggtcgatttcatcggtacgctgacgccgcggcacgcctga

SEQ ID NO: 494334 - DNA, 858 bp, Stenotrophomonas maltophilia
atgttgtcgcgtttccgtcgccctgtactgtctgcgctgctggcgcttgccctgcctgcgaccagcgcctgggccgcagcccccgcgccgttgaaggtgatgtcgttcaatgtgcgcaccccggccgataccgagccgggcaagcgctggcccgaccgtcgcgacgcgatggtgaaggtcatcctcgatgcgcacccggcggtgatcggcacccaggaactggtgcaggagcaggccgagtacctggcaggacacctccccggctaccgctggttcggcgagggccgccgcggcggcagcggcgacgagcacatgggcgtgttctacgacagcaaggtgctggcgatcgaggaatcaggcaacttctggttgtccgatacgcccgatgtgcccggcagcatcacctggggcaacctgtatccgcgcatggtcacctgggcgctgttccgccgcatcgacgacggccgccgcttctacttcatgaacacccacctgccctaccgcgacgaagacgagccgcggcgggtcaagggtgccgaactgatcggcaagcgcgtagccaacctgccggccgatctgcccgtcgtgctgaccggcgacttcaacagcgaacccggcggcgacacctacaaggcattcacccgcgtgctgcaggacacccgtacccaggtgaaggctccgcagggcccgcggctgaccttccacgatttcaccggcaaggccaccgtgcagctggactgggtcctggtgcgcggcttccatgcgcgcagcttcctgaccgatgaccgccgcatcggtggcgtgctgccttcggatcatttcccgctggtggtcgaactggactggcccaggcactga

SEQ ID NO: 494335 - DNA, 264 bp, Stenotrophomonas maltophilia
atggcggatggaaggcgggatacccaacggatgttgttcggcgatccgggtccaccgggtgcaggtctgtcagtggcggtcgtggtactgctggtgctggcgacgatggcggcggcggtcggtttcctgcgcctgcaggattcgatgttggggctgggcctgatcggcgtggccgtgttcctggcgatcggggcccgcatctgccaggcgcgcgaccagcatcaggcgctgtatcgcctgctgtcgcggcagccaccgccgtag

SEQ ID NO: 494336 - DNA, 378 bp, Stenotrophomonas maltophilia
atggcccaccagagccggctggctggattcatcatcgactgccaggaccttccctccgacgcaggtgccggcttctgggccgccgcgctcggcctgcaggcacaggcggcgcgtgtcgaagggggcgccgagtatgccgacctgctgggtgcaccggcgggcttgaacgtggaagtccagcgggtcggtcacccgtcacgggtgcacctggacatcgagagcgacgacatcgatgccgaggccgaccgcctggagaagctcggcgcgcgccggataggcttcgtcaaacgctggtgggtgatggaagcaccgaccggccatcgcttctgcatcgtgcgcatgcgcgagcgcgaggtgccggccaatcagtggccctga

SEQ ID NO: 494337 - DNA, 1422 bp, Stenotrophomonas maltophilia
atggtgatccgcacgttggcgatggccgtctccagcctggtgctggcaggctgtgtcagcgtcggcccgaactacaaggccccggtgcaggaaccggtggtcctgcagagcgcacagcagccggtcttcagcaccgtttcgccggtggccagctggtgggcgcagttcgatgatccggtgctggaacagctggtgcatggcgccctgtcggacaatctggacctgcgcgtggccgtggcccgcgtcagccaggcccgcgcggtattcgtcgaaagccgtttcgaccaggcgccgcacatcaccgctggcggcagctacgaccgccgcaagcaacccgatccgcagctgggtgggcagcgggtgttcagtgaaagctaccagctcggcttcgacgccggctgggagctggatctgttcggccgcaagcgccgtgccgctgaggccgcacgcgccgacctcggtgccgagcaggccaacctggccgatgcgcaggtactggtcgccgccgaagtggcacgcaattacttcgagctgcgcggaacgcagaagcgcatcgcggtggcccagcacacgctggaaaacctgcgcgatacgcagaagctgaccgaggcgcgctgggaactgggcgcgggaagcgagctggatgtgcagagcagccgcgcccgcctgaaggcgatcgaggccgacatcccgttgctggaagtggccgaggcgcagtcgcgcaaccgactggccgtgctgctcggccagcgcccggaagtgctgaccgacatgctcgcgccgcacgacgtgccggccttcgccaaggcgctgccgctgggcgatacccgcgaactgctgcgccagcgcgccgacgtgcgcgtggccgagcgtcgcctggcggctgcgaccgcacgcgtgggcgtggccaccgcggacctgttcccgcggttgtcgctgtccggcttcgtcgggttcctcggcggcgatgccagtggcctggtcaatggcaacaacaaggcctggtcgctgaccccgtcgctgagctgggcagcattcgacttcggtaccgtgcgtgcacgcctgcgtgccagcaaggctgaagccgaaggcgtggccgcgcagtacgagcaggccgtgctgctggcgctggaagataccgagaacgcgctgacccgctattccaagcagcaggcacggctggcgatcgtggtcgagcaggcacaggcggcacggcgtgccgaatcgctggcacagatccgctatcgcgaaggctcggaagacttcctgaccctgctggatgcgcagcgcacgcagctggcggccgatgacgctctggcggcggccgagtccgaagtcaatgtcagcgtggtgggcgtgtacaaggcgctgggcggctgggggcaatcaccgcagcaaccgagcgtggcgcaggtgcagtaa

SEQ ID NO: 494338 - DNA, 738 bp, Stenotrophomonas maltophilia
atgaatacccatcagaacaagatcgcgctggtcaccggcgccacccgtggcatcggcctggaaaccgtgcgccagctggcccaggcaggtgtgcatacgctgctggccggtcgcaagcgcgatacggcggtggagctggcactgaagctgcaggctgaaggcctgccggtcgaagccctgcaactggacgtgaccgacgcggccagcatcgccgaagcggtggagcaggtgcgccagcgtcacggccgcctcgacatcctggtcaacaatgccggcatcatgatcgagaacccggcgcaggcgccgtcggagcagtcgctggacacctggaagcgtaccttcgacaccaacgtgtatgcgctggtcgcagtaacccaggcattcctgccgcttgtcaagcaggccaagtccgggcgcatcgtcaacgtgtcgagcatgctcggctcgcagaccctgcacgcggatccctcatcgggcatctacgacttcaagattcccgcctacaacgcgtccaaggccgcggtgaacagttggaccctgagcctggcctacgagctgcgcaacaccccgatcaaggtcaataccgtgcatccgggttacgtgaagaccgacatgaacggcggcaacggcgaaatcgaaatcgccgaaggcgcgcgctccagcgtgcagatggcgctgatcggcgaatccggtgccagcggcagcttcacctacctgggcgaggtgctgccatggtga

SEQ ID NO: 494339 - DNA, 3171 bp, Stenotrophomonas maltophilia
atggacttttcccgtttcttcatcgacaggccgatcttcgcggcggtgctgtcgatcgtgatcttcgccgcaggcctgatcacgattccaatcctgccgatcagcgagtaccccgaagtggtgccgccgtcggtggtcgtgcgcacggtgtatccgggcgccaaccccaaggtcattgccgagaccgtcgccacgccgcttgaagaagcgatcaacggcgtcgaaggcatgatgtacctgaagtcggttgccggctcggacggcgtgctgcagatgaccgtcaccttccgcccgggtaccgatccggacgcggcggcggtgaaggtgcagaaccgcgtggcgcaggcgcaggcgcgcctgcccgaggacgtgcgccggcagggcgtgactacgcagaagcagtcgccaaccttcctgatggtggtgcacctgacctcgccgcaaggcaagtacgacaccctgtacctgcgcaactacgcccgcctgcacgtcaaggatgcgctggcgcgtattccgggcgtgggtgacgcgcagatcttcggcggcggcgactacgccatgcgtgcctggctggacccggacaaggtggcttcgcgtggcctgaccgccagcgatgtggtgcgtgccatgcgcgagcagaacgtgcaggtgtcggccggccagctcggtgccgaaccgttgccgaacagccagttcctgaccctgatcaatgcccagggccgactgaagaccgaaaaggaatttggcgacatcgtgctcaagagcggcaccgatggcgagatcgtgcgcctggccgacgtggcccgccttgaactgggtgccggtgactacaccctgcgctcgcagctggatggcaagaacgcggtcggtatcggtatcttccagtcgcccggtgcgaatgcgctggagattcgtgaccaggtcatctcgacgatggacgagatgcagaagaccatgccggccgacgtgaagtacgaagcggtgtatgacaccaccatcttcgtgcgcgactcgatcaaggccgtggtctccacgctgctggaagccatcgccctggtggtgctggtggtgatcctgttcctgcagacctggcgtgcctcgatcatcccgttgatcgcggtgccggtgtcggtggtgggtaccttcgccgcgctgtacctgctgggcttctcgatcaacacgctgagcctgttcggcctggtgctggcgatcggcatcgtggtcgacgacgcgatcgtggtggtggagaacgtcgagcgcaacatcgaggaaggcctgtcacccaccgctgcggcccaccaggccatgcgtgaagtgtccggcccgatcgtggcgatcgcgctggtgctgtgtgccgtgtttgtgccgatggccttcctgtccggcgtcaccggccagttctacaagcagttcgcagtcaccatcgccatctccacggtgatctcggcgatcaactcgctgaccctgtcgccggccctggccgcgcgtctgctgaaagcccatggtgctccgaaggatgcgccgagccgcctgatcgaccgcctgttcggctgggtgttccgtccgttcaaccgcttcttcaagtccagctcggagaagtacgagcgtggcgtagcccgcatcctcggccgtcgtggcgcggtgttcgtggtctacgcgatcctgctggtcggtaccggcgtgatcttcaagctggtgccgccgggcttcatcccgacccaggacaagctgtacctgatcgccggtgtgaagctgccggaaggttcgtcgatcgcgcgcaccgatgaaatgctgcgcaaggtcgccaagatcgcccaggaaaccgatggcgtggcccacaccatctcgttcccgggtctgaacgcgctgcagttcaccaacacgccgaacaccggtgtggcgttcatcccgctcaagccgttcgccgagcgccatggccgcaccgccgcacagatcaatgccgagatcaaccagaagatcgccggcctgcaggaaggcttcgcgttcgcgatgatgccgccgccgatcctcggcctgggcaacggcaacggctaccagatgttcatcgaggaccgtggcaacctgggttacggcgcgctgcagaacgcggtgcaggcaatgcagggcaccgttgcgcagacgccgggcatggccttcccgatcagcagctaccaggccaacgtgccgcagctggatgccgaagtggaccgcgtcaaggccaaggcgcagggcgtgcagctcaccgagctgttcgacaccttgcagacctacctcggttcggcctacgtcaacgacttcaaccagttcggccgtacctggcaggtgatcgcccaggccgacggtccgttccgcgagacggtcgaggacatcggcaagctgcgtacccgcaacgaccgcggcgagatggtgccgatcggttcgatggtcaccatcaagcagaccttcggcccggacccggtgctgcgcttcaatggctatccggcagcagacctggccggtgaggccgacccgcgcctgctgtcctcggccgaggcgatgaacaagctgaccgagatcgccggcaaggtgctgccggtgggcatgaccaccgaatggaccgacctgagctaccagcaggcgacccagggcaaggcggccttcatcgtgttcccggtggcgatcatgctggccttcctggtgctggccgcgctgtacgagagctggtcgctgccgctggcggtgatcctgatcgtgccgatgaccctgctgtccgcgctgttcggcgtgtggctgaccggtggcgacaacaacgtgttcgtgcaggtcggcctggtggtgctgatgggcctggcgtgcaagaacgcgatcctgatcgtcgaattcgccagagagctggagatgggcggcaagggcatcgttgaagccgcgctggaagcctgccgcctgcgtctgcgcccgatcgtgatgacctccatcgccttcatcgccggtaccgtgccgctggtgctgtcgcatggtgcgggtgccgaggtgcgctcggtgaccggtatcaccgtgttcgccggcatgctgggcgtgaccctgttcggcctgttcctcaccccggtgttctacgtggccctgcgcaagttcgtcacccgcaacggcggtggccagctggtgcagcacggcgagccgaccatccaccactga

SEQ ID NO: 494340 - DNA, 1227 bp, Stenotrophomonas maltophilia
atgacttcccccaataccaccccacatcgtttcggccatcgcatcgcgatggtcggcgtgtcgattctcgccgcggccgtgcttgcggcctgcagcggcggccatgccgaagaggccggtgctccgccgccgccgcaggtcagcgccgcgccggtgctggtcaagcaggtcagccagtgggacgagttcagcggccgcgtcgaagcggtgcagagcgttgaactgcgcccgcgcgtgtccggctacatcgacaaggtcaactatgtcgaaggccaggaagtgaagaagggcgaagtgctcttcaccatcgacgcgcgcagctaccaggccgagtacgatcgcgcggccgccgagctggcccgcgcccgcacccaggccacgctggcccgcagcgagtccgagcgtgccaagcggctgtccgagcagcaggcgatctccaccgagaccgccgagcagcgccgcgcggctgccgaccagtccggcgccgccgtgcaggccgcgcaggcggctctggatgcagcccgcctcaacctggagttcaccaaggtgcgtgcaccgatcgatggccgtgccggccgcgcgatggtcaccgccggcaacctggtcaccgccggcgacagcgccagcgtgctgaccacgctggtctcgctggataccgtgttcgtctacttcgatgccgacgaaagcaccttcctgcgctatgcacagatggcacgcaagggcgagcgccccagcgagcgtgacagcgcgctgccggtgaaggtcggcctgtccggggaagagggctacccgcatgcgggcaaggtcgacttcctcgacaaccaggtggcccgcagcaccggcaccatccgcgtccgtgcgctgctggacaacgccgaccgccagttcacgccgggcctgttcgcccgcgtgcagctgctcggcagcggccagttccaggccatgctgatcgatgacaaggccgtgctgaccgaccaggaccgcaagtacgtctacgtggtcgacaaggatggcaaggcccagcgccgcgacatccagctcggccgcaccgccgacggcctgcgcattgtcgagcacggccttgccgccggcgacaaggtgatcatcgacggcgtgcagaaggtcttcatgccgggcatgccggtgcaggccaaggccgtggcgatgcagccgcaggctgcgccgccggcaccgggccgtgatgcgactgccgcactgaaccactga

SEQ ID NO: 494341 - DNA, 771 bp, Stenotrophomonas maltophilia
gtgaatgggatactgacgcccgaagtcctggtcctcggcggcaccggtgccgtcggccagggcgtggtcggcgcattgctggaagccggcagcccggtgctggtggttggccgcgacccgggtcggctggcggcgctgcatgagcagttcgccgacgagcccggcctggagacgctgctgggctcgctcagcgatgacggctcggcgcgtgccttggccgaacgcatcgcgcagcgcccccgtccgctggcggcggtcatcgccgcaatgggtggcccctaccgtcgcggccgggtgaccgaccgcaatggcgatgagctgttgggggcgatgcaggccgacctgatgccgcacgtgcacgcggtgcgtcacctgctgccgctgctgcaggacaacgtgcatgcacgccgctacgtgatgatcggcagcccggccaacgccaagccctgggcgggctacggcgagacctcgatcaccaccgccgcgctgcgcatgtacgcgcaggtggtgcaccaggaagcgcaggcactgggtgtgcgcgcgcagatgctggaagtctgcagcccggtgtgcaccccggccaacgcggccaatgcgtgcatcgagtggccaagctcgttgctggtcggtcgtcgtgtggtctccctgctggacggctgccgcgacaaccgcgccatcgtccgctgcgacagcagcgatgccgaactgccgcgcggcctgctgcacctggatgtccctccactgtggcgcgataccgcgggcatcgcttga

SEQ ID NO: 494342 - DNA, 228 bp, Stenotrophomonas maltophilia
atgagcctgcgcaacattcttgcccgcttccggcatgtcggccagaacaccctggacctggcgatgaccgtcgaagcccgtccgagttccttggtacacaaggactttcgtgagtttaccgcgcccatgcgtcagcagcgtggcggtgccatccgcctggccccgcacaagggtgaccggctgcgccggatcgggactatcccggatttgggaggaaatgtcccgtga

SEQ ID NO: 494343 - DNA, 1032 bp, Stenotrophomonas maltophilia
atgtcccacgatctcaacgagacgctgatcttcgtcaaggtggtcgagcaaggcagtttcatcgccgctgccaaatcgctcggcctgcccaagaccacggtcagccgcaaagtgcaggagctggaaacgcgcctgggcgcgcggctgctgcaccggaccacccgccgcctcggcctgaccgaagccggctcgatctaccacgagcattgccagcgcatcgcgcgcgagctggaagaagccgaaagcgcggtgagccagttgcagtccggcccgcgcggctggctgcgcttcaccgtgccctattcgatcggcatcacctggatcgccccgctgctgggccagttccatgcgcagtatccggaaatccgcctggacatgcacatgggcaacgagaagctggacctgattgccggcgaagcggatctggcgctgcgtgtgggcgccctgcccgattccaacctggtcgcgcgcaagctgggcagcctgcgcacgcaggtgttcgccagcccggcctacatcgagcgctatggtgagccgctgcatccggaagaactgcagttccatcgcatcctggcgatgcgcaagccgtatcacactggcaattcaccgcgcttcacctggcagctgggcgagaacggcggcgaactgcgtgacttcccggtcaccccgctgatgaccgccaacgacatgtctgcgctgaatggtgcgctggtctgtggcgaaggcctgctgctgaccggtgatgtgatggccaagccgttcgtggagtccggcatggtacggcgcgtgctggccggctggaccggcccggaagtggacttcaacgccgtgttcgccggtggccgcctggtctcgccgaaggtgcgggcgttcgtcgatttcctggtggaaaagctcaacttcgacgccaactacatgctggcgcagtgcccgggtgcgaagctggcacagcagcagaaggcccaggaagacgcggcgttggagagcagcggcaagcgcatcctggagaaggtcgccgcctcggcggcgtaa

SEQ ID NO: 494344 - DNA, 696 bp, Stenotrophomonas maltophilia
atgatccgcaacaccacccgcaacgtcgcactggccctgatgagtgcggccgtcctgtcggcctgcgccaccggcggctcctatgtgcagagcgaccagtacggcaacccgaccgaacagcagaaccgtaccggccgcaacgcgctgatcggtaccgccatcggtgtggctgccggcctgctgaccggtgacagcgccaccgagcggcgccagcacgcgctgatcggtgccggtatcggtgcgctcagcggcgccgccgtcggccagtaccaggatcgccaggaacgcgcgctgcgcgagcgcactgccaacaccggcatcgatgtgcagcgccagggcgacaacatcatgctgaacctgccggacggcatcaccttcgacttcggcaaggccaccctgaagccgcagttctacggctcgctcaacggtgtggccggtacgctgcgcgagtacaaccagaccatgatcgaagtggtgggccacaccgacagcatcggcagcgacgcggtcaacaaccgtctgtcgaaggaacgcgccgattcggtcgcgcagtacctgatcggccaaggcgtgcagagcctgcgcatcgaaacgctgggggccggcaagtcgtatccgattgccgacaacagcaccgatgccggccgtgccaagaaccgccgcgtcgagatccgcgtgattccgctcaagcaataa

SEQ ID NO: 494345 - DNA, 1416 bp, Stenotrophomonas maltophilia
gtgtcggtagcgttggtatggttccgccgtgatctgcggctgcaggacaatccggccctgcaggccgcgctggatgcgggtcacgacgtggtgccggtctatctccacgcgccgcacgaggaaggcgagtgggtgcctggcgcggcctccgatgcgtggcgccaccgttcactgggtgccttggacgccgacctgcgcacgcgcggttcgtcgctggtgctgcgtagcggtgacagcctgccggccctgcagttgctgatcgggcagaccggcgccgaggcggtgtactggaaccgcaagtacgagccggccacccagccacgcgacgccaccatcaagcgcacgctgcgtgagcagggcatcgacgcgcagagctgcaatggcagtctgttgttcgagccctgggacatcgcgacacagcagggtcagccgtacaaggtgttcactccgtactggcgcaacgtactcagtcattggcgcctgccgacgctgagtgccgcgccgaaggcactgaccgcgcactcggtcgacggcctcgcattggacgagctgcggctggcgcccacgctggactgggattccggcttctgggagcactggcagccgggcgaggccggcgcgctggaggcgttgtccgtgttcgaggacggcgcgttgcgcggttaccgcgagcagcgtgacctgccggaccgggtcggcacctcgcggctgtcgccgcatctgcatttcggcgagattgcaccgtggcgcatcgcgcatgcgctggagagattgcgcagtgccggcactgacgccgacatcgacggctatctgcgccaactgggctggcgcgatttcgcctaccacctgttgcatcacttcccgaagacgccgaccgacaacctcaatccgcgtttcgaccgcttcccttgggccacgcccactgcagcgcaactgcatgactggcagcgcggcaacaccggcgtgccgatcgtcgatgcgggcctgcgcgagctgtggcacaccggctacatgcacaaccgggtacggatgattgttgccagctacctgtgcaagcacctgcgtgcgcactggctgcagggcgcgcgttggttctgggacaccctggtcgatgccgacctggccaacaacacgatgggctggcagtgggtggcaggcaccggcgccgacgcggccccgtacttccgggtgttcaacccggtcacccagtccgagaagttcgatccgcaggcccgctacatcagccgctgggtgcccgaactggcggcgttgccggtgaaggcgcgcttcgcgccatggcagcacccgcagctgctggcggcgcatgccccgggctatccgcgtacgccgctggtggatctggccgccggccgcgatgctgcgctggccgcctaccggcagacgggggctgggtaa

SEQ ID NO: 494346 - DNA, 615 bp, Stenotrophomonas maltophilia
atgaccacaccccgccgcatcattccattggctgccatcggcgcgtccctgctgttgctggccagtgcggtaaccgccgccgataccgtgctgcatcccttcctggtcgcccagccggcgcaggccccgcaggaagtgaacctggcggtggagatcccggccggcagcttcaccaagtacgagatcaaggaagacggcctggtgcacgtggaccgcttccagtcgatgccggtcgcctatccggccaactacggctcgatgccgcgcaccctggccggcgacaacgatccgctggatgcactggtgttgacccgcgaaccgctgcatccgggcgtgatcgtgcgtttccgaccgatcggttacctgaagatgatcgatggcggcgagcacgacgagaagatcatcggggtgccgaccgacaaggtcgacccgacctacgccagtatccgcgacctggcggacctgccggaggccgaacggcagcggatcgaagcgttcttccgcgtctacaaggacctgccggccgggcgcaacccggtgcagctcaatggctggggcaacgccgccgaggcacggtcagtgatccgcgaggccatgcagcggttcaagcactag

SEQ ID NO: 494347 - DNA, 1368 bp, Stenotrophomonas maltophilia
atgagcgggcagtgcgtaatgcgcgcgctggcgctgggcctgctgctggcgctgccgtcgctgtcgttcgcggcggccgaaccgaatacccaggtgccggcaggtagccgccactacgcggcgacgacggtgccggaccgcatcgtcgcctcgccggcggttgattccagccatgggttcgccgtggcctggcgtaccgacgacagcgtgcaggcgccgctgctggaaatcgcgctggccgcggattcgccggccattgaaggcatccgccaggtgcgtgcgacgacccgcgcgctgcagaccgagaacggtctgtcgcaccaccatcgggcagatatcgatggcctgcagccggatacccagtacgtctaccgtgtgcagggcaatggcagctggagcgcctggaaccagctgcgcacgctggccagcgccgatcagccgctgaccctgctgtacttcggcgatacccagaacaagaacgtcagccatgtcagccgcgtggtgcgcgccgcgcagaaggccgcgccgcaggcgcgcatgagtctgtttgccggcgacctggtcagcggtggcgacaacatggatgacagcgagtggggtgagtggttcgctgcgaccagttggctggcgcaggaaacgctggtggcgccggccatcggcaaccacgagtacttcgaggaattcgaggacaccccgcaggagcgccgcgtgctgggccgccactggccggtgacgttcgcgctgccgggcaatggcgccaccgccgcgcagcagaccagctactggttcgatgcgcagggcgtgcgcgtggccgtggtcgatggcacatcggcactcgacctcggcaccgccaaggcgcaggcacagtggctggacaaggtgctgaccggcaatcggcaggcgtggaccatcgtgctgctgcaccagccgttctactcgccgcgcgaagggcgcgagaacgccgcgttgcgtgacgtgctgctgccggtggtacgccgccacaacgtcgatctggtgctgcagggccatgaccacacctatggccgccgtggcgaagggcaggccgcgacgccgcagtatgtggtgaccgtggccggaccgaagcagtaccgcctttccgacgaagcgcgcaggacgatggacccggtggccgaggacacccagctgttccaggtgctgaacatcgacccgcagcacctgcgctatgaagcacgcaccgtgaccggccgtctttacgatgccttcgaattgcgtcgtgatgccaagggtggaaagcagcgcacggagttgaccgaaggccgcatcacgccacgcgactgcccgcgtgcgcagaccgccaagggtcgcgccgaccgctgctgggaatga

SEQ ID NO: 494348 - DNA, 1116 bp, Stenotrophomonas maltophilia
atggggcgtggcgtcactgtcctggccgccgcgctggcggctacgctggtcgccggctgcacgccggccaccggcaacgatccggttgcgggagcggccgcgccggccgccaatggcgagcgcgtggtgagcaccatcgccgaagcgttcctgtcaccgatgaccccggccgacaacatcgactcgccggcggcctggcgcgcgccggacggcgcgctgtggctgatcgccaccgccaaggccaccgacaagctggtggtctacgacggcagcaccggccagcacctgcgtgacgtcggcagcagcggcaccgcaccggggcagttcgaccgcccaaacggcatcgcggtgaccgacgacctgctgtggatcgtcgagcgcgacaatcaccgcgtgcaggtgctgagcctgccggacttcgcgccgctggcgaccttcgcttcggacgacctgcgcaagccgtacggtctgtgggtcgaccgccgtgccgatggctacagcgtctacgtcaccgattcctgggacaacggcgaggatgcgcaggggcgtgacatcctgccgccgctggccgagctggacaagcgcgtgcgccagtaccatgtgacccgcgacggcgcgaaggtcgaggcgaagctggtggccagcatcggcgataccaccgaggccggtgcactgcgtgtggtcgagtcgatctggggcgaccccgagaacgaccggctgctgattgccgaagaggacgagcgctacgccagtgagttcaaggtctacaccctggcgggccgcttcactggcaccacctttggccgtgacgtgttcaaggcccaggccgaaggcgtgaccctgcgcacctgcggcaaggacggctggtggatcaccaccgaacagggcaagcagcgcagcgtgttccacctgttcgaccggcacacgctgaagccggtcggcgcgttccagggcaataccgtggccaacaccgatggcatctggatgatgcagcagcccagcgcgcgcttcccacacggtgcgctgtatgcagtacatgacgaccagggcgtggtggccttcgattgggagagcatcaccaagcagctggcgttgccgctggagtgtggcgcatga

SEQ ID NO: 494349 - DNA, 2562 bp, Stenotrophomonas maltophilia
gtgcatatcaagactccgttggccgttgccatcaccctgaccctggcgatgggggccgcggcaccgctgcaggctgccgggcaacaggcggtagccgctaccggcgccgtggcggccgacgcggtcgacctggaccgtatcgaagtgcgcgcccagctcgaatcgcagatccgcgcggtcgacctcaagcgcagcagcgacgccatcgaggacgcggtgtcctccgatgccctgggccagtatccggacaagaacgtggccgaatcactgcagcgcctgccgggcgtcagcgtgacccgcgaccagggcgaaggccgcttcgtggtcattcgcggcctggatgccaatctcaacagcgtcagcgtggatggcatcgccatcggtacgccggaagattccagccgcgccgcgccgctggacgtgatcccatcggactccaccgagcgcctgcgcgtggtcaagtcgccgaccccggacatgcccggtgatgccatcggcggcgccgtgctggtcgaatcggcgtcggccttcgaccgcgacggccgcagcctgcgcggcaagatcgagggcagccaccagcagctgtccggcgagaccagccccaaggccgccttcaactacagcgaagtgttcaacgacacgttcggcgtggcgctgggcgtgaactaccagaagcggaagttcgagtcggacaacaccgaagtggaatatgacggcgaggacgatgccgcccccggtgacgtgaccgcgatcaacctgcagcaccgcaagtacgagatcgagcgcaagcgcatcggtgccaacctcaacctcgactggcgccccaacgaagacagcacgtactacctgcgcacgctgtacagccagttcgacgatgcggagacccgccagcgcgtgatcttcaacttcgacgacgcgaagatggtcaagaccggcaccgaccagtatcgcctcgatggcatgccgaaggattcgatcgacaagcgcatgcgctaccgcaccaagaaggaaaacaccttcgcggccagtctaggtggcgagaacaagctgaccaacgccgtggtcgattaccggatcggctacacccgtaccgaagagcgcgtgaacgacgagatggaggcgcgcttcaagctcaacggcaaggccttcaatggcaccctggaccagcgcagccgcctgcccagctacagcttcgacaacccgcagtggctggacaacggcaactacgcgttcgaccgcgtcgtgctttcgcccaagcaggtgaacgacaaggaacacagcgcgcaggtcaacgtgcgcttcgacggcgacagcagcagcatcaagttcggcctgctcggccgctggcgcgaccgcgacgtgaatgtcgatgagcgcgaactgcgcgtcggcccgaaggtggtgctgtcgagctggaccacctcttcgccggagcatcgccacggcaacatgggggatggcatggactcggctgcgatgcgcgcgttctgggccgccaatggtggccagtacagcgcccgcccgcaggatgtcggcggcaatgcgatgacgtcgctggaagaggattacgtggccagcgaggacatcttcgccagctatgccatgggtacctgggatgtgggcgcgctgcgcatcatcggcggcgtgcgcgtggagaacacccgcttcaaggcagtcggcaaccaggtggacgtggccgccaacggccgcagcttcaccgtcaccccgcgcgtggccaacagcagctacaccaacgtgctgccgggcctgcatctgcgctatgacgcggccgatgactgggtgctgcgcgcctcggccaacaagaccgtatcgcgcccgtccttcggcgacgtctcgccgcgcgtgggttacagccgcggtgacgaggaagtgcgcctgggcaaccccgaactggatccgtacgagtcgaagaacatcgacctgtcggtggagaagtacatcggcagcagcggcatcgtttcgctgggactgttccacaagtcgatcgatggctacatcgtggagaccgtgcggaccaatgatccggcctacggtggattcgacgtgacccagccgatcaatggtcgcaaggccaccgtgcgtggcgcggagttcaactggcagcagcagctggccttcctgccggagggcctggatggcctgctggtcggtgccagtggcacctggctggacaccacgttcgatgccggcatcaagggacgtgagggcgagggcttcaccctgccgcgcgcttccaagcatgtctacagcgcacacatcggctatgaaaagtacggtgtaagcacgcgtctggcggccgtgtaccgcagcgagtatttggacagcatcggcaaggggcgtgcattcgacatctacgtggcacccaacacccagctcgatttctcgctggactacaagttcaccccgcgcgtgagcatgtacttcgaagcgcagaacctgctggacaagccgctggagctgtaccagggcacccgctcgcgcaccctgcagatggaagagtacggccgcacctatgcgctgggcctgaaggtggcgctgtga

SEQ ID NO: 494350 - DNA, 633 bp, Stenotrophomonas maltophilia
atgaagatcgtcgaagtgcgccacccgctggtgcagcacaagatcggcctgatgcgcaacgctgcgctcagcaccaaggatttccgcgaactggccaacgagctgggtacgctgctggcctacgaggccaccgccgacctggacaccgagccgcacaccctgcccggctgggccggtccggtcaccgtgcagcgcatcgccggtgccaagatcaccgtggtgccgatcctgcgtgccggcctgggcatgctcagcggcgtgctgtcgctgatcccggcggcacgcgtcagcgtggtcggcctgcagcgcgatgaggaaaccctgcagccggtgccctacttcgagcgcctgaccggccgcctggaagagcgcgacgcgctgatcctggacccgatgctggccaccggcggcaccctgatcgccaccatcgacatgctcaagcgtgccggtgcccgccgcatcaagggcatcttcctggtggccgcgccggaaggcatcgaagcggtcaaggccgtgcacccggacgtggagatctacaccgcagccatcgatgcccagctcaacgacaagggctacatcctgccgggcctgggcgacgccggcgaccgcatcttcggtacccgcgtcggttga

SEQ ID NO: 494351 - DNA, 480 bp, Stenotrophomonas maltophilia
atggccgtagccgcaggtaacaaccccgacaccgatctggtgatcagccgtgtgctgaacgcaccgcgcgccgccttgtggcgggcgtggaccgacccggaactgctgcgccagtggtggtgcccgaagccgtggaccaccgaggtacgcgcattcgacctgcgccccggcggggccttccacaccttcatgcagggccccgatggcggcagcagtgacaatccgggcagtttcctggagatcgtgccgcagcagcgcctggtgttcacctcgatgctgggtgcgggctggcgaccgcagtcaccctggctgggctttaccgccgtgatcacgatggaggacgaggggcagggctgccgctacaccgcgcgggtgatgcacccggacaaggccctgcgtgaccagcatgagcagctgggcttcttcgacggctggaacaccgccatcgaccagctggaagccttcgccgccgggctgtag

SEQ ID NO: 494352 - DNA, 360 bp, Stenotrophomonas maltophilia
atgggtaagtattatcctgccattgaagacgtcttccaggcactggccgacccgacccgttgcgcgatcgtagcggcgcttgggcagggaccgcgcacggtgtcgatgctggccgaacccttcgagatggccttgccctcgctgatgaaacacctggccgtgctggagcgcagcggcgtggtgcgcagccacaagcaggggcgcacacgcacctgcgaactggtgccggcgcggctgggccaggccgaacaatggctcgcagaacagcgtgccgcttgggaagcgcgttccgaccgcatggtcgatttcgtcgaaacccttcaccgacaggagcaggcccatggccgtagccgcaggtaa

SEQ ID NO: 494353 - DNA, 294 bp, Stenotrophomonas maltophilia
atgaaagcctctttcctgctggccgccgtcctgctggtcggcctgcccctggctgccaacgccaccaccccgcagcagcagcgcatggccgaatgctcggccaagaacaagggcttgaagggtgatgcctacaagaccgcgcagagctcctgcctcagcggccacgccgccgagaccaaggcggtcaatccgcagcaggaacggatgcgcaagtgcaacgctgacgcgggcgcgaagaagctggccggtgatgcgcgcaagaccttcatgagcagctgcctgaagtcgtcgtaa

SEQ ID NO: 494354 - DNA, 837 bp, Stenotrophomonas maltophilia
atgttcggcaacgcaccgcgtgcgttgtgggaaaaatgggcggcacccgacgagctcaatcgcatcgagctggcctgccgcgcactgcttgccagtccgctggaaggcaagaccgtgctgtttgaaaccggtatcggggcgttcttcgatccgcgcatgcgcgagcgctacggcgtgcaggaaagccagcacgtactgatcgattcgttgcgcgaagccggcttcgagcacgaggatatcgatgtggtggtgctcagccacctgcatttcgatcatgctggcggcctgctggcggcatggagcgaagggcgtgaacccgagttgctgttccccaacgcgacctacgtggtcggtgcgcagcattggcagcgcgccgtgcagccgcatccgcgcgaccgtgccagcttcattccggaactgccgggcctgctgcaggccagtggccggctggaagtggtggacggggagtactcgaaggcacttggccgcagcgtgcgcttcagctacagcgacgggcatacgccgggactgatgctggccgagatcgtcggtcacgcgcatgccggcgaaagtgcgcatggtggcgtggtgttctgtgccgacctgatcccggggcgctcatgggtacacgtgccgatcaccatgggctacgaccgcaacgccgagctgctgatcgacgagaagcggcagttccttgaagacaagctggcgcgcaacgtgcggctgttcttcacccacgacccgcaggtggcgctggcgcagctgggccgtgatgacaagggacgtttcgtgaccctgcacgaacagggcgagctgaaggcgcgcgccctggggtaa

SEQ ID NO: 494355 - DNA, 1731 bp, Stenotrophomonas maltophilia
atgaagacgctgatcgtccgccccttgttgctgctcggcctgctgctgagccccatggcctgggctgacagcccggcccgtgccgatcgccctgatggcgcggccattgccagcggccacgcactggccacccaggccggcatcgacatcctggcgcagggcggcaacgccttcgacgctgcagtggcggtgtcgtccacgctggcggtggtcgagccgatcagttccgggttgggcggcggcggcttcttcctgctgcacgacgcggccaccggcaaggatgtgatgctggatgcgcgcgagaccgccccggctgcggcgaccccgcaggccttcctcgacaagcagggcaacctggaccgtgatcgttcggtcaacggtgcctggtcggcgggtattcccggcctgcccgcagcgctggtcgagctgtcggccaagcacggcaagctgccgttgtcggcctcgctgcagccggcgatccgcatcgcgcgcgaaggtttcccggtgtacgaccgcatggccaagggctacgcgtcgcggcgtgaagtgatggagcgctatcccggcacgcgcgaggtctacctgcgcaatggcaagccgatcgccagcggcgacctgttcaagcagccggaactggcgcagacgctggagcgcctggccgcgggtggctttgatggcttctacaagggccagaccggaaagctgttgctggcgggcgtgaagcaggctggcggcaagtggaccgctgaagaactggccggttaccgcgtcaagcagcgcgagccgatcgtgttcaactacaacggctggaagatcaccaccgcgccgccgccgtcgtccggtggcatcgcgctggcgagcatgctgcagatcctggaaggctgggacatcaggaagatggacccggcccaccgcacccacctggtggtggagtcgatgcgccgcgcctaccgcgaccgcaccttcttcctcggcgatccggacttcgtgcagatcccgcagaaagtgctgaccagcaaggattacgcgcagggcctgcgggcgaccatccatccggagaaggccacgcccagcgacctgctgtcgggcaatccgacgccgctggaagacgacgagaccacgcacttctcgatcatcgaccgcgacggcaaccgcgtcggcgccacccagaccgtcaacctgctgtatggctcggggctgattcccaagggcaccggcgtgctgctgaacaacgagatggacgacttcgcgctgaagccgggcacgcccaatgcgttcggcgtcatgggctatgaggccaatgcgccgaaggccggcaagcgcatgctcagctcgatgacgccgaccttcatggagaacgccgacaaggtcgtggtgctgggcaccccgggtggcagccgcatcatcaccatggtgctgctgggcatcctcggctacgacgacggcctggatgcacagcaggttgccgcgctgccgcgctaccaccaccagtggctgccggacctgatcgaagccgaggacgatgcgttcgacgcggcgacggtgaagcagttgcaggcgatgggccacaagatcgacctgccgggtgacgtcgccgcaggcggccgcggttccagtcacgtgtggggcaacctgcagaccgtggaatgggaccgcaaggcgaacaagctgttcggcggcagcgacccccgcaacccggtgggcagcgcccaggtcgtgccggcacgctga

SEQ ID NO: 494356 - DNA, 282 bp, Stenotrophomonas maltophilia
gtgtcgctgaaaatcaacgagctctgcgtcaactgcgacgtgtgcgagccggcctgccccaaccaggccattgcgatgggtgaaaccatctacgtgatcgaccctgcgcgctgcaccgaatgcgtgggtcatttcgacgagccacagtgcgtggtcgtctgcccggtcgagtgcatcgacccggacccggagatcgtggaaacggaagaccagctgctggccaagctgcgccagctgcagcacgatcaccccgaactctacgcggagcccccatccgaatga

SEQ ID NO: 494357 - DNA, 492 bp, Stenotrophomonas maltophilia
atgaacaccaccatgcgcgcgatgctgatcgcttcgttggccctggccttcaccgcctgcaagaaggaagaggccgctccggtcgacgaggccaagccggccctggtcgccccggccaaggacgacgatgcaggctggaagaagtacctgcaggaagtggcgatccagaacatgggcaacatcaccaacagcccgttcctgtactacctctcgccggaatcggacccggacttccaggccaagtacgagcgccagaccgaaagcgcgacccaggccgtggcccgtggcgtgcagccgggcaacatgctggccttcggttcgtcggcctcgggcaagatggctgacatgatccaggccgtgttcaaggacgtgtcgccggattcgatgaagggcgtgcgcgtcgtcttcatcggccagtcggccgacaacgcccgcgtgcaggctgcgatccagccgaccggtgccgagtacattttcgtcgaagccaagtaa

SEQ ID NO: 494358 - DNA, 510 bp, Stenotrophomonas maltophilia
atgaccgtggccaatcgccgcattgccgtctaccccggcacgttcgaccccatcaccaacggtcatatcgacctggtcagccgggccgcgccgctgttcgaaaaggtcgtggtcggcgtggcgcagagcccgtccaagggcccggcgctgccgctggagcagcgcgtgcagctggcgcgtggcgcgctggcccaccacggcaacgtcgaggtcatcggcttcgataccctgctggcccatttcgtacgttcggtgcagggcggggtgctgctgcgcggcctgcgcgcggtgtccgacttcgagtacgaattccagatggccagcatgaaccgccacctgatccccgaggtcgagaccctgttcctgaccccggccgagcagcacagcttcatttcgtcctcgctggtccgcgagatcgcgcgcctgggcggcgacgtgtccggtttcgtgccggccgcggtgctcgaagccctgcgcaaggtccgcgaagcgaagtcggcacagtcgtaa

SEQ ID NO: 494359 - DNA, 579 bp, Stenotrophomonas maltophilia
atgagcggccgcggtggcaatgacggccaggtccgcatcatcggcgggcgctggcgcaatacccggctgccggtgccgaccctgccgggccttcgccccagcagcgaccgcgtgcgcgagaccctgttcaactggctgatgcccaagctcggcggcgcccgcgtgctggacctgttcgctggcagtggcgcgctgggcctggaggcggtctcgcgtggcgctgcccacgccaccctggtcgagcgcgatgcgcagctgggacgcaacctgaccgccgccgtcgccaggctgcaggccagcgaccagatcaccgtcgtgcaggccgatgccctgcgctggctgcaaggggcgcaggcgcagcaggccgacctggtcttcatcgacccgccgtttgccgatggcctgtggcaggacgtgctggcccagctgccgcggcacctggccgccgacgcctggctgtacctggaatcgccagccggccacgtgccggtgctgccgccggactggctgctgcaccgcgagggtggcacccgcgaggtgcgctttgccctgtaccgccgtgccactgctacactttga

SEQ ID NO: 494360 - DNA, 1893 bp, Stenotrophomonas maltophilia
atgaccgagaccacccagaccgaaacccttggcttccagaccgaagtcaagcagctgctgcagctgatgatccactcgctgtactccaacaaggagatcttcctgcgcgagctggtctccaacgccgccgacgccgccgacaagctgcgcttcgaggccctgacccagccggccctgctggaaggcgacagcgaactgcgcgtgcgcgtcagcttcgaccccgccgcccacaccatcaccatcgaagacaacggcatcggcatgagtcgcgccgaggcgattgcccatctcggcacgatcgccaagtccggcaccggcgatttcctgcgccagctgtccggcgaccagaagaaggattcgcagctgatcggccagttcggcgtcggcttctacagcgccttcatcgttgccgacgaggtcgaagtgacctcgcgccgcgccggcttggccgcaggtgaaggcgtgcgctggacctcgcgcggcgaaggcgatttcaacgtcgccaccgtcgacaaggccgagcgcggcacccgcatcgtcctgcatctgaaggatggcgagcatgatttcgccgacggctggcgcctgcgcagcatcctcaagaagtattcggaccacatcggcctgccgatccagatgccgaaggaaggtggcgaagaaggcgccaccgtcgagtgggagaccgtcaaccgcgccagcgcgctgtggacccgtccgcgcaccgagatcggcgacgccgagtacaccgagttctacaagcacgtggcgcacgaccacagcgatccgctggcgtggagccacaacaaggtcgaaggcaagctggagtacacctcgctgctttacgtgcccggccgcgcgccgttcgacctgtaccaccgcgatgcgcccaagggcctgaagctctatgtgcagcgcgtgttcgtgatggaccaggccgagcagttcctgccgctgtacctgcgcttcatcaagggcgtggtcgactccaacgacctgtcgctgaacgtctcgcgcgagatcctgcagtccggcccggtcatcgattcgatgaaggcggcgctgaccaaacgctcgctggacatgctggacaagctggccgccgacaagccggagcaatacgccacgttctggaaggaattcggccaggtgctgaaggaaggcccggccgaggactacaacaaccgcgagaaggtggccgggctgctgcgcttcgcctccacccgcggcgacggcgatgcgcagacggtgtcgctggccgattacctcggccgcatgaccgaaggccaggacaagatctactacctgaccggcgagagctacagccaggtgcgcaacagcccccacctggaagtgttccgcaagaagggcgtggaagtgctgctgctgaccgaccgcatcgacgagtggctgatgggctacctgaccgatttcgacggcaagggcttcgtcgacatcgctcgtggcgatctcgacctgggcgcgctggaaaccgaagcggacaagcaggaacaggaagccgcggcgaaggacaagcagggcctggtcgagcgcctgaagaccgtgctgggcgatgacgtggccgaagtgcgcgtgtcacaccgcctgaccgattcgccggcggtactggccatcggcgaacaggacctgggcctgcagatgcgccagatcctggaagccagcgggcagaaggtgccggacagcaagccggtgctggaaatcaacccgggccacccactgattgccaagctggatgccgaagccgatggcgcgcgtttcgacgacctcggccgggtgctgttcgaccaggccgcgctggccgccggtgacagcctgaaggacccgggtgcctacgtggcgaggctgaacaagctgctgctggagctgtcggcctga

SEQ ID NO: 494361 - DNA, 1317 bp, Stenotrophomonas maltophilia
atgctcagttttttccgccgcaagaagccccaggatgcccccgcagcggaggcacccaagacccagcactactcggctgaagagctggcggcggcgttcccgtcggccgcgccggtcgaggacaaagagccagcaccggtagccgtaccggccgcgcctgcgccggtcgagccgccgccggcagccgtcgttccggtcgctgtcgagcccaccccggtggttccggcaccggtcgttcccgctccgagcgctccgcaaccggccgcccggatcgacgtcgccccggtggcggccccggccatcgaaccggcacccgcgccactgcctcagccccccccggcaccggtcaccgacgacctgcctgccgccgcctcgatcgatgccgttccggcgcctgccggcaagcccggctggcgcgaacgcctgcgcaacagcgtcatcgcgcgcagcttcggtggactgttctcgcgcaaccccaagctcgacgacgatctgctggacgagctggaaaccgcactgatcaccgccgacgtcggcgtgggcgccaccaccgatctggtcgagggcctgcgcaagcgcatgaagtcgcgcgagttcgccgacgccaatgcgctgctggccgcgttgcgcgccgagctgatcgcgatcctgcagccggtggccaagccgctggtgatcgaccgcaacgccaagcccttcgtggtgctcaccgtcggcgtcaacggcgtcggcaagaccaccaccatcggcaagctggccaagcgcttcaaggatgacggccacagcctgatgctggctgccggcgataccttccgcgccgccgccgtggcccagctgcaggcctggggcgagcgcaacggcgtagccgtggtcgcgcaggggcagaacgccgatgccgcttcggtggcattcgacgcgctgcaggccggcaaggcccgcggcacctcggtgctgatcgccgataccgccggccgcctgcacacccagtccggcctgatgaacgagctgggcaagatccgccgcgtgctcggcaagatcgaccccaccgccccgcacgaagtgctgatggtgatcgacggcaccaccggccagaacgcactgtcgcagttgcgccagttcaatgccgcagtgaacgtgaccggcctggtggtgaccaagctggacggcactgccaagggcggcgtggtgttcgcgctggcccgcgagttcggcatcccgatccgctttgccggtatcggcgagcgcccggaagacctgcgcgtgttcgatccggaagcgttcgtcgacgccctgctgcccgaagcgctgggcgcctga

SEQ ID NO: 494362 - DNA, 1125 bp, Stenotrophomonas maltophilia
atgccccgccagtcgcacgccagcgccgcaaccacgcagaccgacgacttcgtcgcccgcctgctgcactggttcgacggccacggccgccacgacctgccctggcagcatccgcgcagtccctaccgggtctggctgtcggagatcatgctgcagcagacccaggtagccacggtcatcccgtatttccagcggttcctgcagcatttcccgacgctgcccgacctcgccgccgccagcaatgacgcggtgatggcgcagtgggccgggctcggctactacgcccgcgcacgcaacctgcacgccgccgcgaagcgctgcgtggaactgcacgacggcgacctgccgcgcgatttcgatgcattgcatgccctgcccggcatcggccgcagcaccgcaggtgcgatcctcagccaggcctggaacgatccgttcgcgatcctcgatggcaacgtcaagcgcgtgctcagccgctaccacggcatcgacggctttcccggcctgccggccatcgagaaacagttgtggtcgattgccgaggcgcacgtggcgcaggtgccggccgggcgcatggccgactacacccaggcccagatggacctgggtgcgacggtgtgcagccgcgccaagccagcctgcgtgatctgcccgctgcaggacgcgtgcgcggcgcgccgcgaaggccgcaccgccgaactgcccacgcccaagcccagcaaggccctgcccgagcgcgaagcgatggccctgctgctgcgcgacgcccagcagcgcgtgctgctgcagaagcggccggacaccggcatctgggcacagttgtggacgctgccgcaggccgaggccggcagcgaactgcaggactggttcgacgcgcacgttgaaggcacgctggaagacgccgaggagctgcccgtgctgcagcacaccttcagccactacaagctgcacctgcaggtactgtcgcggcaggtgcacggcctgcgcgtggaagagcccacgctgcgctgggtcgccaccgacgaactgcccgcgctgggcctgccggcccccatccgcaagctgctcgatggcgccacgatcaaggcgccgaaacgaacgcccaagaaaccccgcaaccacgagtga

SEQ ID NO: 494363 - DNA, 270 bp, Stenotrophomonas maltophilia
atgtcccgaaccgtcttctgccagtacgaacaacgcgatgccgagggcctggacttcgtgccctaccccggcgaactgggccagcgcatcttcagcaacatcggcaagcaggcctgggcggcgtggcttgcgcaccagaccatgctgatcaacgaaaaccgcctgtcgccgcgcaccccggagcatcgcgcattccttgagggcgaactggtcaagttcctgttcgagaaggacgcggaaaagccggccggcttcaccccggaagcctga

SEQ ID NO: 494364 - DNA, 450 bp, Stenotrophomonas maltophilia
atgaagaccccgatcctgatcgccggactctgcctggcgctggccgcctgcgcgaccaccggccggctcagcagtaccgagaaactggatctgtaccgcgcccacgccggcgcgccgcagaacgacatgcagttcttcggcagcctcaatggctggaccgaactgggtgacagcgcgctggcggtgtggacccggccgagcgaggcttacctgctggaactgagtggtccgtgcccggacctgtcgtacgccaccgccatcgggttgaccagcagcatgggccgcgtgtcatcgcgtttcgacaaggtgctggtgcgcgacccgaccggtggcccgcgcatgccgtgcttcatcaacagcatccgcaagctggacgtgaaggcactgcgtgcctccgagcaggagctgcgccaggcgcaggtgcaggagcgcgaggaaaatacgaaatag

SEQ ID NO: 494365 - DNA, 714 bp, Stenotrophomonas maltophilia
atgaataaggtcttcaaccgcggcgatgaggtgatccgcgccgaagcactgggcaagacctacgccgaagggcgcatgcagaccccggtgttcgatggactggacctgaccgtgaccgccggcgagacggtggcgatcatcggtgcctccggtgccggcaagagcacgctgctgcacctgctgggcgggctggatgttccgactgcaggcgaggtgtacgtcacgggccagcgcatgtcggcgctgtcggataccgcgcgcggcctgctgcgcaaccaggcgctgggcttcgtctaccagttccaccacctgttgccggaattcaccgcgctggaaaacgtgatgatgccggtgctgctggccggcactgccgtggccgaagcgagcagccgggccaccacgctgctggaagcggtcggcctcggacatcgcctggaccacaagccgggcgagctgtccggcggcgaacgccaacgtgccgcggtggcacgtgcgctggtcaatcatccggcctgcgtgctcggtgacgagccgaccggcaacctggatgaccgcaccgcgggcaccgtgttcgagctgatgctggaactcaaccgcgcgcgtcataccagcctggtgctggttacccacgaccgcagcctggcgcggcgcctggaccgggtgctggagctgcgcgaagggcgcctgcacgcactggcccacgccgacgtctga

SEQ ID NO: 494366 - DNA, 1242 bp, Stenotrophomonas maltophilia
atgttcaaacccattcccgtggccattggcctgcgctacctgcgcgccaagcgccgcaacggcttcatctccttcatctcgatggcatcgatcctgggcatcgcgctcggcgttacggtgctgatcaccacgttggcggtgatgagcggattccagaaggaaatccgcagtcgcctgctgcagatgaccgcgcacaccaccatcagccgcgacggcgagccgatgccggactggatgcgcgtggccgacgtggcccgcaaggatccgcgcgtggccggtgccgcgccgtacatcgagatccagtcgatgatcagcggcccgcgcgtgcagggcgcgatcatccagggcatcgatccggcgctggagccgaaggtatcggtgatcgacaagaaggtcaccaagggcagctatgccagcctgacgccgggcagcttcaacctgctgctgggcaaggaactggcgatctggctcggcgtcgacgtcggtgaccaggtgctggtgaccttcgccgaagtgcagggcacgcctgccggtgccgtgccgcggatgaaacgcttcaccgtcagcggcatcttcgaggccggctacaacgaggtcgaccggggcgtaggcttcgccaacatgcaggacctggagcgcgtgctgcgcagcgacggtgccaccggcgtgcggttgaaactgcacgacatggaccgctcgctggaagtgggcgtggacctggcgcagagcctgggtggtgcctaccgcgtgagtgactggacccagcagaacgccaacctctaccactcgctgcgcatggagaaggtggtgatgggcatcctgctgtcgctgatcatcgccatgggtgcgttcaatctggtgtcctcgcaggtgatgctggtgaccgacaagcaggccgacatcgccatcctgcgcaccctcggcctgaccccgggcggggtgatgcaggtgttcatggtgcagggttcgctgatcggcatcttcggcacgctggccggcctgatcggcggcatcaccctgaccctcaacctggaacgcatcctcggtgccatcgagagcgtgttcaacgtcaagctgctgccagaggatgtgtattacatcaccggcctgccgaccgacatgcagaccggcgacgtggtggcgatcaccgtggtcgcgctgctgatgagcttcctggccaccctgtatcccgcctggcgggcagcacgcacccagccggcggaggccctgcgttatgaataa

SEQ ID NO: 494367 - DNA, 450 bp, Stenotrophomonas maltophilia
atgcgcacgcgatccccctcatgcagaagatcctcgccctcaagccttgagtggcgcccctcgcggctgcaggccgccgcccagttggcggtgctgctggctgcgccgtggctgctgcgcgcatcggatctgccttcacggctgctgatgcccgcagtggtgctggcttggtgcacgggcctggccgaactggcctggcgccagcgcaggccgcgcgtgcaggtgcttctgccgccgcttcccgagccactgcaggtggccgggcaggacgttgatacgccacggctggtggtgcgtggcccatggctgttgttgctgtggcgtgaggatcggcgccgccagcgcctgctgttctggccggatgtgctcgattccgggcagcgacgtgaactgcgactggccgtggccgcacgcgccgtttcccgtcagccccggacgatggcaccataa

SEQ ID NO: 494368 - DNA, 249 bp, Stenotrophomonas maltophilia
atggaagaagatgttctgctgaagaagctgcgctggcgctgccgccgcggcatgcgtgagctggaccagctgttcggccgctacctggaccacgagtggagcactgcgccgaccgaagagcgcgaggttttcctgttcctgctcgactgcgaggacgataagttgtggcgctggttcatgggctacgaggcctgcccgcatgcgcacgcgatccccctcatgcagaagatcctcgccctcaagccttga

SEQ ID NO: 494369 - DNA, 786 bp, Stenotrophomonas maltophilia
atggccgagttttcactccccaagaattccaagatcacgaagggcaagcatttccccgtcaagaacggcggcaagaatgtgcgcaccttcaagatctaccgctggagtccggacgacgacagcaacccgcgcaccgatacctatgaagtcgatctggacgcctgtggcccgatggtcctggacgccctgatcaagatcaagaacgagatcgacccgaccctgaccttccgccgctcgtgccgcgaaggcatctgtggttcgtgcgccatgaacatcgacggcaccaacaccctggcctgcacccgagccatctcggactgcggcaagaaggaagtgccgatctacccgctgccgcacatgaacgtggtcaaggacctggttccggacctgacccacttctacgcgcagtacgcgtcgatcaagccgtggatccgtacccagaccccggcaccgccggaccgcgagcgcctgcagtcgccggaagaccgcaagaagctggacggcctgtacgagtgcatcctgtgcgcctgctgctcgaccagctgcccgagctactggtggaacggcgagcgttacctgggcccggcgatcctgctgcaggcctaccgctggatcatcgactcgcgcgacgaggacaccggtgcgcgcctggatgatctggaagatccgttcaagctgtaccgctgccacaccatcatgaactgcgcccggacctgcccgaagggcctgaacccggcgctggcgatcgccgagatcaagaagctgatgatggaacgccgcgcctga

SEQ ID NO: 494370 - DNA, 1791 bp, Stenotrophomonas maltophilia
atgtccgcttacaagatcaccgaacacaagtacgacatggtcgtggtcggcgccggcggtgccggcctgcgcgccacgttcggcctggccgccaagggcctgcagaccgtgtgcctgaccaaggtcttcccgacccgttctcacaccgttgccgcccagggcggtatctcggccgcgctcggcaacatgggcgaggacgactggcgctaccacttcttcgacaccatcaaggggtcggactggctgggcgaccaggacgccatcgagtacatgtgccgtgaggccatcccggccatcatcgagctcgaacattacggcgtgccgttctcgcgcaccgccgaaggcaagatctaccagcggccgttcggtggcatgaccaccaagtatggcgaaggcccggcggcgcagcgtacctgcgcggcggccgaccgtaccggccacgcgatgctgcacacgctgtaccagcagtcgctgaagcacgatgcgcgcttcatgatcgagtacttcgcgctcgacctgatcttcgacgaggaaggcgcctgccgcggcgtgctggccctggacatgtccgacggcaccctgcacctgttccgcgcccagggcgtggtactggccaccggcggctacggccgtgcctacttcagcgccacctcggcgcacacctgcaccggcgacggtggcggcctggccatgcgtgctggcatcgccatgcaggacatggagttcgtgcagttccacccgaccggcatctacggcgccggctgcctgatcaccgagggtgtccgcggtgaaggtggcatcctgcgcaacagcagcggcgagcgcttcatggagcgttacgcgccgcactacaaggacctggcctcgcgcgacgtggtcagccgttcgatgaccatcgagatccgcgaaggccgcggcgtcggcgagcacaaggaccacatcctgctcgacctgacccacctcggcccgggcgtgatcgacgagaagctgccgggcatcgccgagagcgcccgcatcttcgccggcgtcgacgtacacaagcagccgattccggtcatcccgaccgtgcactacaacatgggcggcatcccgaccaattaccacggcgaagtggtgcagaaggtcggcgacaacgacaacgcggtagtgccgggcctgtacgccatcggcgaagcggcctgcgtgtccgtgcacggcgccaaccgcctgggctcgaactcgctgctggacctggtggtgttcggccgtgccgtggccaaccgctgtgccgagaccatcaagccgggcgctgcgcacaagccgctgccggccgatgcctgcgacaaggcgctgggcctgctggacaagctgcgccacgccaacggcgataccccgacctcggtcatccgcgatcgcatgcagcgcaccatgcaggccgacgcggcggtcttccgcaccagccagacgctgaaggaaggctgcgagaagatggacaagatcttcgactcgttccaggacgtgaaggtctccgaccgttcgctggtgtggaactcggacctgatcgagacctacgagctgaacaacctgctgctcaatgcggtggcgacgatcaactcggccgaacagcgcaaggaaagccgcggcgcgcatgcgcacgaggacttcccggaccgcgacgacgtcaactggcagaagcacaccctggtcagcgtcgacgagaagggcaagtgcagcttcgactaccgtccggtgcacatgtacacgttgaccgacgacgtgtccgtggtgccgccgaagccgcgcgtgtactga

SEQ ID NO: 494371 - DNA, 387 bp, Stenotrophomonas maltophilia
gtgagcaagttccgtaccccgttgaagaacgtgcgcggccttggctcggccaagaccggcaccgagcacttcgttcaccagcgcctgaccgccgccgcactggtggtgctgggcatctggttcctggtcttcgtgctgggcctgctgggctcggactacgccaccgccgccgccgccgtggccaagccgtggaacgcggtgccgttgatcggcctgctgatcgccatgttctggcacgcgcagctcggcatgcaggtcgtgctggaagactacatccacgaatcgctgctggccctggtgctgcagaccgcggtgaagttcgtcgccgtgctcggcatgatcgtcagtgtgtttgcggtgggccgcatcgccctcggcgttgcctga

SEQ ID NO: 494372 - DNA, 393 bp, Stenotrophomonas maltophilia
atggcgaccagacaacgcccactttccccgcaccttcaggtgtatcgctggcagattcagatggccacctcgatcctgcatcgagccactggcgtctttctgtctgttggtgccctcatcatcgccgccggcctgctggccctgatgatggggcccgagtcctggaactgcttcaccggccatgccggggcctggtatggccgcgtgttcctgttcgcgtggacatggtcgttcgcctatcacctgtgcaatggcatccgccacgtcgtgcaggacttcgccatcggcttcagcatccccgccttcatccgcagcagctggctgtcggtcatcggcagcctggtgatcaccctgctggtgtgggcctatgtgatgttcggaggtgccgcgtga

SEQ ID NO: 494373 - DNA, 171 bp, Stenotrophomonas maltophilia
atgataggccaaacaacccccactcccgacgacgaatctgaagccccgctggtccccgcggcacccgtgcccgtggaacaggaaaaagcggaagaattcggcggccgcggcggacttgatccggtgcggtatggcgattgggagaaaaacggacgctgcatcgatttctga

SEQ ID NO: 494374 - DNA, 876 bp, Stenotrophomonas maltophilia
gtgcctgacaacctgccccctgctttcgtcggatatccgcgcctgcccggccaccagctgctgagcctgcagggcccggatgcggctgtctttgcccacgcccagttcagcagcgatgtcaccgccctgcccctgcagcactggcagtggagtgcctggctgagcgccaagggccgtaccctggcggtgttccagctgcttcggctggccgacgaccacgtgatgctggtgctggctgacggcgatgccgatgcgattgcgtcgcaactgcagcgcttcgtgttccgccgcaaggtgaaggtgcaggtgcgcagcgatctggcggcggctggcgcgttcaccgcgcccgaggccgccagcggcgcggcgattgcgcagaccacaggcgacggctgggagctggacctgggcagcgatgccctgccgcgcaccctgcgcattggcagcgccgacgcgttcgctgccggcaatgaagccgatgaggccgctttcgccctggcctggcgccaggccgacctgcgctacggcctgccgcggctggaagaaggccagcgcgaagtgtggaccccccaacagctgggcctggaccgcctgaacggctacagcgtgaagaagggctgctatcccggccaggaaatcgtcgcccgcacccacttcctcggcaaggccaagcgtgcggtgcagttgctgcataccgcagcaccggcacaggccggcgatggcgtgcagcaggatggcgcggggctgggcacgattgccagcgtggccggcgacctggcactggcggtactgccactggaggccagcgacgctgatctgcaggtgggcgatgccattgcgcagcgcgtgccgttgctggatggcctggcccgctga

SEQ ID NO: 494375 - DNA, 1083 bp, Stenotrophomonas maltophilia
atggcaaaagtgcagttgcagggtgtgcgcaaggtctatgacaacggccaggtcgcggtgaaggacgccagcttcgaggtcgccgatggcgagctgatggtgctggtcggcccgtccggctgtggcaagtcgaccctgctgcggatggtggctggcctggaggagatcagcggcggcacgctgaccatcggtgatcgcgtggtcaacgacgtggcgccgaaggatcgcgacatcgcgatggtgttccagagttatgcgctgtacccgcacatgaccgtggccgagaacctggcctttggcctgaagctgcgcggtcacgacaaggcgaccatcgacaagcgcatcgccgaggcggcgcagacgctgggcctgaccgagatgatggacaagctgcccaaggcgatgtccggtggccagcgccagcgtgtcgcgctgggccgtgcgctggtgcgcgagccggcggtgttcctgctcgacgaaccgctgtccaacctggatgccaagctgcgtcacagcgtgcgtaccgagatcgcgcagctgcaccgcaagctgggcaccaccatgatctacgtgacgcacgaccaggtcgaagcgatgaccctgggccagcgcatcgtggtgctgaaggatggcgtcatccagcagatcgatacgccgatggcgctgtacgatcgccccgccaacctgttcgtggccggcttcctcggcagcccggcgatgaacgtgctgcgcggtacgctgcagggcgatgccggtggcgtgaccgtggtcgatggtgagtggcgtgcaccgctgggccaggccaccatcgatccggcctggctgcagaagccgatcgcggtgggcgtgcgtccggagcacctgcagccggcggccgccgacgatgcgcatgcgttcgtcgcacgcattgaaggcatcgaaccggtcggtaacgagatcttcgtcaacctgagcagtggccagcacgcgctgaccatgcgcgtggcgccgcaggcgctgcccgaggtgggcgagcagatccgcgtggcgatccatccgcagggcctgcatttcttcaacccggaaaccggcgcgcgcctgtaa

SEQ ID NO: 494376 - DNA, 1437 bp, Stenotrophomonas maltophilia
atgcacgacaccctcttcctgttcggtgccacaggtgatctggcccagcgctacctgttcccttcgctgcttcgcctgcttggcgacggcctgctgccggaggacttccgcatccgtgcgctggccctgtccgggcatgacaccgaagccttccatgacatcctgcggccgcgcctgcagcaggccatgccgatggccacgcaggacgacatcagcgccctgctgcgtcgcatcgactaccgctctgtggacctgcgcgacgtcgactcggttgccgccgcggtcgccgacctcgtgcaccgcaagtgcgtcagctacctcgccatcccgccgggcctgtacatctccacctgcgaaggcctggccaagggcggcgccctcgccgcgccggcacgcctgatgctggaaaagccgatcggcagcgacagcgagagcgccgaggaaatcatcagcaccatcggccagtggatcgacgaggaccgcgtgttccgcctcgaccactacctgggcaaggccgcggtgcagaacctgatcgcactgcgcttcggcaacacgctgctggaagcggtgtggaaccgcaactacatcgaatcggtgcacatcctggtggccgaaagcgaaggcgtggatggccgcgatgcctattacgcccgctccggcgcactgcgcgacatggtgcagagccacatcctgcagctgctgtgcatggtggcgatggaaccaccggcatcgctggaagccgatcgcatccgcgacgagaaggtcaaggtgctgcgcgccctgcgcccgctcgatgcccggcacgccgcgcgtgacagcatccgtggccgctacaccgccggcaccatcaatggccagccggcacaggcctaccagccgccggaaggcagcgacgtggaaaccttcgccggtgtcaccgcgcatatcgacaactggcgctggagcggcgtgccgttccacctggtcaccggcaagcgcctgcccgagcgcaccacccgcgtggtggtcacgctgaagccggtcacccactggctgttcgagcgcccgcagcgcgcgcaggccgcaccgaaccgcctggtgttccagctgcagccgcaggaaaacatcgaactgggcctgatgagcagcctggcaggcccggaatggggcgcgctggagctgcatccgctggagctggaactgtcggtgccgaccggcctgcaccgccgtatcgcttacgaacgcttgttcctggatgccttcaacggcaaccacacgctgttcgtgcgcgatgacgaagtgcgtgcggcctgggcctggatcgacagcgtcgccgacgcctggaaggacgccaagctgccgctggagccctaccccgccggccaatggggcccgggcaatgcgggcgggttcctgccgcaggacctggacgcgcccgacagcggagcgtcggcatga

SEQ ID NO: 494377 - DNA, 1008 bp, Stenotrophomonas maltophilia
atgagtgccagctcgcagccagtgctggtcgccgacatcggtggcaccaacgcgcgcttcgccctggccgacacctcgctggacgcaccgctgcagaaggacagcatccgcgagtacgcggtggcggagttcccgtcgctgggtgatgccgcgcgccaccatctggaacagatcggcgccacggcaagccgcggcgtgttcgccgtggccggtcgcgtggatggtgacgaagcacgcatcaccaaccatccgtgggtgatctcgcgcagccgcaccgctgccatgctcgggttcgacgaactgcacctgatcaacgacttcgccgcgcaggcgatggcgatttcgctgctgcagcccgatgacgtggtccaggtcggtggggctgcctgggtaccgggcaagcccggccagccacgcaactacgcggtgatcgggcccggtaccggtctcggcgtcggcggcctgatcatgcgccacggccgttgctatccgctggaaaccgaaggcggccatgtgagcttcccgccgggaaccccggaagagatccgcatcctggagatcctgtccgagcagttcggccgcgtctccaacgagcgcctgatctgcggccccggcctggtcaacatccatcgcgccgtgtgcgagatggccggcatcgatccgggccagctgcagccggtggacgtgaccgcccgcgccctgcacggcgatccgcaggcgatgcgcaccgtggatgtgttctgcgccgtgttcggcgccattgctggcgatctggtgctgacccagggcgcctgggacggcgtgttcctgaccggcgggctgaccccgaagatgctcgattcgctgcagcactccggtttccgccagcgcttcgagcacaagggccggttctcttccatcatggcgcgcgtgccctcgttggcggtgatgcatccccacgccggactgctgggcgccgccgcctatgccgccgacgccgaacgtgacgcacctggagttgccgcatga

SEQ ID NO: 494378 - DNA, 726 bp, Stenotrophomonas maltophilia
atgagccccaccaccttccacgacgaccgcatcgagttcatcaaccatggcgatgccgatggctggatcgaagccgttgccgccgagatggcgcacaccctcaaccacgacatcaacgaagtgggccgcgcccgcatcctgctgtctggcggcactacaccggcgccggtctaccaggcgctggccgagttggacgtgcactgggaccgggtggaagtgagcctggccgacgagcgctggctgtcgccgcaggatcgcgacagcaatgcctggctggtgcgcgagcacctgctgaaacgcgccgagggtgcgcatttcgatccactggtgcggatcggcaagcccctgcccgaatgcgtgtacaccgccaacctgcaggcacagcacagccagccgccgagcctggtggcactgggcatgggcaacgacggccacaccgcctcgctgttcccgggctcgaaggacctcgcccgcgcactggaaagcaccctgccctatgccgcgctggatgccaccggctgcccgggcgcgaaccagtggccgctgcgcatcacgctgaccccgcatgggctgcgccagtgccgacagcgcctgctgctgctgcgcggcaagcagaagctgcaggtgctgcgccaagcgttggacagcaacgacgcccagcagtatccgatcctcaacgcgatcaacctggaaggcgcgcgcctgcgcgtccactgggctgattga

SEQ ID NO: 494379 - DNA, 1917 bp, Stenotrophomonas maltophilia
atgagcctccatccgcaattgcaagccatcactgagcgtgtcatccgccgcagcgccgcctcgcgtgccgcctacctggccgcgatcgacgcctccctgcgcgaaggcccgttccgcagccgcctgagctgcggcaacctcgcccatggattcgccgcctgtggcggtaccgacaagagccgcctgcgcggcggcgtgacgccgaacctgggcatcatcaccgcctacaacgacatgttgtcggcgcaccagccgttcgagacctatcccgagcagatccgcgagatcgcccgcgagctgggtgctacggcacaggtggccggcggcgtgccggcgatgtgcgacggcgtcacccagggccgcggcggcatggaactgtcgctgttctcgcgcgatgtgatcgcccaggccactgcgatcggcctcagccatgacatgttcgataccaccgtctacctcggcgtgtgcgacaagatcgtgccgggcctgctgatcggcgcgctggccttcggccacctgccggcggtgttcgtgccggccggcccgatgaccccgggcatcccgaacaagcagaaggcggaagtgcgcgagcgctatgccgccggcgaagccacccgcgaagagctgctggaagccgagtccgcgtcgtaccacggcgctggcacctgcaccttctacggcaccgccaattccaaccaggtgctgctggaagcgatgggcgtgcagctgccgggcgcatcgttcgtcaatccgggcacgccgctgcgcgatgcccttacccgcgaagccaccgaacgtgcactggacatcaccgcgctcggcgacgacttccgtccgctgggccggatcatcgatgagcgcgcgatcatcaacgcggtcatcgcgctgatggccaccggcggttcgaccaaccacaccatccactggatcgcagtggcgcgtgccgccggcatcgtgctgacctgggacgacttcgacgaactgtcgcagctgattccgctgctggcccgcgtctatccgaacggcgaggccgacgtgaaccgtttcgcggccgctggcggaccggccttcgtgttcggcgagctgatcagggcgggcctgatgcacggtgacctggtcagcgtggcgcgcggcggcatggccgactacgcgcgcgagccgcagctgcgcgacggccagctggtctacctgccgggcctgcaacacagcgccgatgacgaagtggtgcgtggcgtcgacaatccgttcgagcaccagggcggcctgcgcctgctgcgcggcaacctgggcaagtcgctgatcaagctgtcggcggtgaagccgcagtaccgcacgatcgaagcaccggccgtggttgtcgatgcgccgcaggtgctgaacaagctgcatgccggcggcctgctgcccgagcacttcgtggcggtggtgcgttaccagggcccgcgtgccaacggcatgccggaactgcattcgctggcgccgctgctggggctgctgcagaaccagggccggcgcgtggcgctggtcaccgacggccgcctgtccggcgcctcgggcaagattccggcggcgatccatgtgacgccggaagcggcgcgcggtggtccgctggccaaggtccgcgagggcgacatgatccgccttgatggcgaggccggcacgctggaagtgctggtggacgcggccgagtgggccgcgcgtccgctggccccgaacacggcgcctgccgcgcatgacctgggccgcaacctgttcgcgatcaaccgtcgcgtggtgggtccggctgatcagggcgcgatttcgatttcgtgcgggccggcggcggccgatggcgggccgtgggaatacgacgcggagtacgagctggggcacgatgccgcagcggcggcggcgccgcatgaggcaaaagacgcctga

SEQ ID NO: 494380 - DNA, 660 bp, Stenotrophomonas maltophilia
atgggtatcgaacaacatcaggtgaaggcggcggagttgttgcgtgcggcgggcatcctgccggtggtgacgattcatacgctggaccaggcgcgtgcggtcagtgcggcgttgctggaaggtggcctgccggcgatcgagttgacgctgcgtacgccagtggcgatggaagcattggcgatgctcaagcgcgagctgccggacgtggtggtgggcgccggcacggtgctgaccgtggagcagatgcagcagtcgatcgatgcgggcgcggacttcctggtgaccccgggtacgccaccggcgctggccgatgcgctggcggcggcaccgctgccggtagtgccgggtgcggccacgccgaccgaactgctgtcgctgtatgcgcgcggcttccgcgtgtgcaagctgttccctgccaccgccgtgggggggctggcgatgatcaagggtctggccggcccggttgccgacctcaagctgtgcccgaccggcggcatcaccgaaaacaccgccgccgagtacctcgagcagaagaacgtggtctgcatcggtggttcgtggatggtgccgggcagctggatcgccgacggtcagtgggacaaggtgcgcgccagcgccgccgacgccgcgaagatcatcaagcgcgtacgcggccactga

SEQ ID NO: 494381 - DNA, 648 bp, Stenotrophomonas maltophilia
atgacgattcgagtctacctggtggatgaccacgcactggtccgcaccgggatgaagatgatcctgtcgggggagaccgacatcgaggtggtgggcgaagccgagaccggcgaagatgcgctgcgcgacgtccgccagctgctgccggacgtggtgctgtgcgacctgcacctgcccggcgtgagtggcatggaggtgaccgagcgcatcgtccgcagccatcgcaacacccgcgtggtgatcgtgtcggtgctggaagacgggccgctgccgaagcgcttgctggaagccggggctgcgggctacatcggcaagggctgcgatgcacaggagctgctgcgtgcggtgcgcgatgtggccatgggccgtcgctacctgggcaccagcatcgcgcagaacctggccttgtcgaccgttgaaggcaacggctctccattcgacagcctgtcgccgcgcgagctggaagtggcgttgctgctgacccagggcttgcgccaggaagacatcgcgcggcgcctgagcctgagcgcgaagacggtgaacacgcacaaggcgcggctgttcgagaagatggggatccacgacaacatcgcgctggcgcgcatggccagccagtacgggctggtggatccggcacggccgctgtaa

SEQ ID NO: 494382 - DNA, 750 bp, Stenotrophomonas maltophilia
atgtccgaagcgccggataagcctgcgatcctcgctgcgccggagtccgcctccggtttccgccactggatggcgcacaatgcctggcgcctggtgctgctgttcggtggcgtgctgctgccgttggcgggtttcgtcgccctggccgacgaagtgcacgagtttgaatcgttccatttcgatgcgccgctgctgtggcagatgcatggcctgcactcaccgctgctggaccgcttcttcgtgctcatttccaggctgggctacgaatggttcctgattcccgccgacgtgctgatcatcggcgtgctgctgggctaccggcgttggcgtgaggccacgttcgtggcggtcagcttcgtcggctcggcgctgctgaacatgggcagcaagcatttcttccagcgccagcgccccagcctgtgggaatcgatcgcgccggaatcgacgttcagctttcccagcggccacgcgatgggctcgatgaccctggccgtgaccctggtgctgctggcctggaacacccgctggcgctggccggtgctgctgctggcgcccgcgttcagcctgctggtcagcgtctcccgggtctatctgggcgtgcattacccctccgatatcctggccggatggtgtgccgcgctggtttgggtggtagggtgctatctggtcatgttcagtcgccggcatccttggcgacgtcaggattcgccgccagcgacggccagcgaagcatcatcacagggggattga

SEQ ID NO: 494383 - DNA, 1266 bp, Stenotrophomonas maltophilia
atgcacgacgccgtcacccgcccgactcctccctccgatgccacctcctggccccgccgccagacccatgccgtgcagatcggcggggtcaccgtaggcggaggcaagccggtcgtggtgcagtcgatgaccaacaccgacacgtccgacgtggcctccagcgtgaagcaggtggccgagctgtggcgggccggttcggaaatggtgcgtttgaccgtcaataccgtggaagccgctgcggcgatcccgcgcatcgtcgacaagctggcgatgatgggcatcgacgtgccgctgatcggtgatttccactacaacggccaccagctgctgaccgccgagccggcatgtgccgaagcgctggccaagtaccgcatcaacccgggcaacgtcggcttcggcaagaagaaggacctgcagttcgcccagttgatcgagttcgcgatccgctacaacaagccggtgcgcatcggtgccaactggggctcgctggaccaggccctggcggcgaagttgatggacgagaacaacctgcgcgagcagccctgggatgccggtcgcgtgctgcgcgaggcgctgatccgttcggcgctggattcggccgagcaggcggtggagctcggcctgccgcgcgatcgcatcgtgctgtcggccaaggtcagtggcgtgcaggagctgatcgcggtgtaccgcgacctggcccagcgctccgattttgccctgcacctgggcctgaccgaggccggtatcggcagcaagggcatcgtcgcctcgtcggcggcgctgggcgtgctgctgcaggaaggcatcggtgacaccatccgcatctcgctgaccccggaaccgggccagtcgcgcacgcaggaagtgatcgtcgcccaggaactgctgcagaccaccggccagcgtgccttcacgccgctggtcacggcttgtccgggctgcggccgcaccacctccgagttcttccaggaactggccaaggtggtgcagaaccacgtgcgcgagaagatgccgctgtggaagatccaccatccgggtgcggagaacatgaccctggcggtgatgggctgcatcgtcaatgggccgggtgagtcgcggcacgccaacatcggtatttccctgccgggcaccggcgaaaccccggccgcgcccgtgttcgtcgatggcgagaagaaggtgaccctgcgtggcgagaacatcgcccaggagttcgtcgccctgatcgacgattacgtcgaacacaaatatgtccgaagcgccggataa

SEQ ID NO: 494384 - DNA, 1227 bp, Stenotrophomonas maltophilia
atgaccggtcccgacgccccgtttctccgtaccctgtgcagcctgcgctggcttgccgtaggcggccaggccgccaccatcctggttgccacctgggtgctgggcctgccgttgccgcagctgccgctatgggccggcgtggcggtgctggccctgttcaacatctatacccagttgcgtccggacgcggctgacaccgcaccgctgaccgcgttcggccacatcctggtggacgtgatcatcctgacctggatggtcggctggagcggcggcatggccaacccgttcagctcgctgttcctgatcctgatcgcgctggccgcgttcgccctgcccctgcgctgggcactggcggtcgcactggcctgcctgctcggctacgccgccagcggcatcttcggccagccattgccggacggttatttccgcgcgcaggacctgaatcgctggggcgtggtcgccaacttcctgatttccgccgcggtggtactggccttctccacccggctggcgctggccctgcgggagcgcgaactggaactgtcggcactgcgcgagcgcttcgcccgcaacgagggcatcgtcgcgctggccacccatgccgcctcggtggcgcatgaactgaacacgccgctggcgaccatgaccctgctcgccgacgatgtggccgagcgcagcgaagagccggaagtgcgcgaggacatggaaaccctgcgcgagctgctggtgcagtgccgggagcgcgtgctggcgctggctgctccggcctcggccgacgcaccgggccgcagccattccagcgcacagcaggtgctggagcaatggcgcctggtgcggccgaccatcgacctgcaccgcaacgatgatgcgccactgcggctaccgctggacccgggcgttggccatctgctgatggtcctgctcaacaacgccgccgatgccggcgagaaagccggccggccacgcgtggacctggacctgcgcatcgaaggcgacgacctgatcggcgaagtccgcgactacggccatggcttcgacgcccgtgccgccgtgctgccgggcaagctgttcggcagcagcaagagcgagggcatgggcgtcggcctggccctgtcccatgccaccatcgaacgcctcgacggcgagatgtggatgcgcccggcccagggggccggcagccgcgtcggcttccgcctgccgctggccccacgcgaggacaccccatga

SEQ ID NO: 494385 - DNA, 570 bp, Stenotrophomonas maltophilia
atgagccttcaccattccaccctgggcctgctggtcgacgacgacgagctgtacctgcgtaccctgcaacgcagcctggcccgcaaggggcttgaaacgcagaccgcacaggatgccgccagtgcgctggcgctggcccggcagcatccaccggcgttcgcgctgatcgacctgaagctgggcagcgattccggcctggcactgatccagccgctgcgcgcgctgcgcgcggacatgcggatcctgctggtgaccggctacgccagcatcgccaccgcggtggaggcgatcaagctgggtgcggatgattacctgccgaagccggccacggtgccgatgatcctgcgcgccctcggcgaggaagacgacggcccggccgacgatggcgaaatggaagtgcccgatgcgatgacgccgatcagccgcctgcagtgggaacacatccagcaggcgatgcacgagaccggcggcaatgtgtcagcggccgcgcgcctgctcggcatgcaccggcgctcgctgcagcgcaaactggccaagcggccaagcccggagcgcgacccgagccggtga

SEQ ID NO: 494386 - DNA, 1515 bp, Stenotrophomonas maltophilia
atgacaacgaacaacggattcgactcgctgcattcccacgcccagcgcctgaagggcgcaagcattcccagcctgctcgccgccgaacccggccgtgtacaggagctggcgctgcgggtcggtccgttgtacgtcaatttcgcccggcagaaatacgatgccgcggcgttgcaggcgctgttggcgctggctgccgagcgtgatgtcggcggtgccatcacgcgcctgttccgcggcgaacaggtcaacctgaccgaagggcgcgccgcgctgcataccgcgctgcgcggcgatgtggtcgatgcgccggtggcggccgaggcctatgccaccgcgcgcgggatccgccagcgcatgggcgtgctggtgcgcgcgctggaagacagtggcgtgaccgatgtggtcagcgtcggcatcggtggttccgaccttggcccgcgcctggtcgccgacgcgctgcgtccggtcagcggtgcgcgcctgcgcgtgcatttcgtctcgaacgtggacggcgccgccatgcagcgcacgctggccacgctggatccggccaagaccgccggcatcctcatctccaagaccttcggtacgcaggaaacgctgctcaacggccagatcctgcacgactggctgggcggcagcgagcgcctgtatgcagtcagcgccaatccggatcgcgccgccaaggccttcgcgatcgccgccgatcgcgtactgccgatgtgggactgggtgggtggccgctattcgctgtggtcggcggtcggtttcccgatcgcgttggcgatcggcttcgagcgctttgagcagctgctggaaggcgccgcacagatggatgcgcatgcgctggatgcaccgctggagcgcaacctgccggtgctgcatggcctgaccgacatctggaaccgcaacctgctgggccatgccacgcatgcggtgatgacctacgaccagcgtctggcgctgctgccggcctacctgcagcagctggtgatggaaagcctgggcaagcgcgtgcagcgtgatggtgcgccggtcaccaccgacaccgtgccggtgtggtggggtggggcaggcaccgatgtgcagcacagcttcttccaggcgctgcaccagggcaccagcgtcgttccggccgacttcatcggctgtgtgcacaacgatgatccctacacgatcaatcaccaggccctgctggccaacctgttggcacagaccgaggcgctggccaatggccagagcagcgacgatccgcaccgtgattacccgggcgggcggccgagcacgctgatcctgctcgacgcgctgaccccgcaggcactgggtgcgctgatcgccatgtacgaacacgccgtgtacgtgcagtcggtgatctggaacatcaacgcgttcgaccagttcggtgtcgagctcggcaagcaactggccagtggcctgctgccggcgctgcagggcgaggatgtggcggttgccgatccgatgacccgcgagatcctggcgcagctgaagcgctga

SEQ ID NO: 494387 - DNA, 381 bp, Stenotrophomonas maltophilia
atgcacctgtccctgctcaagaccaagatccatcgcgccaccgtcacccattccgagctgaactacgaaggctcgatcgccatcgatgacaacctgctggctgccaccggcatccgcgagttcgagcaggtgcacatctgggacgtgaccaatggtgcgcgtttctcgacctatgccatccgcgccgaagccggcagcggcgttgtctcgctcaacggtggcgctgcgcgccacgtgcaggtcggtgacatcatcatcatcgccgcgttcgccagcatgaccgagcaggaagctgacagcttcaggccgaagctggtgtacgttgatggcaacaaccagatcacccacaccaacgacacgatcccgacccaggccgcatga

SEQ ID NO: 494388 - DNA, 840 bp, Stenotrophomonas maltophilia
atgatccagaccttcaacgagctcggcgcgttgcgcgagcagatcgcccagtggaagcgtgagggcctgcgcgtggcgctggtgccgaccatgggcaacctgcatggggggcaccattcgctggtgaccctggcccgccagtacgccgacaaggtggtggcgagcatcttcgtcaatccgacccagttcggccccaacgaggatttcagtcgctacccgcgcacgcccgaggccgacgtggccgggctggagcaggtcggctgcgatgccgtgtggctgcccagcgtggagacgatgtatccgctgggcgtggacaggaccacgcgcatgcacgcgccgggtgtcagtgaagtgctggaaggcgccagccgcccggggcacttcgatggcgtctgcacggtggtggcgcgcctgttcctgcaggtgcagccggacgtggccgtgttcggccgcaaggactaccagcagcttgccgtgatcaggcagatggtggccgagctgtcgttcccgatccagatcgtcggtgctgagatcgtgcgcgacgaggatggcctggccaagagttcgcgcaaccagtacctgagcgacgaacagcgcccggtcgcgaccaccatccaccgcaccctgctgggcatgcgcgagggctacgtggcggggcaggcacgtgatcgcatcgaagccgacgccacggccgcattgcaggcagccgggttccaggtcgactacgcggtgctgcgcaccccggagctggccgagccgaccttcgacggcggtggccgcgtggcgctgattgccgcgcgcctgggaaccacccggttgatcgacaacctggagttctga

SEQ ID NO: 494389 - DNA, 816 bp, Stenotrophomonas maltophilia
atgagcacccacgcagacagcaagccctggaccgttcccgccctggccgaggccaagcgcaatggccagaagctggtcatgttgaccgcctacgacgccggcttcgcccgcaccttcgatgccaacggcgtcgatctgatcctgatcggcgattcgctgggcatggtcgtgcagggtcatgattcgaccctgccggtgaccgtggccgacatggtctaccacacccgggccgtggcccgcgtgctgcagcgtgcgctgctggtggccgacctgccgttcggcgccgatgccaccccggaacgcgcgctggatgcctcgctgcagctgctgcaggccggtgccgagatggtcaagatcgaaggtgccggcttcaaggtcgacatcatccgctacctggtcgagcgcgagattccggtctgcgcgcacctcggcctgaccccgcagtcggtgctgcgactgggcggcttcaagatccagggccgcggcgatgctgcgcgccagctggtggaggacgccagggccgtggccgccgcaggcgccagcatcatggtgctcgaatgcgtgccgaccccggtcgctgccgaagtgaccgctgcggtggatgtgccgaccatcggcattggtgctggcccgcagtgcgatggccaggtgctggtgctgcacgatttcctcggcctggacagtggccatcgccgtcccaagttcgtcaaggatttccttgccgaaggtggctcggtggccggtgccacccgtgcctttgccgacgcggtgcgcgacggcagcttccccgacgaacagcacgcctacgcccaatga

SEQ ID NO: 494390 - DNA, 486 bp, Stenotrophomonas maltophilia
atgacccttgcctggatcggcctcggcgccaacctcggcgacgcggccgccaccgtcggcgcggcgattgccgcgctggacggcctgcccgggacccggctgcgccaggcctcgcggctttacgcaacgccggcctggggcaatgaagaccagccgccgttcgtcaatgcggtggcctcggtcgaaaccaccttgccggccgatgagctgctgcaggccatgctggcgctggagcagcgcttcggtcgcacgcgtgatccggcagtgcactggggcccgcgcgcgctggacctggacctgctgctgtatggcgcgcaggcgctcgaccagcctgggctgaaggtgccgcatccgtacctgcacgagcgtgccttcgtgctggtgccgctggccgaaatcgcgccggaacttacaattcctggccatggacgcgtgcaggatgcagtgatgcaggtcgatgcctgcgggatcgcgccgatagggtga

SEQ ID NO: 494391 - DNA, 1386 bp, Stenotrophomonas maltophilia
atgccattgggcaatcccgaaacttcaaccggaagcgccaacatcatttcctctgctacatcaccgttcagcctgcgcgtcatcccgcgcgaccagcacacgatctcccgcaaggacatcagcccgaacgccctgcgcgtgctttaccgcctgcgcgatgccggcttcggcgcctaccttgtcggcggcgcggtgcgcgatctgctggtcaatggccaacccaaggatttcgacgtggccaccgacgccacgcccgagcaggtcaagcagctgttccgcaactgccgcctgatcggccgccggttccgcctcgcccacgtagtgttcggtcgcgaaatcatcgaagtcgccaccttccgtgccaacagcgatgacggcagcggcgaccgcgagatggaaaacggcatgctcgtgcgcgacaacgtgtacggcaccatcgaagacgacgccatccgccgcgacttcacctgcaacgccctgtactacgccatcgaggacttctcggtgcgcgactacaccggtggtttcgaggacgtgcaggcgcgcctgatgaagctgatcggcgacccggtgcagcgctaccaggaagacccggtacgcatgctgcgagcggtgcgcctggcggccaagctcggcttccagatcgaagagggtactgccgcgccgatcccgcacctggccggcctgctcaacgaagccgcgccagcgcgcctgttcgaggaagtgctcaagctgttcctgtccggacacggcgtggccagcttcgaaggccttgagcgttacggcctgctcgacgtgctgttcccggaaagcgccaaggcgctgaaagccaaccgcaccggcgcgctgcgccgcatgctggtcgagggcctggccaataccgatgcgcgggtggccaacgacgaaccggtctcgccggcgttcctgttcgcgctgctgctgtggccggcgttctgccgtgcacaggcgaccctgctcaagcagggcgtggcaccggaagaggcgcagcgccgcgccgccgaccgcgtcaccgtgcagcagttgagcaccatcgcgctgccgcgccgcttctcgctgccgatgcaggaaatctggctgctgcagtcgcgcttcagctcgcgccagcgcaagcgcgtgttccgcaccctgactcatccgcgcttccgtgccgcgttcgatttcctcagcctgcgccaggtggcgtcgtccgagcacgccgccgatgtcgagttctggcgcgaagcgcaggcgcagtccggtcgtgagctggaatcgtcgctggatgcgatgcacagcgaagatggcgatgacgagagcggagcgccgcgcaagcgccgccgtcgccgccgtcgtccgggtgccccggccggtgcagcgggcgagtag

SEQ ID NO: 494392 - DNA, 1425 bp, Stenotrophomonas maltophilia
atgtcccaggccccgtcccgcaccgcctcccacggtggtgaaaacacggcgttcatcgtcctgatcagttgcgtggccacgcttggtggcttcctgttcggcttcgacagtggtgtcatcaacggcacggtcgatggcctgcgccaggccttcaactccagcgaggcggcgctgggtttcgaagttgcctcgatgctgctgggctgcgcggtcggtgccttcctggccggttggttgggcgaccgcctggggcgccgtggtgtcctgatcgtgtccgcgctgatgttcctggtctcggcgctgggcgccggggcggcccacgcgtcctggctgttcatcgcggcccgcgtgctgggcggctttgcggtgggggcggccagcgtgatgtcaccggcctacatcgccgaagtcgcctcggcgcgctatcgcggccggctggccacggtgcagcagatggccatcatctgcggtttgttcgcggccttcctcagcaattacctgctggcccgcgccgccggcgcctcgaccgagccgctgtggctgggccacgaagcctggcgatggatgttctggatgcaggcgctgccctccgcgctgttcctgctgttgctgctggtgattccggaaagcccgcgcttcctggtgctgaagggccgccaggggcaggcgagggcggtgttgtcgcgactgtacggcgaggccgctgcccgggccaagcaggccgagatcgaagccagcctggcacaggaccagcacaagccgcgcttcggcgacctgcgcagcagggctaccggcaggctgcgcccgatcctctgggtgggcatcggcctggccatgttccagcagctggtcggcatcaacgtggtgttctactacggcgcggtgctgtggcaggcggtgggcttctctgaaagcgacgcactgctgatcaatgtgctgtccggcgcgctgagcatcggcgcctgcctgctcaccgtgctgctgatcgaccgcatcgggcgcaagccgctgctgtgggtcggctcggtcggcatgttggtggcgctggtgctgatggtggtggcgtttgccagcggcagcctggccggcgggcgcctgcagctgtccgatggcatggggcggctggcgctggtcgccgccaatgtctacgtggtgttcttcaacatgtcctggggcccggtgatgtgggtgatgctgggcgagatgttccccaaccagatccgcggcccggcgttggctgttgccggtgcggcgcagtggacgtcgaatttcgcgatcaccgtgacctttccgatgctgctggccggcatcggcctggccggggcctatggcatctatacggtggcggcgatcctctcgatcgtcttcgtggtccgctacgtgcgcgagaccaagggcaaggagctggagcagatggaaggctga

SEQ ID NO: 494393 - DNA, 324 bp, Stenotrophomonas maltophilia
atgccctttgtcgtcaccgaaaactgcatcaagtgcaaacacaccgattgcgtggaagtgtgccccgtggattgcttccacgaaggcccgaacttcctggtgatcgacccggatgagtgcatcgactgcaccctctgcgagccggagtgcccggtcaacgcgattttccccgaggacgacgtccccgccggccaggaaggcttcgttgccctcaatgccgagctggcgaaggaatggccggtgctgaccgtgcgcaaggacccgcccgccgacgccggcgaatgggacggcaagccggacaagctgaagctgctggagcgctga

SEQ ID NO: 494394 - DNA, 516 bp, Stenotrophomonas maltophilia
atgcgtcaatccgtttccactgtccgcgtgctgtcctacgccctgcttgctgtagctgttgcggccggcaccaccggctgcttcaagcgtggcgtcaagggcgactacgccctggccccggaaatgcgcccgctggaagtaccgccggacctgaacctgcccaacgccaccaccgacaacaaggtgccgacactggcctcggccaccaagccggcggcgccggtcgccgcagccccggcggtgggcaacaccggtttcaccattgccggtggcaaggatgaagccttcgccaaggtcggtaccgcactggaaggcgtggaaggcgtgaccattgccagccgcgcgcagctgctgggctcgtacgacgtggcctacgaaggcagcaacttcctggtccgcgtggtggcggttgatgcaggtgcctacgtctccgcggtcgacccgcgtggcctgccggccaccgccgaagcgccggtgaagctgatcgccgcgctgaaggcgaagctggctcagtaa

SEQ ID NO: 494395 - DNA, 894 bp, Stenotrophomonas maltophilia
ttgtccctttccggcctcatcaccgcgctggcgaccccgttccgggccgacggcgccctcgatcccgatggttggcagcgcctgctgcacctgcaactggagggtggcgtccatggcgttgtcgtggctggctcgaccggcgaagcggcgaccctgaccgatgccgagtacgaccagctgctggccagcgccgtcgaacgcatcggcggccgcattccggtcatggccggtaccggcctgtcgggtaccgccaagaccatcgaacagacccgccgtgccgccgcccttggcgccagccacgcgctggtggtcaccccgccgtacgtgcggccgacccaggctggcctgatcgcgcactaccgcgcggtggccgaccagggagggctgccggtcgtgctgtacaacgtgcccggccgtaccggctgcgacatgcagccggagaccgtggccgagctggccagccaccccaatatcgtcggcatcaaggaagcggtgggtgacaccggccgggtgcaggcgctgctggcgctgcgcagcccgacgttcgcggtgctcagtggcgacgacggcaccgccgcgcgttcgatccgggccggcatcgatggcctgatctcggtcggttccaacgtgcttccgggcgcgtatcgccggatgtgcgagctggctgccgcgcacgaccacgaagccaccgagtcgtgggacgcgcgcctgcatcccttccatgatttctgtggcgtcgaacccaacccgatcccggtcaaggcgctgctgcgccgcatcggcatcggccatgacctgcgcttgccgctgctgccgctgtcggcagcacatcatcccgcggccgaccaccttgccggcgacatcgccgccctcgaagccctttccagccactga

SEQ ID NO: 494396 - DNA, 561 bp, Stenotrophomonas maltophilia
ttgaccgacaccaccccgcgccccgcgccgagcgaaaaccacctcctgatcaacgcctatacgacgcatccggagtcccccctgctgtccgtcacccgccgcatcgccgacagcggctgcaacctggtggacgcacgcctggccacggtcggccgcgatgtctcggtcaccgccctggccaccggctcctgggactcggtggccaagctcgaggcgatgctgacccggctggagcgcgaggagggcctgaagctggtctggtaccgcaccgccgccaagcaggcgcagtccaacctgctgccgtacatcgtcgaagtgatcgccgccgacaagccgggcatcctgttccagctggccgatttcttcgaccgccagggcatcaccatcgagaacctgcagagcacgcgctaccgcgccatgcagaccggtgcggaaatgttcagtgcacaggtcaccatcggcgtgccggccaacatgcacatcgccgcgctgcgcgacgatttccttgagttctgcgaccacctgaacctggacgcgatcatggacccgatgaagttctga

SEQ ID NO: 494397 - DNA, 480 bp, Stenotrophomonas maltophilia
atgaacaacggcgataccctggacagcaccaccctctccctgccgctggcgctgtccggtggcgaccaggccaccctcggcgactatgccggccagtggctggtgctgtacttctaccccaaggacagcactcccggctgcaccaccgaaggtatcgacttcaacgcgctgctgccgaagttcaagaaggccggcgcggtcgtgctgggcgtctcgcgcgattcggtgaagtcgcacgacaatttctgtgccaggcagggcttcggcttccccctggtcagcgatggcgacgaagcgctgtgcagcgccttcgacgtgatcaagatgaagaacatgtacggcaagcaggtacgtggcatcgaacgcagcaccttcctgatttcccccgacagccgcatcgtgcagtcctggcgcaaggtcaaggtcgccggccatgccgatgccgttctcgccgaactgaaggcctcccagtccaagtga

SEQ ID NO: 494398 - DNA, 1401 bp, Stenotrophomonas maltophilia
atgacccgaggcaagcgcatctacgtgctggataccaacgtgctgatgcacgatccgaccgcgctgttcaaattcgaggagcacgacgtttacctgcccatgcaggtgatcgaggagctggacaacggcaagaagggcacctccgaagcgagccgaaacgcccgccaggtgagccgcttcctcaacgagctggtgcaggcctccggcctggacaacctggccgacggcattccgctgcagcgcccgaatgggctgcagctgcgcggcaagcagagcgccggcaagctgcgcttccagaccagccatttcgacgctggcaagagcttcggcaaggtgatcccggacaacgccatcctcggcgcgatcctggccctgaaggaagaaacccccgacctgccggtggtgttcgtctccaaggacatcaacctgcggatcaaggccgccatcgccggcatcgtgtccgaggactacgagaacgaccgcgcgctggacgatttcagcctgctctacaccggcgctaccgagctgccggaagacttctggaagcgccacggcgacgacctgcgcagctggagcgacaagggccgtacccattacgaaatccaggcgcaggacggcgaggagtggtacccgaaccagtacgtctacctgcccggcgaagatgaagtcgagctgcgcgtcagccgcgtggtcggtgacggcaaggtggtgctgtcgctggtcgatgatttccgccacggcagccacgccgtgtggggcatcagcgcacgcaaccgcgagcagaacttcgccctcaacgcactgatggatccggagatcgacttcgtcacgctgctgggtaccgccggcaccggcaagaccctgctggcgctggccgccggcctggcgcagacgatggaccagcagcgctaccgcgagatcatcatgacccgcgccacggtcagcgtcggcgaggacatcggtttcctgcccggcaccgaagaagagaagatgacgccgtggatgggcgcgctgaccgacaacctggaagtgctcacgcacaaccaggaaggcggcacgtgggggcgccaggcgaccaacgacctgctggccagccgcatcaagatccgctcgatgaacttcatgcgcggccgcacgttcctgtcgcgctacctgatcctggacgaggcgcagaacctcaccccgaagcagatgaagacgctgatcacccgtgccggccccggcaccaagatcgtctgcctgggcaacgtcgagcagatcgacaccccgtacctgaccgagaccacctcgggcctgacctatgcggtggatcgcttcaagaactggccgcatagtgcacacatcaccctgcgccgtggcgagcgttcgcgcctggccgattacgcttcggaggtgttgtga

SEQ ID NO: 494399 - DNA, 507 bp, Stenotrophomonas maltophilia
gtgaaccgccgcacccgcctgctgctgcccacggctgcaatcaccctcgcagccgtgctgggcgcctgcaccactacgcgcggcccggccagtgtgcccaccgccgagcgcaccggccagtcctgggtggtcacccgcccgatcatcgccgcgcaggtgctcgacacctgctcgcggcccagccccggccgcgaggccgggcgggtcagcggctactgggcacccagccggcagcagatcgaccagctggaagcgaatctgtcttcgctggaggcccaggtgccgaaggtgctcgactttgaccggcagtacgtcggcatcgaaagcgcaggccgacggctgatctacatcaatgccttccacctgcccgacgacagcggcatcaatccggcccgcgaagcgatccgcgtctgcgatggcggcgcgcagttctggggcgcggtgttcgacccggccagcaacaccttcagcgagctgcagttcaacggcggcttcggcgggccctga

SEQ ID NO: 494400 - DNA, 810 bp, Stenotrophomonas maltophilia
atgagcccgaccactcccgtttccgccctgaccatcgccggctccgactccggcggcggtgccggcatccaggccgacctgaaggcttttgcagcgcatcgcgtgcacggcctctccgcgattgctgcactgaccgcgcagaacacccgcggcgtcatcgccgtgcatgtgccgccgatcgatttcctgcgcgcgcaactggacgcctgcttcgacgacttcgacatccacgcggtgaagctcggcatgctggccaacgccgaggtgatcaatgccgtcgccgatgcattggagcgccatcgcccgccacacgtggtgctggacccggtgatggtcgccaccagcggcgcgcgcctgctggaagacagcgccctgcaggcgatgcgcgagcggctgatcccgctggccacgctgatcaccccgaacacgccggaagcagagctgctggtcggacggaagatcggcaacggcgatgacgccgaacgggcggcctccgccctgctcgacctgggtgcaggtgcggtgctgctcaaaggtggccatctgcaggaaggcaaccgcgtgatcgatcgttacttcgacggcgtcagcagcgaagaattcatccatgcccgcctgccgctggacgcacatggcaccggctgcacgctggcctcggccatcgccgcgcaactgtgcaacggcttgagcctggccaatgcctgcgaagccggtatcgactacgttgcacgcggcctgcagcagggctatgcccccggccgcagcgaggtgctggtgctcgatcacttcggcgcggcaccacacgcatga

SEQ ID NO: 494401 - DNA, 525 bp, Stenotrophomonas maltophilia
gtgcaaccgatcgagagtgaacgcctgcgcctgcgtgcgatcgaacctgatcgcgatgcggagccgatgctggcgctgttgaacgatccgggtttcctgcgcttcatcggcgaccgtgatgtgcgcagtgaggcgcaggcgcgggagtacatcgcgctgcgggtgctgcacagctatgcgttgaacgggttcggcatgtatgccatcgagcgcttgtccgatggtgcctggctgggcaacgccgggctggtgcggcgtgacggcctgccggggccggatatcggctatgcggtgctttcggaatttgccgggcagggctatgccggcgaggcggcgcgggcagtgttcgcgcatgcacgcggagcgctgggcctgcacgatctgtatggcatcaccgacctggacaatgtggtgtccggaaagatcctgctgggcctgggcatgcaggaacgcggggtgatccagctgccgggcgtggacagcccgagccggctgtatgccacgccgggcgcggccgaggtttga

SEQ ID NO: 494402 - DNA, 651 bp, Stenotrophomonas maltophilia
atgaccgattccgcccagacccctgacgtccccctgctcgacgccgtgcaggcccgcctgctgggctgcctggtggagaaggaggcgaccaccccggacacctacccgctgacggtcaacgcggcccaatcggcggccaaccagaagaccgcgcgcgagccggtgatgaacgtggacgctggcagcgtgcagcacgcgctgcgccagctggaggcgttgggcctggcccgccagcacttctcctcgcgcgccgatcgctacgaacaccgcctgcaggccgcgctggacctgacccggcagcagaccgtgctgctggcgctgctgctgctgcgtgggccgcagacgctgggcgagctggtcacgcgcagcgagcgcctgcaccgcttcgccgacaccgacgaagcccgccatgccatcgagcgcctgcagcagcgtgccctgctggtggtgctgccgcgtgccagtggccagcgcgaagaccgctacatgcacctgctgtgcggcgaggtggatggcgcggcgctggcggcgaagtacgccagcagcagcggcagcagcgatgcggccgacccgggcctggccgagcgcgtggcccagctggaagcggccgtggccgagctgcaggcacagctggccgaactgcgcggttga

SEQ ID NO: 494403 - DNA, 924 bp, Stenotrophomonas maltophilia
atgcgtcgtcccgtttccctgtccctgaccctgctcgccactgcggcgctgggcctgtccgcctgcaagcgcgtggaggcgcccgccgccgaagccgcggccccgcaggcgcccgctgccgccgccaaggccgacggcgcgctcgatgccacggccaacgacaacctcaacgccgtgctgtggatgcagcgcgcgcaggagtacagggcgatcaccgagcagacctaccgcgccgccgccgaccacctggatgcggcgttgaaggaagcccactgggatgcgctggtgccggaagagcgcggcaacgacgccaagggcctgaagccggccgtggtgctggacgtggacgagaccgtgctggacaactcgccctaccaggcgcgcctggtgcgcgacggcaaggaatacgacgaactgacctgggaccagtgggtagccgaaaagaaggccaaggcgatcccgggcgtggtcgacttcgccaaggccgccaatgccaagggcgtgaccctgctctacatctccaaccgcgccgtgcacctgaaggacgcgaccctggccaacctgcgcgaacagggcctgccggtggccgacgacagcgtgttccttggcctgggcacagtggtgccgggctgcgagcaggccggcagcgagaagaactgccgccgccgcctggcagggcagaagtaccgcgtgctgatgcagttcggcgaccagctgggtgacttcgttgaagtgaccgccaacaccaacgacggccgtgacgcgctgctgcagcagtaccacgactggttcggcgagcgctggtggatgctgccgaacccgacctacggcggcttcgagccggcgcagttcaacaacgactacagccagtcgcgccaggcccgccacgacgccaagcgcgccgccctggactacgccccgtga

SEQ ID NO: 494404 - DNA, 726 bp, Stenotrophomonas maltophilia
gtgagccgcgcaccgctgccgttgcgcgccgatgagcgcctgatcttcgcgctggacgtgcctgatcgcgtgcaggcactggactgggtcgatcgccttggtgacagcgtggcgttctacaagatcggcatggaactgctcgcctccggcgagtacttccaggtgctggacgagctggcccgccgcgacaagcgcgtgttcgtcgacctgaagttcttcgacatcccggcgaccgccgcagcggtgatcaagggcctgtcgcagtggccggtcagctacgccaccatccatggctggcacccggcgatgatggaggcctgcgcggccgccaacagcagcgacatgcgcctgctggcggtgaccgtgctgacctcgatggggcgcgccgatctggcgcagatgggcgtcgaccgcgagccggtggacgtggtggtcgaacgcgcgttggccgcccaggcagcgggcgtcgatggcgtgatcgcctcgggccaggaggctgcaccgatccgtgccgcgaccggtagcgggttctcgatcgtctgtccgggcatccgtcccggtggtccggtcggcgatgaccagaagcgcaccgttggcgtggcccaggccttcgccgatggcgccgacgccatcgtggtcggacgcccgatccgcctggcggctgatccgcaggccgctgcgcgggcaatccagcaggaaatcgcgtcggctctggctgcacgctga

SEQ ID NO: 494405 - DNA, 822 bp, Stenotrophomonas maltophilia
atgtatcgcagcacctctttgttcatcggcctgttgttggccgcgtccgccgtacccgccttcgctgcgccacaggtgcgcgaagcaccgcgcatcatcggcggtgaagcagcgccggctggcgagtacccgttcatggtcagcatccagggcatcttcgacggcgattcggatcatgaccgccacttctgcgggggcaccctcatctcgccttcgtgggtgctgaccgccgcgcactgcatgcagggggaagcgccgggcggcatcgccgtcgtcggcaacgccgcggccctgtccaccgaagcctcgccccgcgcctccaacgtcaaggcgatccacgtccatccggcattcaacagcggcaactcgctggagcacgacgtggccctgatccagctcaacgcccccctggacggtgcacagccggtggcgctgcggctgcggcccgacgccagttatctcaagccgggccgcgaattcaccgtgatcggctggggcgacaccgacatcggcgatggccgggtctacccgacccagctgcagaccgtgcaggtgccgttcgtggcattcgatgaatgccagcaggcctacggcggggaactgtcgcgcggcaaggtgatctgcgccggccgcgagggcatcgacagctgccagggggactccggcgggccgctgctgctgcgcctgcgtgagggctggacccagttcggcatcgtcagctggggcgagggctgcgcgctggccggctatccggggatttatgcccgaatcgccgaaaaacacgccgtagatttcattgaatccgtctggcagcacgattga

SEQ ID NO: 494406 - DNA, 954 bp, Stenotrophomonas maltophilia
atgagcgtggcggtgcgaggaaggtctgcgcgtggatgggggctggcggcgatgctgctgctggccgttgcggcatgccgcgagtctgtgaacgatccggccaggccggcggccgagccggtggctgcggtgcaggcgatggcgttgcgcctggccgaagatgatctggtcggctacgcaaagctgtcggtaccgccaggccagtatcagcggctgcagcaggcctgggcggagggacacagccagtggccgctgaccgagctgccgctgggggaccagctgctgccgatgctggccgcgctgcgcaagcccgatgccagcaccgaactgcagcgcagcttcgaccgccagctggccggccaggccagcgccgtgcgccaggccgcgcagtcgatgggcaatttcggggtgcagtacctgcgccatcagaagggctacacgcccggccagcaggcccattacatcgccctggtcgaaacccttgctgtctgggcgcagggcgcgccgatcagtgaccgcgcccgtgcacgcagcaccatcgccgcgctggtcggcgcggccggcaaggtcggcttcgatgacgaggctggcctgcaggcggctggcatggagggcagcctgcagcagctggcgccgttcatccacaccctcaaggcggtgcttggcagctacgggctgggcgtggatgacgcgcttcgcagcgtacggggcgagctgctctcggtggaaggcgacaatgcgctggtacgcctgcactacgacctggccggccgcgagatgagcctgcagctgccactgagccggcgcgagggccactggtacctgacccgtaccctggccgacaccgacgcgctgctgcgcaaggccgacgcggcccgcgcggctgcgtcgccggcagccgctgaagcccccgccgaaggtggggaagcggcaacgccgccgcctaagccataa

SEQ ID NO: 494407 - DNA, 2637 bp, Stenotrophomonas maltophilia
atggcgccgatgtcgaaacagaacccgctgccgttccccggcgaagaatcccagtcgacgcccgccgatacggtgccggcgtccccctcgaccggtaccggcccgaacccggtaccgccgcccgcgcacgcgcgttcggccggccgccgcccgctgtgggctcgcctgctcggccgtctggtcgagccgtggctgtcgctgaagatcgaaccggaagacccgggccagtacaacgatggccgcccggtcatgtacgtgctggaagactacggcctgtccaacgcgctgatcctggacaaggcctgccgccaggccggcctgccgtcgccgctggtgccgctggccggtgacccgaccggccgcaagcgcgcctacctggcgctgtcgcggcgcagctccagcaactcgctgattcccgagcagcgcggcgccaagacccactccgactcgctggccaaggtcctgcaggcgcaccgcgtgcgcgatgacctggacgtgcacctggtgccggtgtcgatcttcgtcggccgcgccccggacaagcagagcggttggttcgcggtgctgttctcggaaaactgggcactggtcggccgcttccgtcgcctgctggcggtgctgctcaacggccgcagcaccatcgtccgcttcgccccgccgatctccctgcgcaacaccgtggatgaaggcctggagccggagcgcacggtgcgcaagctgcagcgcgtgctgcgtacgcacttccgacgcatccgtgaatcggtgatcggccccgacctgtcgacccggcgcctgctggtggaccaggtgctggccgccgagccggtacgcgaagcgatcgccgcacaggccaagcgcgacaactcgaagccggccgatgcctggaagaaggcacacgcctacgcctgggaaatcgctgcggactattccagcccggtagtgcgctcggccagcttcatgctcagccacgtgtggaaccgcatctatgcgggcgtgctggtgcaccacctggacaagttcaaggccgccgcgccggggcacgaagtggtctacgtgcccagccaccgcagccacatggactacctgctgctgtcctacctgctgtacgaccgtggcatcgtgccgccgcacatcgtggccggcatcaacctgaacctgccggtggtcggcaccctgctgcgcaagggcggtgcattcttcatccgccgctcgatccgtggcaacgcgctgtactcggcggtgctcagcgaatacgtcgcgcagctggtggccggcggctactcgctggagtacttcgtcgaaggcggccgctcgcgtaccggccggctgctgcagcccaagggcggcatgatctcgatgacgctgcgcgcgttcctgcgccagccgcgcaagccggtgctgttccagcccatctacatcggctacgagaagctgatggaaggcggcagctacctggacgaactgtccggccggccgaaggagaaggaatcgatctggtcgctgctgtggggcatccccaaggtgctcaagcagaactatggccaggtggtggtgaacttcggcgagccgatcgcgctgaacgacgtgctggccgagaaggcgccggagtggaagggcgaggcggtgtccgaggacgaaaagccggcctggctgtcgaccacggtggacacgctggccgaacgcatccaggtgcgcatcaatggcgccgccgacgtcaacccgatcaacctgctggcgctggccctgctgtccacgccgaagcacgcgatgggcgaggccgacctgatcgcgcagatcgaactgtgcaagaccctgctggtcgagatgccttactcggaccgggtgacggtgacgccgcactcgccggagcggatcatcgcccacgccgaggaaatcaacgtcctcacccgcatcaagcacccgctgggcgatgtgctcagcgtcagcggcgacaccgcagtgctgctgagctacttccgcaacaacgtggtgcacctgttcaccgcctcgtcgtgggtggcctgctgcttccagaacaaccgccgcatgagccgcaccggcctggtccagctgggccgtacggtgtacccgttcctccaggccgagctgttcctgccgtggagcgaggacgagttcgcccagcgcatcgaccggaccatcgatgtgttcgtgcgcgagggcctgctgcagaacgtcaacgatgacgacggcggcatcctggcgcgcaacaccgggcagaccgacgaggtgttccgcctgcgcgcgatcggccattcgctgcagcaggcgttcgagcgctattacattgccatctcggtgctggtgaagaacggccccggcgtgctcggcgctgccgagctggaaagcctgtgccagcaggccgcgcagcggctgagcctgctctatgcgccggccgcgccggagttcttcgacaagtccctgttccgtggcttcatccagaagctgcgcgaactgcgcctggtgtggccggacgagaacagcaagctgctgttcgacgagcgcctggatgcctgggccaaggatgccaagttcatcctgggccgtgagctgcgccacaccatcgaacgggtcagcccggaagcggcccgcccggacgagcctgcgccgcaggattga

SEQ ID NO: 494408 - DNA, 204 bp, Stenotrophomonas maltophilia
gtggacacctacagccccgccgagatcgtcgagcgcctcgtcgccctgcgcgccgagcaccgcctgctggatgaacagatcacccgcatggccgccaacggcgaggacgagctggagtccaagcgcctgaagcggcgcaagctgcagctgaaggactgcatcgccaggctggaaagcctgcagattcccgacgagccggcctaa

SEQ ID NO: 494409 - DNA, 930 bp, Stenotrophomonas maltophilia
atggaacccatgagtgccgtgatttcccttcccgatcccccaccgcgcgccgcccgcgatccgcgcgtggccgagcgcgagcagcacaagctggccaagcgcctgcgccgccaggtcggcgaggcgattgccgacttcggcatgatcgaggccggcgacaaggtcatggtgtgcctgtccggcggcaaggacagctacaccctgctggacgtgctgctgcagctgcagaagaaggcgccagtgccgttcgagctggtggcggtgaacctggaccagaagcagccggacttccccgagcacgtgctgccggaatacctggcaggcctgggcgtgccgtaccacatcatcgagcaggacacctattcggtggtcagccgggtcatcccggagggcaagaccatgtgttcgctgtgctcgcgcctgcgtcgtggcgcgctgtacaactacgccgagacccacggcttcaccaagatcgcgctgggccaccaccgcgacgacatggtggccacgttcttcatgaacctgttccaccacgccaagctgtcgggcatgccgccgaagctgcgcagcgacgacggcaggcacgtggtgatccggccgctggcctacgtgcgcgagagtgacatcgtcgagtacgcgcaggcacgccggttcccgatcattccctgcaacctgtgcggcagccaggagaacctgcagcgccgccaggtcggcctgatgctgaagcaatgggaaaaggaccacccgggccgcatcgagcagatcgcgcgcgccatgggtgaagtccggccctcgcagctggccgacaccaccctgttcgacttcatggcgctgggccgtcgcgacgacgcgccgctgcccgacgcccatgcctggctggccggctccccggccgacgccgacgcagatcccgagacgcccaccgtttaa

SEQ ID NO: 494410 - DNA, 906 bp, Stenotrophomonas maltophilia
atgttctttcgcaacctgacgttcttccgtttcccgaccaccaccgatttttccgaagtcgacaccctgctgccgcacgccctgctgaagccggtcggcgcgctggaaatgaattcgcgcggcttcatctcgccgttcggccgcgaggaaaaggaactgctctcccaccgcatcgccgaacacctgtggctgaccgtgggcggcgaggacaagatcctgccggcggcggtggtcaacgacctgctcgagcgcaagctggaggagatcgaggagaaggaaggccgccgcccgggtggccgcgagcgcaagcggatgaaggacgacctgctgcatgaactgctgccgcgcgccttcgtgaagtcctcgcgcaatgatgccttcatcgacctgcagcacggctacgtggcggtggatacctccagccgcaagaccggcgagtacttcatgtccgacatccgcggcctgctcggcagcttcccggcgatgccgctgaacgccgaagtcgcaccgcgttcgatcctgaccggctggatcgccggcgagccgctgccgaccgggctgagcctgggcgaagagtgcgagatgaaggatccggtggaaggcggcgccgtggtcaagtgccagcaccaggaactgcgctgcgacgagatcgacaagcatctggacgccggcaagcaggtgaccaagctggcgctgatcttcgaggacaacctgtccttcgtgatcggcgacgacctgatcgtgcgcaagctgaagttcctcgacggcgcactggaccagctggagcatgccgacgaagacggccgccgcgccgagttcgacgcccgcttcgccctgcagagcgccgagatccgccgtctgttcctgttgctggaagaagcgttcaagctcagcaaggctgactga

SEQ ID NO: 494411 - DNA, 780 bp, Stenotrophomonas maltophilia
atgagccgtctgctgcgccgcctgatcagcccgaccccgcccgctaccgtgcagcgcgacaccgttcgcctgcgcctggaggatgccgagatcgaggtgctgcgcgtgcgcgatccgcgcgcgcgccggatcaagctgagcgtggacgagcgcggcgcacggttgacgctgccgccgcgggccagcctggtgatgggcgagcgattcctggaacagcaccgcgactggttggcgctgcagctgcgccagtaccagagccagggcctgcccgccccgttgcagccgggcgaggacggcgtgctgccactgcgcggcgacctgttgccgctgcgctggcaggaaggccgctatgcgcggctggagatcgacgaacacggcgcctgcgtgcagtggccgacccgtgccggcgatgccaccctgcgccgcctgctgcgcgagttctacgaagcacagacccgcgccgatgtcggccgctggctgccgaagtacctgcccaccctgccacgtgcacccagccgcctgcggctgaaggtgatgtcttcgcagtggggctcgctggcgccggacggcagcatggcactggacctggccctggtgctcggtcgtccggaagcgttcgagtacgtgctggtgcatgaactctgccacctgatccagccgaatcattcgcccgcgttctggcacgaagtggaacaacgtttccccgcgtggcgcgagcagcgcgactacttccagctggaagggcgcaggctgaaggcgatgcttcgccagctgctgtag

SEQ ID NO: 494412 - DNA, 867 bp, Stenotrophomonas maltophilia
atgcgtatcggcctggccgccaaccgtctccatcaccacgatgcgcgcgcggcgctgttccgctggctgcgtgccagcgaggcaggcttgcgcgaactgggggtgtcactgcatgcggtcgggcgcacccacgatgcgatcgaacggcagggattcctggccggctacggcggcctgcaccggtatccctacgggcgcgagggaggcctgatgaagctggtggccgaggtggtcggcatggggccggagcggacactggacggtgcgatctacctgatcgacccggtcgatccgtcctcggtgtttccggaagcaaccgcgctcaagcggcagtgcgtgatccacggcaagccgttcatttcaaccgtggccactgcacgcgactggatcgaggtggagcgcatccacgccgggctggctgccgacaccggtgccgacgacctgcatgctttccaggggcagacgctggcgctgatcgcgcatgatgcgatgaagccggcgatgctggccttcgctgacgagtacttcgatgtgctggcccggtttggccaacgcgttgcgacgggcaccaccgggcagcgcttgaacgagctggcctggagccggggttggcccagcgatacgccgtgggtgacgcgttaccagagtggcccgatgggcggcgatgcacagattgccgaccgcgtgctggaggggcgctgccagcgcgcgatcttcttcgaggacccgcatgtggcacgccagcacgaggccgatatccagctgctggagcgcgcggtgacgacggtgaccgaccaggcggtgtgcatcacggcgccgcgggtggcggcacgctgggcggcagcggcggcgttgcgggcggggtga

SEQ ID NO: 494413 - DNA, 2409 bp, Stenotrophomonas maltophilia
gtgaatgtcgccggccgccgcgccgtcgccgccgtcatggcatcgctgttgctgcccggtatcgccgctgcatccggttgtacgggccccctgcaggtggcatggcgctccgaccggccgcccctgtcatacagccagcagggcgaggttgcgggactggccgcggattacctgccgctgctgggcatgcaggcggcgcagcatgcgaagccgttgcctgcgacggtacttaccgagggagcactgccggccggcacccaggtgctgctgggctggccgcgcgcacagctgccggcaggctgggtggccagcagggcctacctggaggtgccgcaggtgatcgtgcggcgcgagggcgccgctgcggtgctggggctggagggcctgcgtggccgcagcgtggccagcccggaccggctgccgctggagccattgctggccgagcaggccccgggggcgcagctgctggcccctgcgccgctggaccacgcgctgtcactgctgcgtgccgggctggtcgacgccgtggtcgccaatctcgctgaactggaggccgcgctccgcgcggagccaggtgatgctgtggtgatcgcggcacccgcaggcttcggcgatgcactggtactcgcggccgtgccggcctgtgccgaggtggtcgctgctttcgaccagcggctcctgcaggagagcgatgcacgtcgcgcgtcgagccgcagcgcctggctgccggaccggccacgcgcgcggctcaccggttcggcgctgcgctggctggtgccggcgtcgctgatcctgctcgcgctcgtgctgctgcatgccttcggctactggcgcgtgcatcgcgagagcgtgcgtcgccgcgtgctggagcagcggttgcacgacgtcaccgcgaacctgccggcggtggtctaccaggcccgccgttcggcaaccggccactacagcctggcgcagatcgccggtgacgtgcaggcgttgttcggcgtaagcgtggagactgcgcggatcgaccatctgcaactgctggccgcggtgcatgccgacgaccgcagccgggtgatggcgtgcatcgaagcggccgcgctggtgcgcggtcccatcgacgttacgttccgcacccggtcggcgcagggttggcgctgggtccgctcacagggacgaccgctgcagtgcgatgacagcagcgtggagtggagcggctactggttggatgtcagtgaagcacaggcgcgtgcagtagcgctggccgaggcgcgccgcgcggccgagcaggcggcgctggccaagagccatttcctggcgaccatgagccaccagatccgcacgccgatgagtaccctgctgggcatgctggagcgattggctgccagtgacctggatgcgggccagcggcaggtgctgaccaccgtgggtgatgccgcgcagatgctgcggcagatcctggacgatgtgctgcacagccagcgcctgcagccagcgccactgcagctgcggccgaccgaccttgcggcgctggtgcgcgcggtgcagcagctgttgatgcccgtcgcggccagccgcggcctgcacctgcacagcgagatcgaccccatgctgcagcagtggtcgctggccgatgggctgcgcctgcgccaggtcctgttcaacctggccggtaatgcactcaagttcactctgcagggaagcgtggtgctgcaggtccatgtgctgcagcagcgcgatggcgggcagcggttgcgcctgcaggtgaccgatacgggcgtgggcatcagcatggagcggcaacaggcggtattcgctgcctacgagcaggccgagacctcgaccacgcgccgctttggtggcagtgggctgggcctgtcgatctgccgcgagctggcggcatcgatggggggccagctgcacctgcgcagcgcgccgggcaagggaaccaccgtatggctggaactggtgctggcggcctgtgcggcaccgacggtggtaccggtgctcacgacggccgtgcaacggccgctgccgccggcgcgggcactggttgttgaagaccatccgaccaacctgcagttgctggtacagcgcctgcgcgagctggggctgcaggtacacgcctgcgacgacggccagcaggcatgggaggcctggcaggcgcagccctttgatctggtcatcaccgactgccatatgccgcacatggacggcttcgcgctggcacgggcgatccgtggcgatacctgcaccatccgtgcgcaggtgccgatcgtcgcgctgactgccagtgtgctggaacgcacgcgcgaggcctgccgtgatgcgggcatcgaccatttcctggccaagccggtggcgccgtgcgaactgcgcgcgctgctggaggagctgctgttgccggactcagtgcgccagtag

SEQ ID NO: 494414 - DNA, 1446 bp, Stenotrophomonas maltophilia
atgagccgcaagcacgccttccagttcctcgacctgccccgcaccatgccgcagcgcatcccggtggaactgcgcacgtccggcgactggggcgagctgtacggaaaattcggcaaggaggacgcccagtaccaggcgggccgctgcctggactgcggcaacccgtactgcagctggaagtgcccggtgcacaacgccattccgcagtggctgcagctggtgcaggagaaccgcatccacgaagccgccacgctgtgccacagcaccaacccgctgccggaggtgtgcggccgggtctgcccgcaggatcgcctgtgcgagggcagctgcacgctggaagagttcggtgcggtcaccatcggtgcggtggagaagtacatcgtcgataccgcgctggccagcggctggcgccctgacctgggcgcggtgcagccgaccggccgcagcgttgcggtgatcggggccggtcccgccggcctggcgtgcgccgaccgcctggcccgcgccggcattgccgcggtggtctacgaccgctacgagcagatcggcggcctgctgcagttcggcattcccagcttcaagctggacaaggacgtgatccaccggcgccgcgacgtgctggagggcatgggcgtgcagttccgcctcggcgtggagatcggccgcgacctcagcgtgcagcagctgctggacacccacgatgcggtgttcatcggtaccggcgcctaccgctacaccgatggtggcctcgacggccaggacctgaagggcgtgctgccggcgctgccgttcctggtgcagaacagccgcatcgtcggcggcgatgacccgaagggccggccgattgccggctgggaagacaccatcgccctgcccgacctcaacggcaagcgggtggtggtgctcggtggtggcgataccggcatggactgcgtgcgcagcgcggtgcgcctcggcgcggccaaggtcacctgcgcctaccggcgcgacgaagccaacatgcccggcagcgctcgcgaagtggccaatgcgcgcgaagagggcgtgcgcttcctgttcaaccgccagccgctgtcgatcgaagccggcgccgacgatgaagtgatcggcgtgaccgtggtcgaaacccggctgggcgaacccgatgccaatggccgccagaacgccgtgccgatcgaaggcagtgaatccctgctggaagcggacgtggtgatcatcgccttcggcttctcgccgagcgtgccggcgtggctggcggacctgggggtggaaggccagcccaacggccgcatcgtcgccgggggcaaggaccgcctgccgttccagaccgcgcatccacgcctgttcgccggtggcgacgcggtacgcggtgcagacctggtggtgaccgccgtggccgaaggccgcgacgccgctgccagcatcgtccgcctactggcgcactga

SEQ ID NO: 494415 - DNA, 4455 bp, Stenotrophomonas maltophilia
atggccccccgcaaccgccaagggctttacgacccgcgctccgagcgcgatgcctgtggatttggcatggtcgcccagctcgacgatcaaccttcgcgcctgttggttgataccgccatcgccgcgctttcgcgcatgacccaccgtggcggcgtcgccgccgatggcctgaccggcgatggctgtggcctgctgctgcgccgccccgatgcattcctgaaactgctggccagcgaagccggcatcaccaccgccgcgcgcttcgctgccggcctggtgttcctgccgcacgacaccgaggccgccgacgcctgccgttcccagctgcaggcgcaggtggaagcggtcggctgcaaggtcgccggctggcgcgaggtacccaccgatgacagcgtctgcggccagctggcgcgcgataccctgccgcgcatcgaacaggtgttcgtcgatgccggtgtcggccaggacgatgccggcttcgcgctggcgctgttcctggcccgtcgccgcagcgagcagcagctgcgcgatcacgctgatttctacgtcaccaccctcgcccccgatgcgatcagctacaagggcatggtgctgccggacaagctcagccgcttctatcccgacctgcagcggcgcgaactggcctccagcgcgatcgtgttccaccagcgcttctcgaccaacacgctgccgcgctggccgcttgcccacccgttccggatgctcgcccacaatggcgagatcaacaccatcgaaggcaaccgccgctgggcccaggcgcgcagcaaggtgtggaagacgccgcgcttcgacatcgccgaattcgacccggtgatctccatgcacggctcggactcgcagagcctggacaacatgctggaactgatggtcgccggtggcatggagctgatccaggcgctgcgcatcctggtgccgccggccacccagtcgctggagttcaaggacccggacctggccgcgttctacgagttccacggcctgaacagcgagccgtgggatggcccggccggcatcgttgcctgcgacagccgctacgccgtctgcaccctcgaccgcaacggcctgcgcccggcacgctggatgctgaccgccgaccgccacttcctggttgcctctgaagcgggcgtgtgggaagtgcccaccgagcgggtggtgcgcaagggcaagctcggccccggcgaaatgatcgcgatcgacctcaagcgcggcgacctgctcgactccgatgcggtcgaccgtatcaaccgcggccgcgcgccctacaagcagtggctgcagcagggcgtgacctacctgcagaccgaactgatcgacccgtcgctggtggaagagccgttcgacgaagccaccctgcgcagctaccacaagctgtaccagctcagcagcgaggaagtggagcaggtgctgcggccgctggccgagaccgagcaggaagccaccggctcgatgggcgacgacacgccgatggcggtgctgagccagcgcagccgcccgctgtacgactatttccgccaggccttcgcgcaggtcaccaacccgccgatcgatccgctgcgcgaagactgcgcgatgtccctgtccacccagctcggcaaggagaccaacatcttccatgccggtccggagacggtgaaccacgtcatcctcaattcgccggtgctcagccagcgcaagctgcgccagctgctgaagatggaccagtacgcgcaggccaaccgtctgctcgacctgtcctacagcgaagacgagggcctgcgtgccggcatcgagcgcatctgcgccgaggccgaacaggccgcgcgcgaaggcatggtgatgctgctgctgtccgaccgctacccggtggccgggcggccgatggtgcatgccctgctcgccaccagcgccatccaccaccacctctcgcggctgggcctgcgctgcgacgtgaatctcatcgtcgagaccggcaccgcgcgcgacccgcaccacatggcctgcctgctcggcttcggcgccacggcggtgtatccgtacctggcctaccagaccctgttcgacctgggccgccgcggcatcctcaagctcagcaagggcggtgagcagtcgcagatcggccgccgctaccgcaagggcgtctacaaggggctgtcgaagatcatctcgaagatgggcatctgtaccgtggccagctaccgcggcgcgcagctgttcgagatcatcggcctggaaccggaggtcgtcgatctgtgcttcccggataccgcctcgcgcatcggtggcgcgggtttcgcgcgcctggatgccgacgcgcgcgagctgtgcgcgcaggcgtgggacgcgcagcaggacgtggatgtcggcggcctgctgaagtacgtgcacggcggcgagtaccacatgtacaacccggacgtggtcaccaccctgcagcgcgcggcgcgcagcggcgatccgcgtgcctggcagcagtactgcgatgcggtgcatgcgcgcccgccctcggcactgcgtgacctgctggaactggtccctgccgccacgcccgcaccgctcgatgaagtggccccggccagcgaactgttcccgcgcttcgataccgcggcgatcagcctcggcgccctgtcaccggaagcgcatgaagcgctggcgattgcgatgaatcgcctggggggccgcagcaattccggcgaaggcggtgaagaccccgcacgctatggcaccgccaggcgcagcaagatcaagcaggtggcctccgggcgcttcggcgtgaccgccgagtacctggtcaatgccgaggtgctgcagatcaaggtcgcgcagggtgccaagcccggcgagggtggccagctgcccgggcacaaggtcaacgaactgatcgcgcggctgcgctatgcgcgcccgggcatcggtctgatttcgccgccgccgcatcacgacatctattcgatcgaggacctggcgcagctgatctacgacctcaagcaggtcaacccgaccgcgctggtgtcggtgaagctggtcagccatgccggcgtcggaacgattgcggcgggcgtggtcaaggccggtgcggacctgatcaccatctccggccatgatggcggcaccggtgcctcgccggtcagctcgatccgctatgccggcgtgccgtgggagctgggcgtggccgaggcgcaccaagcgctgctcgccaacgacctgcgcggccgtaccctgctgcagaccgatggcggcctgaagaccgggctggacgtggtcaaggccgcattgctgggcgccgacagcttcggcttcggcaccgcgccgatgatcgtgctgggctgcaagtacctgcgcatctgtcacctcaacaactgtgccaccggcgtggccacccaggacgagcgcctgcgcgagaaccacttcaccgggcagcccgagcgcgtggagaacttcttccggctgctggccgaagaagtgcgtggctggctgtcctacctgggcgcgcgttcgctggaagagatcgtcggccgtaccgacctgctgcgccagatcgaatccgcgccgcgcgacggcgtgcgcgtggacctgtcgcgcctgctggccgacagccgctacgagggcagccactgcgccgcgcagcgcctgtacgaatcgccggacagcctggccacgcagatggatggcctgctggccccggccatcgagcacaagcgcggcggcgagcatcgcttcctgatccacaacaccgaccgcagcatcggtgcccgcctggcgggtgcggtggcacgcgcgcacggcaaccagggcatggccgaggcaccgctggaactgcgcttccgtggcagcgccgggcagagcttcggcgccttcaatgtcggtggcctgcacctggaagtggaaggcgaagccaacgattacgtcggcaagggcatggctggcggccggctggtggtgcggccgccgcgtggcgcgcgcttcgaggcacgcagcaccgccatcatcggcaacacctgcctgtacggtgccaccggcggtgagctgttcgctgccggccgcgccggcgagcgcttcgcggtgcgcaattccggcgcactggccgtggtcgaaggtgccggtgaccactgctgcgagtacatgaccgatggcgtggtgctggtgctgggcaaggtcgggctgaacttcggcgccggcttcaccggcggcctggcctacgtactggacgtggaccgtgatttcgtcgaccgctacaaccacgagctgatcgacatccatcgcgtgtccgccgaaggcttcgagaactaccgccagcacctgcaccgcctgatcggccgccatcgcgagctgaccggcagcatctgggcacagcagatcctggacgagttccgcgattacatcggcaagttctggctggtcaaacccaaggccgccagcatcgagtcgctgaccgaaaccctgcgacgcgccgcgtga

SEQ ID NO: 494416 - DNA, 390 bp, Stenotrophomonas maltophilia
atgtcgttcccgattcgcgcccgttcgctctccgccctgctgctgccggccgtgctggccctgaccgcctgccaggcaccggcgctggatgaacaggattcggccacggcccatgcccagcaggctgccgaagccgccaaggcaccggccgacgaagccggcaaggccaccgaggcaccgccggtcggcacctgcgatgccagccaggtgcagagcctggtcggccaggcctacgccgacgcgctgggcaagcaggcgcaggaagatgccggtgcccaccagctgcgcgtcatgaagcccaacgacgtggccacgatggaattcctcggcgaccgcctgaacatcgaagtggacgacaagggcctggtcagcggcgtgcgctgcggctga

SEQ ID NO: 494417 - DNA, 1059 bp, Stenotrophomonas maltophilia
atgccgaccccctctacccccgaacgacaggccgcgcgcgctgcgggcctgcgctatgtcgatgacacccagccgggcatcagccggcgccgcgccggcaagggcttcagctaccgcgatgccgatggccatgcggtgcgcgatgccgccaccctgcagcgcatccgcgcgctggcgattccaccggcctataccgccgtatggatctgcgcccacgccaatggccatctgcaggccaccggccgcgatgcccgcgggcgcaagcagtatcgctaccacgccgattgggccgcagtgcgcgacgccggcaagttcgaccgggtgatcgcctttggtgaagcactgcccgcgctgcggcgccggctcagccgcgatctcaagcacagcggcttcccccgcgaaaaggtgctggcggtcgtggtcgcgctgctggccgacaccctggtgcgggtaggcaatgagtcctatgccaaggaaaacagatcctttggcctgaccacgctgcgcaaccggcacctcgacctgctgcgcggcgggcgcgtacggatgcgcttccgcggcaaatccgggcagctgcacgaagtgacggtaggtgaccgccggctgggcacgctggtgcgcggcgtgcagcagttgccgggccaggcgttgttccagtatcgcgacgacgacggtgccatccagccggtcgactccggtgcggtcaacgattacctgcgcgaggtgatgggcgaggaattcaccgccaaggatttccgcacctggggcggcaccctggccgcggtgcaagcgttcgcggccaccgagttgcccgaaccggccagccagcgtgcgctggccaaggtacagcgtgaggtggtgtgcaaggtggcgacccagttgggtaatacccctgcggtgtgccgcaaggcctacatcgacccctgcgtgttcgccggctgggagcgcggcgaactggcggaactggccggcctgcgtgggccgcgccagtgggaacaggccaccctgcgcgtgctgcgcagggcgcgccggctcagccgcagacgtcagccgcaatag

SEQ ID NO: 494418 - DNA, 309 bp, Stenotrophomonas maltophilia
atgaagcatgccatcgccaccgccgccgtctgtctcgccctcgccgcctgcagcagcacgccggtagcccaggtgcagccgatcgacggcgtgatttccggccagtgccacagcgacagggtgcgtggtgcgctcggcctggccgcctccgccgcaaccgtcgagcgcgcgcgcgtggacagcgacagcctgcacgtgcaggtgctgcgccatgacggcccgcgcgtgccgccggcacacgaaggcggtgaccgcctgaccatcgagaagggccgcaccaacaacatcaccgcgatctattgcggctga

SEQ ID NO: 494419 - DNA, 1107 bp, Stenotrophomonas maltophilia
atggccaccacccgaaagacccccgcccgccgcaaagcctcacccaaggtgcgcaagggcagcaccgcgacccagaccgctgccgaccccgctcgcccgcgggtggtgaagaccgcaacccgcaaggcggcggctggtgatccccgcgccgcccgcgttgccgcccggcagcggcgcctgcaggatcaggaaaaggccaaggacgcccgcgcggccaagaaggccacgaaaaagaccgcgacccaggccggcgcacgccgccagccggaggccatgccggcccagcagctggcaaagccggggcacgaacacgaactggagctggcgccgcgcttcctcgcgccggactacaccggcagcggcaagctgcagggcatgcgggcgatcgtcactggcggtgattccggcatcggccgtgctgtggccgtgctgttcgcacgcgaaggcgccgatgtggcggtcctgcacctggacgaggccgaagatgccgacatcacccgccagcacgtggagcgcgaaggtggccgctgtgtggtgatcgccggtgacgtgcgcgacccgcgcttctgcaacaaggcggtcaagcaggtggccaaggccttcggtggcatcgacatcctggtcaacaacgccgcgttccagctgcactgcgagcggctggaggatctggaagacgcgcacctgcaggagacgctgcagaccaacatcggcggctacatccagatggcgcgtgcggtactgccgcatctgggcgagggcgccagcatcatcaacaccggctcggaaaccggactcttcggcagcaaggcgctgatcgactactcgtccaccaagggcgcgatccatgcgttcaccaaggccctggccagccagctgctgccgcgcggcatccgggtcaactgcgtggcgccggggccggtatggacgccgctgaacccggccgacaagcaggccggggatgtcgccgagttcggaaaggacagcgacatgggccggcctgcacagcctgaagagctgtcaccggcgtatgtgttcctggcctcgccggtctgtgcaagctacatcagcggggcgatcctgccggtgatgggtgggccgcgcggctga

SEQ ID NO: 494420 - DNA, 1416 bp, Stenotrophomonas maltophilia
atgcccgaaatggatatcaatgccgcagccaacgaggtcgtcgccctgctgcggcggaacgatgcgcgtgctgccgccacccgcctccaggccctgcacgacggccagagcgcagtggtgcaggaatcgctggatcgctatatctcggcgcgtgcggccgccgagcttgagggcttgcgccggaacgggggcgtggccgcagcggatgcagctacggtgaatccgatgctggatcgcttgggcgaggcgacgcgcccgccgcagatgcccgatgctgccgagacagcgggattgagccaggcccagcagtacgacgtttatggcagcatcgtggcccagcgcggcaacatcgcagcgaacgatgcaatggcaacccaggaccgcgtggtgctggggttgcgcgatgagaaccgcacgaccgaggcgcgcggacgtggggtctacgatgaccgcatcgtggtgctgtggaaggatgcgcagggccgcggccacgtgcgcgagttcaaccaggccacgaccgagccgaccgcccagtacgacggccatgccaagaccgcgccgcgcagcccgggctttggcaatgtggcgccgcgtaccaagaccgagggtgaggacgtcaacggcgaccgggtcaaggatctggggcgcctgggcgagggcaccatcgagatgcgcgccaccacccatccgcgcaatggccatcccgatgagttcgcactgcgtccttcgcaggacgcgatcactgcgggcgccggacgggtggagcgcgacagcaatggcgatggctggttcgatgcgcgtgatacccagggcgtgcaggacctcaacgacaccttcaagatccatcgtggcagccattccaacaccgattcggccggttgccagaccatcggtggcggcgagtatgacgacttcgtgtcgacggtgcgcggcacgcctgggcagaaccgctggcagtacgtactgacctcggttgcacccggccagacgcgcgaattggggcaggacgtgccgctcgcggccaacgatgacccccgtcaaccgcagcatcgcgatcatgccctgcagcagcagatcagtacgcgcctgcaggccctgggcggacgctacgccgagcatgccgaggactacagcctggtgatgctgcgcgaagcgaaggccgcgggcatcacccgggtcgaccagatcgtggccagcaatcccagcgccggccgtgcggctggcgagacactgttcctggtgcagggcagcccgggcgatcctgcggcgctgcgcgcaggggtcaatgcggcggaggtgcgcgagactgcggtggaaaccggcctgcgccagctgcagcagcaatcgcgcgaacaggctgcacctgcgcccgcgccggcacagcagcaggacgcgccggcgatgggagggcgttga

SEQ ID NO: 494421 - DNA, 813 bp, Stenotrophomonas maltophilia
atgatccgatcgcagttgacgccgagcgttccattgatgctgctgctggcctgcagtgcctgcgcgcccgctggagagcgcgtcgcgccggtggcgcccactgccagctcggccgcgaaaccggaggccctgcctgcgcagacccttcccacggatcgcggactgcccgcattgccgaaggcttccggcagcggccatcccggcggccgctacgctacgctgcccgaacctgccaggcaggtgctggcgcagttgaagtgcaacgtggagagcgccagcaaggtgcaggtgctctccattcccgcgcaggatggccagcaggatttgatggttactgatcgcagcgggccgcgtttccgctattggatgcggtcgttctccggcagtggcggtaccaccggctatctggtgcagctgcagggctgcccggcaaccaccacgggcatgcgcgcctacatcgcacagggagccgcaccgctgcaggatgtcaccgcatccatcctggcgcaggccggattgcccgatgcggcgaccatgacggcctaccaggaaaagggcgcgggcgatctgttcgccttcatcggcgtgctggacaaagtgccagtgctgcgctgggtggccgaagccgaccccgaacagccactggccgccgatgcacgcagcttcgaccatggcaatgccatccacggcggtttcctgcactggaaccaggatcacttcgaagtggccagggccgttcccgccgcgctatggccctgcgatgacagcccgttgctgccgtgcaaggccgacccgttcgtgacggggcgttga

SEQ ID NO: 494422 - DNA, 1158 bp, Stenotrophomonas maltophilia
atgtcccgcccaatgctccgtgccctgctcatgctcatcagtgcactgcccttcgccgccgttgctgccagccaggaccaggaccaggccaacgaccagacccgccgcctgatccgccagatcatgctggagcagcgcatccccggattgcaggtcgcggtggtcaaggacgggcagatcgtgctgtccgaggcctacggtctggccaatgtcgagaacggtgtgcgtgcctcgcgcgacacccgcttcccgctcaactcggccaccaaggcattcaccggcgtggcggctgcgcagctggcgcaggagggacgactggatctggacgcgccggcctcgcgttacctggatgatcttccgccagcgtggagagacgtgcgcgtacaccagttgctggcgcatgcctcaggccttccggacatccttgatgcgaacggactgctgggcggtggctccgaagcacaggcgtggacggcggtgacagcgcggccgctggaagcggcgcccgggcagcgcttcgcctacaaccagaccaactatgtcctgctggcacggatcatcgcgcagcaatccggtatgtcctacgaacgtttcctggccacacgccagttcagcagcgcgcgcatggcccgcaccaccttcggcgacagctacgacctgattccggatgcggcgacgatgtacagcctggccccgcgtgccaccgatgctgtggatgcaccgtcccgcctgtcgcactggttctacgacataccgccttcgctctgggccggtggcggcatcctcaccaccgccgacgacaccgcgcgctggctcgtcgcactgaccgaaggccgtttgctgccggagacggcactgcggcggatgtggagcgcagagcgcctcgctgatggccgcgccggcccgtgggcgggtggctgggcggtactgcgcgcatcgcccgaccttcaggtggccggtatcggcggtgcgcgctcggccttcgtggtctatcccgagcgcggcgtggcggtcgtggtgctgaccaatcttgtcggtgccaatccgcagcagttcattccgcgcattgccgacttctatgtgcgcgatgcctcaacgccccgtcacgaacgggtcggccttgcacggcagcaacgggctgtcatcgcagggccatag

SEQ ID NO: 494423 - DNA, 387 bp, Stenotrophomonas maltophilia
atgcgtggcaagacgatcggggaccaggagctggccctgctgcagtacatcgatgaacatgcgccggccacggtcggcgaggtcgccagtggctacggggaggcccgtgggctggcccgctccaccgtgctgacgatgatggagcgactgcgggcgaaggggtatcttcagcgccagcagcaggacggtgtctaccgctaccaggccacgcgtggcccgcagagcgtgctgcagggcgcggtggcgcagttcgtcgacaacaccctgcagggctcggtgtcgccgttcgtggcctacctgtcgcagcgccagcaggtcagcgacaacgagctggccgaactggaagcgctggttgcccaactccaatcgcgccgccacgagggctga

SEQ ID NO: 494424 - DNA, 2001 bp, Stenotrophomonas maltophilia
atggacaccacgatgctgatcccgatgttggaacggctgggctggaccagcctgcagaccgtgctgctggtggccctggtgtatggcgtatgccgcgcgctgccgtcgctgtcggcggcgacccgctgccgcctgtggtggctggtctcgctgcaggctgtgctcggcctgttctggagccagccgttgcagctggcctggttgccggcgccgcaggcggtggcgatgagcgcgaccgatgtggccgccgacatggtctacccgctggccccggaggcctcggcacagctgttggccgcaatgccgatgcccgccgcggatgtgccggcggtggcatggtgggccgtcgcactggccacgctgtggatgtccggcgtgctgctgatggccctgcgtaccttcggtgagtggcgtcgctgccgcgcgctgctggcagcggcctatccctgcgaggacgaggcgctggtgcaggccctgcagctggcctccgatgcgcacggcgtgcgtcctgcgccgcggttgtggatgagcacgcaggtggacgcaccgcagctggtcgggccgttccgcccggtgctgctgctgccggcgggcgacaacgccctgcagggcgacgcgctggacctggccctgacccacgaactgcagcacctgcagcggcgtgacctgcaatggggcctgctgcctgcactggcccagcacctgttcttcttccacccgctgctgcgcctgtcggtgcgtgaatatgcacaggcgcgcgaggaagcggtggatgcagcggtggttggccagcacggtgccagccgccaggcctatggccgtctgctgctgcagctgggcgtggcaccgcagccgcatctgggcgtggccagtgccgcaccggataccaccagcctcaagcgccgcctgctctcgctgcagtcgcgccggtcctgcccgcgcatcctggcgatggcgttgactgcggtggtgctggtggtgggcgtggcgccgatgcggctggtcgcagcgccggtgccgccggcaccgcccgcgcctcctgcggcgccgaaggtcgtgccgccgccgccgccgaaggctccgaaagcgccgcccgcaccgccttcgtccgcgcgcgttccggccgtgccggtgtcgcccgcgccgcccgccgagccggctgatgtcgaggcgttgtcaggtccggacgatgcggatgtggcggtcgacgtggatgcggatgtcgatgtcgataccggcatgcacagtgaacacacgacctcccgcaccacttccatcaccacctacggccgcctggacctgggcaaatcgccgccggaggccttcgtgctggtagatggcgattcgaccttcgccaacggcggcatggacgacgtgacggtggcccgcagacagctcggcaagggcccggcgctgtggttccgcaagggcgacaagcgctacgtggtgcgagacccgatgatgatccagagcctgcagcgtgcctacagcggcgcggcggatctgggccgccagcagagcgaactgggccgccaacagagtgcgctgggtcgcaagcagggcgaactcggcaggcagatgggcgagatgggccgcctgcagggcgaggaggcgcgccgcatggcactggccgctgccgaggctgcgcgcagcgcggtggccgcgcatgacatcaaccgcgaagcggcggcagaagcggcgaaggcggcgcggggcgcgaccaacgatgcggccattgcacgtgaggctgcacgtgaggctgctgcagaggcacgtcgtgcgatgcaggaagtggacaacgaaaccgcgcgtgccagccgcacccgcgccatgcagcgtctggccagccagcagtctgaactggccagccgccaggcggcgctgggcagccaacaggccgcgttgggtgagcgtcaggcacgcgcgcatgagcaggcgtcgcggcaggcgcagcaggtgatcgcgcgcgcactggccagcggcaaggccgagcgactctga

SEQ ID NO: 494425 - DNA, 315 bp, Stenotrophomonas maltophilia
atgcgcctcaatccgcttgccctgctcgccatcctgccgctggccgcctgcagccacgccggcagcagcaccacccacgatgccgcaccggcaccggtggccgatgccgcccacgaatgcaggccggaagcgctggaagccttcaccggcaagaccgccgacgaggccaccatcaagaaactggtggccgacagcggtgcccgcaacgcgcgcgtggtcaagccgggcatggaggtaaccatggacttccgccaggaccgcgtgacggtgcaggtggacggtcagaaccggatcgagcgcgccagctgcggttga

SEQ ID NO: 494426 - DNA, 1023 bp, Stenotrophomonas maltophilia
gtgagcctgagcctggacaagctgcgcctgctgcggaagcaggccggcgacccgaaagcagtcacgccggtggcacccgaaccgccccccccggcgccggccccggtagccgccaacgatgcacggcagccactggcggagcgctcggtgttcgcctgggtcgaacaggaaatccgccacaagccgaccggcgctgccgcgcctgtgacggccgccgcaccgttgcgtcgaccggaagtgggcagcctgcaccgcctgctcggcctgcgctcgcgtggtggagccgcaccggcacgcgccagtgcccaggatcgccagctccccggcgaggaaatcgcgccgggactgttcctgatcgagtcgctgcagccgcaaccgattcccgcagaaccgctttccctggctttcgccaggcgcgagcacgagcacgtcgccgcgcgcgacctgctgttcttcgataccgagaccaccggcctggccggcggcactggcacccgcgccttcatgatcggcgccgccgactggcatgtgtgcccgcagcgtggcgaaggcctgcgcatccgccagttgctgatgtcgacgatggccgccgaggacgcgatgctggccaccttcgccagctggctgcagccctccaccgtgttctgcagctacaacggccgcagctacgatgcgccgctgctgaaggcgcgctaccggctggcgcgccagcgttgcccgatcagcgcgctggatcacgtcgacctgctctacccgacccgccgccgctatcgcggcacgtgggagaactgcaagctgtccaccattgagcgccagctgctgcgcgtggtgcgcgaggatgacctgcctggctccgaagccccgggcgcatggctgcgtttcctgcgcggcggcgatgcggtgaacctgcgtcgggtggccgaccacaaccatcaggacgtggtcaccctggccctgctgctgcagcgactggtgcgcgaggagcagcgcgagcgcgaaacactggcgctggtcgggcagtaa

SEQ ID NO: 494427 - DNA, 2490 bp, Stenotrophomonas maltophilia
atggcttacgaactcgccaagcgcaccgccgatgccgagcagaagctcgccacccgcgatggcctgcccgcccgtgacggcgccctgctcagcgcgcgcctgcagcgccgctaccatgaccgcatcaccggcagctttgccattcccggccgcgagggccgctatgcccccattcccgatgcggtaccgtcggccctggccgcggccctgaaggcacgcggcatcgagcagctctacagccaccaggccgaggcctgggaggccagccagcgtggtgagcacgtggccatcgtcacccccaccgccagcggcaagtcgctgtgctacaccctgcccgtggtcagcgcggcgatgcaggacaaggccaaggcgctgtacctgttcccgaccaaggcgctggcacaggaccaggtggccgagctgctggaactcaaccgtgccggcgatctgggcgtcaaggccttcaccttcgatggcgataccccgggtgatgcgcgccaggcgatccgcctgcatggcgacatcgtggtgtccaacccggacatgctgcaccaggcgatcctgccgcatcacaccaagtgggcgcagttcttcgagaacctgcgctacatcgtcatcgacgaagtacacacctaccgcggcgtgttcggcagccacgtcaccaacgtgctgcgccggctcaagcgcatctgcgcgttctacggcgtgcaaccgcagttcatcctgtgctcggccaccatcggcaatccgcaggcgcatgccgaggcgttgatcgaggcaccggtcgccgcgatcaccgaatccggtgcgcccagcggaccgaaacaggtactgctgtggaacccgccggtgatcaatccggacctgggcctgcgcgcctcggcacgctcgcagagcaaccgcatcgcgcgcatcgcgatcaagtccgggctgaagaccctggtgttcgcgcagacccggttgatggtcgaagtgctgaccaagtacctgaaggacatcttcgaccacgacccgcgcaagccgccgcgcatccgcgcctaccgtggcggctacctgcccactgagcgtcgcgagaccgagcgtgcgatgcgcgctggcaacatcgacggcatcgtcagcacgtcggcgctggaactgggcgtggatatcggcagcctggacgtggtcattctcaatggctatcccggcagcgtggccgccacctggcagcgcttcggccgcgccggtcgccgccagcagcccgcgctgggggtgatggtggccagctcgcagccgctggaccagtacgtggtgcggcatccggacttcttcgccgaggcctcgcccgaacatgcacgcattgcacctgaccagccgctgatcctgttcgaccacatccgctgcgcagccttcgaactgccgttccgggttggcgatggcttcggcccgatcgatccggaagtgttcctggaagcgctggccgaaaccgaagtcatccaccgcgaaggcgagcgctgggaatggatcgccgacagctatccggccaacgcggtgagcctgcgcgcggtggccgacggcaacttcgtggtggtcgaccgcagcgacggccgccagcagatcatcgccgaggtcgattattccgccgccgcactcaccctgtacgaaggcgccatccacatggtgcagtccaccccctaccaggtggagacgctggactgggacggccgcaaggcctatgtcacccgcacgcatgtggattactacaccgacagcatcgacttcaccaagctcaaggtgctggaccgtttcgacggtggcgtggccggccgtggcgattcgcaccatggcgaagtgcacgtggtgcgtcgcgtggccggctacaagaagatccgctattacacccacgagaacatcggctatgggccggtgaacctgcccgaccaggaactgcacaccactgcggtgtggtggcagctgccgcaggcgctgctgctgcgcgcgttcgccagcaagcaggatgcgctggatgggttcctcggcgccgcgtatgccctgcacatcgtcgccaccgtcgcggtgatggccgatgcgcgcgatctgcagaagtcagtcggcaacggcgatggtgcctggttcgcgatcgccgaccagagcggccgtggccagctgcgcggcagcgaaggcgaccctggcgcggtggagctgctgcaggagttcgtgccgaccgtttatctgtacgacaactttcctggcggcgttggcctgagcgagccgctgtggcagcgccaggccgagctggtgcagcgcgcgcgcgaactggtgcagcgctgcgactgcaaggccggttgcccggcctgtgtcggcccggtgctggctgcacaggaggaagatgaaacctcgccgcgcgcgctggcgctgcgcgtgctcgacctgttcgacgcagaagcctgccagcacgtgcgcgacgtggtggtgatcacgcgcgagccgatggagctgctggcaccgtga

SEQ ID NO: 494428 - DNA, 474 bp, Stenotrophomonas maltophilia
atgctgctggccggcatcgcgcaggcgcagcaggccgcgccggtatcggtgcccgatcctgcacccgttccccctgctgatgccccggcagcagccaccgcgccgatctccaccgccctgccgcaggacaacgtcaccaccctcggcgaggtgcgtgcactcaagcccgacgacgagccgctggacctgtaccgcttcaagaacccggtgaagttcggcgacaaccgcttcagccgcgactggagcgagccaccgtcaccggagcaggtcagcatgggcggcggctacatcatgatgggcgtggtcaagggcgtgctggcggcgggccggggcctgaacaagctcaccggtggccccgaccagatccagtccgccatcgcccggccaccgcctgagctcagtgccgaacagcggcagcgtgcgctgcggttctcccagcagcaggatgccggtgatgcaccgccggtgaagtag

SEQ ID NO: 494429 - DNA, 675 bp, Stenotrophomonas maltophilia
atgttcctgcgttcgttctgcctgctggctgcattgctgcccgcgtccgcctttgctgccggcatcgccggtgatggcgcgtgccgcaatggcgcgttcccctccgaacagagccggttcgcgctggcgcgggtggtcgacgcaccgcgcctgtatctgctcggcgacatggacgggtgccccgccaagggcgaaccggcctgccgccagcgcagctatgtggtcaacggcgatacggtggtgaccggtcgcgaccttggccgctaccgctgtgcgttcttcccgaacaaggtgggtggcagcgccggctgggtggaccgcagcaagctgcagccgttgccggtggccgtgccaacgctgcaggactgggtgggccactggaaagacggcgacaacggcctgcgcatcaccgtgcagggtggacaactgcatgtggatggcgacgcctactggccttctgccaaccccacgccggaacagcgcccgtatggcccgaacatgggccaggtggaagcgcgcgcgacgccgcgtggtgctgatgtcgagttcgtcgaggacacgtgccgggtgcgcgtgcactcgctgggcgaggtgctgatcgtggccgacaacagcgaatgcggtggcatgaacgtgcgcttcaacggcgtttaccggcgcgcgggcacgcgttga

SEQ ID NO: 494430 - DNA, 1809 bp, Stenotrophomonas maltophilia
atgaacgcctccgctgtgaacctgtggattgcgctggcactcgccctgatcgtggtcatcgccagcgtgcgccagctgcgtggcaatgccgcgcgtcgcggccgccagtggatcgtgattgcgctgcagctgatcgctgccacgctgctgtacttctgcctggtcccgcccaccggccagcaacccgcggtcggcctggtcgtgctgggaatcgatgccgacaaggccggcgcgctgccggccagcgcaggcccgcggctgctgttgcctgaggctgccgatgtgcctgggggccagcgcgtgccggacctggccacggcgctgcgccagcatccggcttccacgttgacgctggtcggtgccggcctggtcgcgcgtgaccgcgacgcggtactgccacgcgacgtgcgctggcagccggtagctccgacgcgcgggtggatcgcgctgcagccacccgccgacaccgcgcccggcgcacgcttcgacgtgcatgcacaggcgcgcggcgtcgccaaggccaaggcggaactgcttgaccccgccgacagcgtggtcgatcgcgtggacgttgccgaggacggtcacgtgcagctcagcggcatcgcccgcgccgagggccgcagcgtgttccagctgcgcctgctcgatgccggcggtcatgtggtggacagcgcgccggtaccgcagcagaccctgccggcggcaccgctgcgcatgctggtgcgtgccagtgcgccgggcccggagctgaagtacctgcgccgctgggccgccgataccggcatccgcgtgcaggtacaggccgataccggggcaggtgtcagcgtgggggatggcgcggtcgcgctggatgcagcgtcactcgcgcgcagcgatctgttgctgctggacgagcgcagcctggccgcattgagtgccggccagctggctgccgtgcggcaggcgttgcgcgacggccttggcgttctgttgcgcagtgcaggcgcacctgcagccggcgcgcgccagcgcctgcaggatctgggcctgccggtgcagggcgatggcggcagccacgccctcgaacttcccggcgatggcgacagcgcggtcctcgccgcacgacgcggcccgctcgccgccggaacgctgccgaccggctacggcgaggacgctgaccgcagctcgcacaatgcgcccctgcccgcgctggaagcactcgcactgcaggcgccaggcagcaacgccctgctgcgggatgggacgggcaaggccgtcggcggctggcgcgctgccggcaagggtcgcatcggcctgctgccgatcaccgacagctggcgctgggtgctggccgggcgcgatgatcgccacggtgaactctggagcagcgtagtcgccacgctggcgcgtgcgcagggcagcggtgatgcgctgtggtcgccgcagacgctcggctgggcgggcgaacggcaggcgctgtgcggcgtgcaggcgccactgcaggtcttcaacgcgcgcggagacagcgtgcccctgatcgtcgacggcgcaacgtcgaccctgcgctgcgccggctggtggccgcgcgaggcgggttggcagcgcctgcagcacggcgacaccacggtctggcgctatgtgttcgacccgaaggccgcacctgcactgcaccagcaggcgatgatcgatgcaaccacgcgggcgttgtccgtcagcgggccgacgaacacggcgatgatgcagcccgtgccgggctcgcgctggccctggtggctggcgttcacggtgtgcgcttcgctgctgtggtggctggagcggcggcgctga

SEQ ID NO: 494431 - DNA, 2169 bp, Stenotrophomonas maltophilia
atgaacaccctgcagctcgcctggcagcacgcgcgccgccgccgtgcgctcgtcaccctgctgctgggcctgccgtgggcgctggccgcaacggtgctggcgctgcgcctggcgggcttcgatatcgcctgcgtgatcggcaccatcggcctgcttgcctgcgcagcgctcgccacggcacgctcccgccagctggacccgcagtggttgcagcgccagctcgatggcagcggcgccagtgaggacagtgccgacctgctgtttgccgatgcgcttaccctcaatccgctgcagcagcgccagcgcgcgcatgtgctggccacgctggaacgcgcgatgccggaactgcgtccgcgctggccgcgtggagcattggcgctgtgctggatcgcaggcctggccatcgttgcgctggcattcggctggccacgttccagccccggctccgcgccggtccgtgcggcggcgcctggcagcacggctgccgcgggcccactgcacctgcagtccacccgcatgcgcatcgacgcgccggcctataccggccaggccacgctcacccagaacgcactggatgccaaggtcgccgccgacagccggctgtcgtggtcgttgcgcttcgatcgcgcaccggacaaggcatggctgcagttccacgatggtcgccggttgccgctgaacgaacacgatggccagtggcaggcacaggatgtggcgcgcacgccggtgctgtaccgcgtggtgagcgagccggcgttggccggaaccgacctgcatcgtctggacgtggtcgccgaccgcgcgcccggcgtacgcgtgctggagccggccgccagcctggtgctgggcacgcccgggcaacgccagtggtcgttgcgcttcgaggccaccgacgactatggcgtagccgcgcaggcaacgctgtcgatcaccaccacccagggcagcggtgagaacatcaccttcgtgaaacgcagcgtgacgcttgccggcagcggcgaagccaccgcgcggcgtttcgcccacacgctggatctggctgcgctgggcgcgcaaccgggcaacgatgtcatcgcccagctggaagtgcgcgacaaccacgcgccaacaccgcagaccgggcgcagcagcagcgtgatcctgcgcctgcccagcgccgaggtggcacttggtgccgaactggaaggccgcatcaagaagaccctgccggcctatttccgcagccagcggcagatcatcatcgatgccgaagcgctgatccggcagcgacgcagcctcgccgccgaggacttcgtgaaacgcagcgatgcgatcggtgtcgaccagcgcatcctgcgcctgcgctacggccagttcctgggcgaggagagcgagggcgcacccaagccaccgccgaccagcgacctgcccaccagcgatgcgccggctgcagacagccacgacgacgatcacgatcacggccatggcggcgaggccggagcgcacgatgagcatggccacgaccacggcggcaaggcgtccaatgccgacgcgccaccggtgttcggcagcgccaccgatgtgctgtcggagtacggccacacccacgaccatgccgaggccgcgaccctgctcgacccgcagacccgtgccacgctgaaggccgcgctggaccagatgtggtcggccgaaggcgagctgcgccagggccgtccggagcaggcgttgccgtttgccaacaaggcgctggctttcatcaagcaggtgcagcaggccgaacgcatctatctggcccgggtcgggccggagctgccgccgatcgatgaagggcgccggctgggtggcgatcgcgccgggctggccagtcgcgaactgccgctggccgcacgcacgccgcccgacccggccatcatcgaagcgtggcagcgcctcggcgatgacaccagcgtgcccgacctcgacgcactcgccacctggcagcagcgcaacgccgcctacctgcccgatgcgctggacctggccgcggccatcgagcagctgcgcatcgaacccggttgccgcgactgccgccagcgcctgcgcgcgcagctgtggcgggcgctgcagcgtccattgccgcaggcgatgcggcgcagtgccgccgatgcgatggggcagcggtaccttgatgcgctggaggcacagccatga

SEQ ID NO: 494432 - DNA, 1122 bp, Stenotrophomonas maltophilia
atgaccctgctgttcccgttgggcctggccgcgctcgctgcagggttgctgccgctgctgatccacctcgcccgccgccatccgtacacaccgctggatttcgccgcgctgcgctggctgcgtgcacagatccggccgcgccagcgcatccgcttcgatgactggccgttgctgctggtgcgcctgctgttgcttgccgcgttggccttgctgctggcacgacctgcattgaccgggcctgcgccagcccccactgcgtggacggtcgtagccccagggctggacgcgaccgcactacgcggcaccgccgaagcgggcaactggcattggctggcgcccggcttcccggccattgatgaagtgccacccgcgtccacggcttccctgcccagcctgctgcgcgaactggacgcacagctgcctgcgggcaccgcattgaccgtgcacgttcccgatcccctgcccggcctggacggcacacgcctgcagctgtcgcgcgaggtgcagtggcgtccgcagccgataccggtgagtgagcaaccgagtgccgcaacgttgccgcgcctgcgcgtgcacagcgatgcttcggccgccgtccagcactggttgaatgcactgcagcgcgcgtggggcaggcaggcgccgctcgcgcctctggtggcggatgcgctgcccgaacgcggcgagatcggcgtgtggagccgcactggcgcactgccggcgaactggcaggcgtggctgcaggacggcggacgtgtagtgactgccggcaagcctgccgccgaggccagcatcctgctgcgcaacaccgagggctccccgctgctgtggcagcaacgcatcggccacggtgtcctgctgtctctgcccggcgactgggatgcctcaggcaacgctgcgctgcgcgatccacagttgccacgcgcgctgctgctggctctgcagccgcctccgctgccacgcctcggcgatgcccgggaccaggccccccgccaggcagcactgcctgcggcaacgccgccgctgcgcaagctcaccccgtggttgctgctggccatcgtgctgctgttcgcgctggaacgctggatggccagcagtcatcgacgcagggggcccgcatga

SEQ ID NO: 494433 - DNA, 897 bp, Stenotrophomonas maltophilia
gtgaacgccggtaccccgctgaccttgccaccggaactgcgtgcgcgcctgcgcacgctccgcgtgcggccacgcctggccagtggcgccagtggcatcggccagcacgccagccgcagccgcggtgccggcctcgaattcgcccagtaccgtgcctacgaaccaggcgatgagctgcgccagatcgactggaagctgtatgcacgctcggaccgcttcttcgtgcgcgaatccgaacgcgaaagcccgatcacggtctggctgctgcttgatgccaccgcctcggccggccaggccgatcgcgcggcaccgcagcgcacccgcctggaccacatgcgcggtgtggccgcctgcgtggtggaactggccctgcagcagggcgaccgtttcggcctgctggcgatcaatggcgatggactgcagttggtgcccgcagcgaacggcgcacgccagcgtgatcgcgtgcacctgcaactgcatgcactgcaggcgcgtggcggctggcctgtggccgatcgcctgcgcccgctgtgggagcgcgtgcgcccgggcgacctgctgctggcgatcggcgacggttttgacgaggccggcattgtgctgctggaacaactggccagcgcacgccgcgaagtggcactgctgcagatcctcaccgccgacgagcgtgactttcccttcgacgcaggccatcgcttccgcgatccggagaccggcgaggaactgctgggcgatggcgcggcgatccgcaccgactacctgcaacgcttcgctgacgcacgcaacgcattgcagtcgcgcctgcaggccagcggcatcgccagtgccgctggctggctcgaccagccgctggaccaaccactgcagtcactgtttggccgcaggggcggcgcatga

SEQ ID NO: 494434 - DNA, 984 bp, Stenotrophomonas maltophilia
atgacctcccccgacctcgattccctgttgccacgcctggatgcgctgcgcgccgcgcttgcacgcgccgtggtgggccagcataccgtggtcgagcagctgctgatcggcctgctggccggcggtcactgcctgctggaaggcgcgcccgggctcggcaaaaccttgctggtgcgctcgctcgggcaggcgctggaactgcagttccggcgcgtgcagttcacccccgacctgatgcccagcgacatcctcggcaccgaactgctggaggaagaccacggcaccggccatcgccatttccgtttccagcagggcccgatcttcacccacctgctgttggcagacgaactcaaccgcaccccgcccaagacccaggccgcactgctggaagcgatgcaggaacgcacggtcagctacgccggcaccacctacgcactgccggcgccgttcttcgtgctggccacacagaacccgatcgagcaggcgggtacttacccgctgccggaagcgcagctggaccgcttcctgctgcacgtgctggtggattaccccagcgaggacgaggagcggcagatcctggaacagaccaccggcggcgccaccgacgcggtgccgaaggtgatggatgcagaggcggtgatcgcgctgcaggccgccgtacgccaggtgcatgtcagcccggatgtgctggcctggatcacccgcttggtgcgcgccagccgcccaggcgaaggcgcacccgccgcgatcaaccagtgggtgaagtggggcgcgggtccgcgcgccgggcagtcgctggtgctggcggcaaaagcgcgcgcattgctgcagggccgctttgccgccacccgcgaggacgtgcaggcgctggccgcgccggtgatgcgccatcgcctgctgctgtcgttcgccgccgaggccgagcagaagcgtgccgacgacgtggtcgccgccctgctgcaggctgtgccgttcccgggttga

SEQ ID NO: 494435 - DNA, 708 bp, Stenotrophomonas maltophilia
atggatcgccgggcctgcctgcgctggttggccgctgccgcttcggcggcggcgctgccggcctgggcacaggcaggcccgcgcagttcgcgctacgacttctggttcacccgcctgcagtacgactccggtgactgggacgtggacgcgcgcatgccgtccaacctgatcacctcgctgatcgactacacctcgctgcgcgtggacccgcaggagcacgtggtggcactggccgacccgcgcatgctggaagcgccgttctgctacctggccggccacacgctggtggagttcaatgccgccgagcggcagaacttcgtgcgctatgtgcgcaatggcggcttcgtcttcgtcgacgactgcaaccacgatatcgacgggctgttcgccacctcgttcgaggcacagatgggccgcctgtttggtcccagggcactgcagaagctgcccaacagccacccgctgtaccgcagcttcttccggttccccgatggcccgccggccaccagcttcgaactcaacggctggggcgacgacctggtgcacgactacctgaagggcatcgaggtcgatggccgcctggggctgctctacagcaacaaggactacggctgcgagtgggactacgactggcgcaacaagcgtttcctggccgaagacaacacccgcttcggcgtcaacatcgtgatgtacgcgttgaacaattga

SEQ ID NO: 494436 - DNA, 1335 bp, Stenotrophomonas maltophilia
atgagtatcttcaccgaagcccaggccaaggccatcctcgacaaggtcatcgccctgtccaaggccgacgagtgcaccgccgtgctggccggcgcgatcagcggcaacatccgtttcgcgctgaacaatgtctccaccagtggcatcgtcgacaacaccgaactggcggtcaccgtcgccttcggcaagcgcgtcggcaccgcctcgatcaacgagttcgacgatgccgcgctggaacgcgtggtgcgccgtgccgaagacctggcccgcctggccccggagaacccggagttcatgccggccatcggcaagcagagctaccgcgccagccccaccttcagcgaatccactgctgccatcgatccggcgttccgtgccaaggtcgccgccgattcgatcgccccgtgccgtggtcacggcctgatcgccgccggcttcctcgaggacggccagggcttccaggccaccgccaacagcaacggcaacttcgcctaccagcgcaccaccaacttcgattacacctgcaccgtgcgcactgaagatggccgcggctcgggctgggtcggccgcaacctgaaggatgcggccgacttcaaggccgaccaggacatccgcatcgccatgcgcaaggccaccgagtcggccgaagccaaggcgctggaaccgggcaagtacacggtgatcctggagccggccgcagcggcaggcctgatcagcttcatgatgaacttcttcagtgcgcgctcggccgatgaaggccgcagcttcctgtcgaagaagggtggtggcaacaagctgggcgagcaggtctacgacccgcgcgtgaccatgatcgccgatccgtggcatccggacgcaccggtgctgccgtgggacaacgaaggcctgccgcgcgagcgcatggccatcatcgagaacggcaaggtcgccaacctggactactcgcgcttctgggcgcagaagcagggcaagaccgccaaggcctcgccgggcaacctgctgatgagcggtggcgacaaaagcaccgccgagctggtgcgtggcacccagaagggcatcctggtcacgcgtacctggtacatccgcatggtcgatccgcagacggtgctgctgaccggcctcacccgcgacggcaccttctacatcgagaacggccagatcaagcacccggtgaagaacttccgcttcaacgagtcgccggtgatcatgctcaacaacatcgaagagctgggcaagccggtgcgtgtggccggtgatgagtccagctacgtgatgatgatcccgccgatgaagctgcgcgatttcaccttcacctcgctgtccgacgctgtctga

SEQ ID NO: 494437 - DNA, 1635 bp, Stenotrophomonas maltophilia
ttgcaaagacgtgacttcctggccctgaccgggcttaccgcgggcgggctgatcgtgccctccttcttcggcaaggtgatcgccgccgagcagctgcagtccagcctcgacccggcattgaagaagcgcctggccgacgcggcgctgcaggcggcgcgcagcgccggtgccacctactgcgacgtgcgcatcggccgctacctgcggcagttcgtgatcacccgcgaggacaaggtgcagaacgtggtgaacaccgagtccaccggcgtgggcatccgcgtgatcgtcaacggcgcctggggcttcgccgccaccaacgcactgggtaccgctgacgtggccagggccgcgcagcaggcggcggccatcgccaaggccaatgccggcgtgcagaccgcaccggtgcagctggccaaggcgccgggcgtgggtgaagtgagctggcgcacgccgatccgcaagaatgcgatggaggtgccgatcaaggacaaggtcggcctgctgctggacgtcaacgctgccgcaatgggcgctggtgccagcttcgtcaactcgatgctgttcctggtcaacgagcagaagtactttgcttccaccgatggttcctatatcgaccaggacgtgcaccgcatctgggcgccgatgacggtcaccgccatcgacaagagcagcggcaagttccgcacccgttcgggcctgtcctcgccgatgggcctgggctacgagtacctggacggcgccgccgccggcaaggtggtcagcccgaatggcgtggtcaactacagttcttcctacgacatgaaggaagacgccatcgccgccgcccggcaggcgcaggaaaagctgaaggccccgtcggtgaagccgggcaagtacgatctggtgctcgatccgtcgcatacctggctgaccatccacgagtcgatcggccacccgctggaactggaccgcgtgctcggctacgaagccaactacgccggcaccagcttcgccaccctggacaagcgcgaacagcatttccagtacggcagcgagctggtcaacatcttcgccgacaagacccagcccggcagcctcggcgcggtggcatacgacgatgaaggcgtgaagtgcaagcgctgggagctgatcagcaacggcaagctggtggactaccagaccatccgcgaccaggcccacatcctcggcaagaccgagtccgacggctgctgctatgccgactcgtggtccagcgtgcagttccagcgcatggccaacgtgtcgatggcaccgggcaagacgccgctgagcgtgccggacctgatcaaggatgtggagaacggcatctacatcatcggtgatggttcgttctcgatcgaccagcagcgctacaacgcgcagttcggcggccagctgttctacgagatcaagaacggccagatcacccgcatgctggaagacgtggcctaccagatccgcacgccggagttctggaacgcctgcaccgccgtggccgacgaacgcgactaccgcctgggcggttcgttcttcgacggcaagggccagccgggacaggtctcggcggtctcgcacggctcgtccaccgcgcgcttcaacggcatcaacgtcatcaacaccgcacgcagcctcggctga

SEQ ID NO: 494438 - DNA, 1632 bp, Stenotrophomonas maltophilia
gtgcaacgacgtgagttcctggctttttccggtctgggcctggcgggcctgctgctgccgcattcccgtgccatcgccgccgagcaactgctcgccccggtcgacaccctccagcgcaggcgcctggcggacgtggcgctggccaccgcacgcacggccaaggccagctactgcgatgtgcgcatcggccgctacctcaaccagtcggtcatcacccgcgagcatcaggtcggcaacgtgaccaaccgcgaatcgtccggcgtgggcgtgcgggtgatcgtcaacggggcctggggcttcgctgccacccaccagcagaccgaggccgccgtacgcgctgcggtcgagcaggcggccgcgatcgcccgcgccaacgccagcatccagacccggccggtgcagctggcgccgacgccgccggtcggggaggtgcgctggcagacccccgtccgcaggaacgcgatggcggtgccgatccaggacaaggtcgaactgctgctggccctcaatgccgccgcgctggatgcgggcgccgactacatcaattccaccctgttcctggtcaacgaacagaagtacttcgcctccagcgatggctcgttcatcgaccaggacatccatcgcatctggctgccgttcaccgccaccgccatcgacaaggccagcggcaggttccgcacccgcgccggcctgtcctcgccgatgggcatgggctatgagttcctcgatggcgatgcgcgcggcaaggtgcacctgcccggtggcatcaccgcttaccgcgattcctacgacccggtcgaggacgccattgcggccgcccgccacgcgcgcgagaaactgaaggcgccgtcggtgaagcccggcaagtacgacctggtgctggacccgtccaacctgttcctgaccatccacgagaacgtcggccacccgctggagctggaccgcgtgctcggctacgaagccaactacgccggcaccagcttcgccacgctggacaagcgcgatgcgggtttccgctggggcagcgacatcgtcaccttcttcgccgacaagacccagccgggcagcctcggtgcggtcggctacgacgacgagggcgtcaagacccagcgctgggacctggtgcgcgacggcatcctggtcgattaccaggccacccgcgatgaagcccatatcctcggccgcgatgcatcgcatggctgcagctacgccgattcctggtccagcgtgcagttccagcgcatggccaatgtctcgctggcgccgggcaagcagccgctcagcgtcgaggacatgatcaaggacgtggagaacggtatctacatccacggccgggggtcgtactcgatcgaccagcagcgctacaacgcgcagttcggtggccagctgtactaccagatcaaggacggaaagatcgccggcatgatcgaggatgcggcctaccagatccgcacgccggaattctggaatgcctgcacggccatctgcgatgaacgcgatttccgcctgggcggttcgttcttcgacggcaagggccagcccggccaggtctcggcggtctcgcacggttcgtccaccacccgcttcaacggcatcaacatcatcaacaccgcgcgcagtctcggcgcttga

SEQ ID NO: 494439 - DNA, 615 bp, Stenotrophomonas maltophilia
atgtcgagcaagccgtattcagaagcctgcgagcgcaaccgcgaaccgatcgccgccgcactcgacccgtggatgggcgaccgccatcgggtgctggaaatcggcagcggcaccggccagcacgcggccttcttcgccgagcgttggccctggctgcgctggcagcccagcgaccatccggaccatctgcccggcatcgaggcctggcgcgcggaagcggcgctgctgaacctgctgccgccggtggcgctgcaggtggaactgccaccggcgcctgggctcagcctgccacagggcagcacgttcgacgccgcgttcagcgccaacacgttgcacatcatgagttgggcgcacgtgcaggcgttgttcgccgcgctgccatcggtgctgcgtcgcggcgcgctgctggcggcgtacggcccgttcaactacggcggccgctacagcagcgacagcaacgcgcagttcgatgcctggctgaaggcgcgcgacccgcgcagcggcatccgcgatagcgaagcggtgcaggcgctggccgccgaccacggattcacccgcctgggggatgtggcgatgccggccaacaaccgcctgctgctgtggcggttggggtaa

SEQ ID NO: 494440 - DNA, 3687 bp, Stenotrophomonas maltophilia
atgaccagtaccgcgcaactcacttcgccctcttccgccgacctgatcgaccgtgactacacgctcgaccacaagtacacccgcaacgaggggcggatctacctgagtggcgtgcaggcgctggtgaaactgccgttgatgcagcggctgcgcgacgcgcacgaaggcatcgacagcgccggtttcgtcagtggctaccgtggcagcccgctgggcggctttgacctggagctgtggcgcgcgcgcaagcacctcgacgcggccaaggtgaagttcacccccggcctgaacgaggacctgggcgccaccatggtgtggggcacccagcagaccaacctgttccccggcgccaacgtgcagggcgtgttcggcatgtggtacggcaagggcccgggcgtggaccgctgcggcgacgtgttcaagcacgccaatgccgccggcacctcgcgccatggcggcgtgctggcgctggccgccgatgatcacgcctgccgcagttcaaccctgccgcatggcagcgaggacgagttcgtcagcgcgatgatgccggtgctgaatccggccggcgtgcaggacatcctggacatgggcctgctgggctgggcgatgagccgctataccggccgctgggtcggcttcaagacgatcgccgagacggtggaatcgtcggcctcggtcgaggtcgatccgatggcgcgccgcatcgtgctgccggaagacttcgagatgccgaccggcggcctcaacatccgctggccggacccgccgctggaccaggaaatgcgcctgcaccgctatgcggtgaaggccgcacaggccttcgcccgcgccaacggcatcgacaaggtggtgatggacgcgccgcgcgcgcggctgggcatcgtcaccaccggcaagagctacctggacgtgctgcaggcgctggaatacctgggcctggatgaaacggcgtgcgccgacatcggcatccgcgtgtacaaggtcggcatgacctggccgctggagccgcagggcatcgcgcgcttcgcgcagggcctggaagacatcatcgtggtggaggagaagcgtgccttcatcgagcgccagatgaaggaacagttcttcaactggccggccagctggggccagcgcccgtccatcgtcggcaagtacgacgagagcggcgagtggatcctgccgtccaccggtgaactgaccccggccaccatcgccggcgtgatcggtcgccgcatccagaagttcttcaacaacgcatcgatcgagcagcgcctgcagtggatgcaggagaaggaagccgaacttgcgttgccgcgcgccagttttccgcgcgtgccgcactactgctccggctgcccgcacaacacgtccaccaacgtgccggaaggctcgcgtgcgctggccggcatcggttgccattacatggtgacctggatggaccgcagcaccgacaccttcacccacatgggcggcgaaggcgtgacctgggccgggcaggcgccgttcaccgataccccgcacgtgttccagaacctcggcgacggcacctacttccacagcggttcgctggcgatccgccaggcggtcgctgccggcgtcaacatcacctacaagatcctctacaacgatgcggtggcgatgaccggcggccagccggtggacggtccgctgagcgtgccggacatcgcaaaacagatgcgcgccgaaggcatccacaccatcgtggtgctgtcggacaacatcggcaagtggaccggccagcgcgagcacttccccagcgacgtcgagttccatgaccgcagcgagctggacgaagtgcagaagcgcctgcgcgaagtgaagggtgtttcgatcctgatctacgaacagacctgcgccaccgagaagcgccgccgccgcaagcgcggcaagctggaagacccgcagaagcgggtgctgatcaattcgctggtctgcgaaggctgcggcgactgcggcaagaagagcttctgcgtgtcggtgctgccgaaggaaaccgagttcgggcgcaagcgcgagatcgaccagtccaactgcaacaaggactattcctgcgtgaacggcttctgcccgagcttcgtcaccgtgcacggtggccagccgcgcaagggcagcaagcgcgatgcgtccacgctgctggacaacctgccggcaccgacccttcgcggcagcctggaacagccctggaacatcctgatcaccggcgtcggcggtaccggcgtggtgaccatcggcgcgctgctgggcatggccggccacctggaaggcaagggcgcgaccgtgctcgaccagaccggcctggcgcagaagggcggcgcggtgaccacgcatatccgcattgcccgtcgccctgaagacatccacgccgtgcgtatcgccgccggtgaagccgacctggtgctgggctgcgacatggtggtggtcaacgattactgggcgctgtcgaaggtgcgcgccggccgttcgcaggtggtgctgaacacctacgaagcgatgccgggcacgttcaccacccgcccggacatgcagttccccgccgccgacatcatcgccggcgtgcgcgtggcactgggcggccaggaaccactgctgctcgatgccacccagctggccaccgcgctgctgggcgatgccatcgccgccaacctgttcatcctcggctacgcctggcagcagggcctggtgccgctgtcgttcgactcactgatgcgcgccatcgagctcaatggcgccgccgtggcgatgaaccagcaggcctttgcgtggggccgcctggccgtggtcgatccgcaggccgtgcagcaggccgccggcctggtgcgcaaccgccacaccgatgccgaatccaccccgggcccgctgcatccgctgccgccaggcgagtgggagggcaatgaatggggtgccactgcggcgccgcgcaacaccggcgacgaacgcgaactgcgcggcctgccctcgcacggtggcgacgtggcgttcctgccgctggatgacgcccgcctgtcgcgctcgctggatgaaatgatcgagcgccgcgccgcgttcctggtcgagtaccaggacactgcctacgccaaccgctaccgcagcctggtcgagcgcgtgcgcaccgccgaagccgaccgcatcggcggctccactgcgctgaccgagaccgtggcccgctacctgttcaagctgatggcctacaaggacgagtacgaagtggcccgcctgtacaccagcggcgacttccagcgccgcctgcagcagcagttcgagggcgactaccagctgcgcttccacctggcgccgccgctgttcgccaggaaggatgagcagggccggttgctgaagaaggaatacggcccgtggatgttcaaggccttcggcctgctggccaggctgaagttcctgcgtggcggccgcttcgacgtattcgggcgcaccgcggaacgccgcatggagcgcaagctgatcggcgattacgaggccaccgtgcaggtactgctggacggcctggatgacgaccgcctggccctggcggtggagattgccagcatccccgagcacatccgcggcttcggccacgtcaaggaagcgcatttcgagcaggccaaggcgcgcgaagcggccctgctggcgcagtggcgcaatccgaaggcgctgcatatcgtgcaggtggcctga

SEQ ID NO: 494441 - DNA, 636 bp, Stenotrophomonas maltophilia
atgtcagttgcagcaaagatcctgggcagcatgttgctggtctcgggaacggcccccgtgtgggccgcgccggcggtgccggcaccacaggagttctacttcgacagcgatgcggccgccgtgccgatggtcgtggtccagtccgacggggatgcgctggtggcgcagctgctcaaacagcgcgagcgcggccggcgtaccgtggaggccaccgtgcagctggcgtcggtggccattgcgcagggccgcaccgagctgggtgaacagctgtatcgcgaagcactgaaggatgcgccggtgcagggcagcctgggccgtagcgtgcgctggaattacggctgggacctgctgcgtcagggccagcccgaagccgccctggagcaatggcaggctgctgccggtggttcgctgagcaagccgggctggctgccacccacctatgcgctggcgctgtggcgggccgggcggaagcaggaggcggtgcagtggtatgccgcagcggtgcgtaccgagccgacgcaatggagcgacagcagccgctttgcgcagttgttgccgttgtggcgtgacgacgagcgcgcctcgctggcggaagtgcagcaggcctgggcggccgcgccgccggcctggccctga

SEQ ID NO: 494442 - DNA, 1485 bp, Stenotrophomonas maltophilia
atgagcgaactgcaggacctgagcgcactgatccgcgccaatacccccctgatcgtgatcgagacccaggatgaggcccgcatcgtcgagctgttccggcagacgctgatgcacgtgtggcgggccctgcaccgctggtccatcaccgagggcctgcgtcgcatcgacctggaccgcgaggacccgccagtcggcccgcccgatgccagcgccgccctgcagatgatccgccaggccgatcagcggggtgtctacctgctgctcgatttccacccctacctggggtatgccagccaccagcgcgcgctgcgcgacctgatccagcgccgccatagcgagccgcatgtgctggtgctgatcggcgccaaggtcgagctgccggccgagctggaggccctggcggtgcgcttcaacccgcgcctgcccgatgccaacgccctgctgaagatgctgcgcgaggaggccgacgcctatgcgcgcgaacacggcggccgccgtgtcgaggtcgacagcgaggcggtgaagaagatcctgaagaacctgcagggcctgagcctggtcgatgcccgccgcatcgcccgccagctgatctacgccgatggcgcgctgcgcgacgacgacctgccgcagctggcacggctgaagttcgagctgctcaaccgcagcggccacctgttcttcgagcatgacagcgcgcgcttcggcgacgtggccggtgccaaccggctcaagcgctggatcagccagcgccgggtggccttcatcgccggctcggcaccggccggactggatccgccgcgcggcatgttgctgctgggcgtgcagggctgcggcaaatcgatgctggccaaggccaccgccgccggcttcggcgtaccgctgctgcgcctggacgtgggcgcgctgtacaacaagtaccacggcgagaccgaggccaacctgcgccaggcgctggcctcggccgagcagctggcgccctgcgtgttgtggatggacgagatcgagaagggcctggccagcggtggcgaggacggtggcgtatcgcgccgcgtgctcggctacctgctgacctggatggccgaacgcaaggcgccggtcttcatcgtcgccaccgccaaccaggtacacgagttgccggccgaactgctgcgcaagggccgctttgacgagatcttcttcgtcgacctgcccacgcctgaggtgcgtgtggagctgctgcggctgcacctggggcgacgccagctcaacggcgacgacttcgcgctgccggcgctggcggccgcggccaatggcttctccggcgccgagatcgagcaggcgatcgtggccgggctgtatgcggcgcacgccgaaggccggccgttggataccgagctgctgatgaacgagatccgtgcgacgcggccgctgtcggtgctgatggccgagcaggtagaggcattgcgggcatgggcgtcggggcggacggtttccgcggacgattga

SEQ ID NO: 494443 - DNA, 630 bp, Stenotrophomonas maltophilia
atgaagacgatcctggtggccggttccaagggcggggtgggcaagaccaccgtcgccacccacctggccgcgtacgcggcattgcagggcaaggccacggtgatcgccgatgccgacccgcagggctccagcacccgctgggcacaacggcgggcagggctggaaagcgcggtgctccccatcgatgtgtatcggaagaagcagtgggcgcagaagctgcccgacggtaccgataccgtcatcatcgatgcaccggccggtgcgctggccgacgatatcccccatttcctggacgcggccgacgccgtggtggtgccggtgctgccctcggcgctggatatcgaagccatcgtcggcttcctcaacagcctggcccagaacccgcgcgtgcacagccgcaagctgccggtggggctggtcctcaaccgcaccaaaccctggacccagacttcgcagcaggcgctgcagatgctggccgaatggccatacccggtggtcgcgcagctgcgtgacagccagagctacgtggtcatgaccggcctgggccgcagcctgttcgactatcgctccgcccaggtgcgcgaacaccaggccgactgggagccgctgctgtcctggctcaagctttga

SEQ ID NO: 494444 - DNA, 477 bp, Stenotrophomonas maltophilia
atgcgtgaactgatcctgctgcgccatgcccatgccgaacccgccgtttccggccaggccgacctcgaccggccgctgtcgccggtggggctcgccgaggccgaagccgccggcaagtggttgaaggaaaacaacctgctgcccgactgcgtgctgtgctcgccgtcgcgacgtacccgcgagaccctggaagcggtgatgacggccatcggctatgtcgaaaagcgcctggaagaccggatctacgaagccaccccgggcaccctggcggcgctggtggacgagcgtcgtgacctggaccgggtgctgatcgtcggccacaacccgggcctggagcagctggtggccctgatgaccgacggcaccagcagtgactatcgcggcatgccgccgggcggtgtggccgtgcttggcttcccgcgcgaggcctcgatcgaacccggcgtggccagcctgaacgcgttctggtggccgtga

SEQ ID NO: 494445 - DNA, 618 bp, Stenotrophomonas maltophilia
atgagcctggcgcggcgcagccgcttcctgctgcccgcgttgctggcgctcggcccggcctgggccgcggcgcccccaccgaccccgttgccgcccgtgtccgccgaggcgccacgggtattgcgcctggatacccagcgctcgcggatcggcttcgaggtgcgcacccgattcggccagcgcatcgaaggcgtgttcccgcacttcgaggggcgtatcgagatcctgtccgacggccgtcaccaggtgcacctgaagatgttcacccgctcggtggagatccccggcaaggcgcgctataccggctggatgcgcggcgaggagttcttcgatgccgggcgccatccggtggtcgagttcgactcgctgccctactggccggagaccgtggagcagggcggcgccatcaacggccggctgaccctgcgcggcatcagccaccccgagtcattgcaggtcgagaaggcggagtgcgcccgacccggctatgattgcgacgtcgtcagccgcggtaccgtgcagcgaggccggtatggaatggacagctggcagctagccttgagtgaccgagtgaccttcgtattgcgtgcgcgcctgagcgaggcgccgaaaccgtga

SEQ ID NO: 494446 - DNA, 2058 bp, Stenotrophomonas maltophilia
gtgaacctcctgctgcgcgtcctggcgctggcaaccgtgttgctgggcagcggttgtgcatcgctctcgcatgccgagcgtgaccgtgccgaagcgattgccgtgcaggcgcgctcgaccgacgtcgactgccagcgcgccgaccgctgcgcgcaggactcgccgttgcgtgcgctggcgggccgggcgttcaccgaatccaccccggaacagccacgccactacgccaccctgctcgacgagggcgagggcgccctggtcgcgcgcctgaacctgctgcgcagcgccacccgcagcatcgacctgcagacctacatcttcgacaaggacgacagtgcccggctggtcatcgacgagctgctggccgcgtcgcggcgcggggtgaaggtgcgggtgctgatcgaccagctctcggcaatctccgacctgcagatcctcggcgccctgtccggcgcgcaccagaacttccagctgcgggtctacaaccctaccttcggcaaggcccggctgaactacttcgactatgccggcagcgtgctgtgctgcttccgccgcttcaaccagcgcatgcacaacaagctgctggtgatcgacgatgcgatcggcgtggttggcggccgcaactaccaggacgactattacgactgggaccgcgagtacaacttccgcgaccgcgacgtgctgatcgccggcccggaggcgcgggcgatggcggccaacttcgatgccttctggcgcgccaggcgcagcgtgccggccgagcgcctgaacgatgtcggccgcaccctgctgcgcgagggcgtgccgaccctgccgccggccagcttccgccgccccgagcgggtggagcgggtcagtgccgaagccaatgacatggacttcgtcagccgttccttcgtcgataccgcgttgccggtggcctcggtgcgctatgtcgccgacctgccgcgcaagcaccggcgcgagaaggccgatgcgccgctggccggacagcacgtgaccgagccgcagctggatgcgctgatcgccggcgcgcagaaggaagtgatcctgcagacgccgtacctggtgctgtccaaaccggcgcagaagctgttccgcgagctgcgcaagcgaccgcagccgccgcgcgtggtggtgtccagcaacagcctggcggcgaccgacaacccgatcgtctatgcgctgtcgtacaagtacaagcggcgcaacatgcgcgaactgggcttcaacatcttcgaatacaagccgttcccgctggatgcaccggtcgattaccgcaacctgctgcccgacccgatcgccgcgccggaaggcgacgacgacggcgggcgcaacccgctgatcggcggcagtgctgccggcagcaatgccggcgaccgtcgcgatcgcgatgagcatccggcacccaccggcaagcaggggccggtgaaccatccgcgcaccggcagtgcctaccagaacgcgcgcgagcgccgccgtgcggccggcagcgaggtcgagacccgcctgctgcgcaccgagacccggccctcgttcctgggcagcaaggcggtcaacaagccgttgccggtcacccgcaagggtgcgcgcatgggcctgcatgccaagtcactggtggtcgatcgccgcatcggcgtggtcggtacccacaacttcgacccgcgcagcgagaactacaacaccgaaggcgcggtgatcatcgatgacccggccttcgccgagcagctggccgagagcatcctgcgcgacacccacccgcagaactcgtggacggtggcgccgcgggccaagccgccggtgctgtccgggctcaactacagcgtcggcaaggcctccgaagcactgccgatcctcgacttctggccgtggcgctatgccaccgactacgagttcaagcccggcccggactgcccgcagccgttgccccggcaggacccgggcttccaccgctgctatgtcgccgtgggtgatttccccgaggtcaatgtcggtccgaagtggctgctggtacgcatgctgaccgcattcggcgccggcctcgttcccatcctctga

SEQ ID NO: 494447 - DNA, 435 bp, Stenotrophomonas maltophilia
atgacccaggtgttccgcgaagccgtttccctcgagcagctcaacacgctcagccgcaacaccgcgatcgcgtcgctgggcatcgtcttcagcgcggccggtgacgactggctgcaggccaccatgccggtggacgagcgcacccgccagccctacggcatcctgcatggcggcgcgtcggtggtgctggccgagactctgggcagcagcgccggcaacctgtgcgtggatacggccaagcagatctgcgtggggctggaaatcaacgccaaccacgtgcgtgcggtgcgttcgggcacggtcaccggcaccgcccgcgcgctgcacgtgggccgcagcacccagctgtgggagatccgcatcgaggacgagcagggccggttggtgtgcatctcgcggctgaccctggcggtggtggcggccggccacggctga

SEQ ID NO: 494448 - DNA, 819 bp, Stenotrophomonas maltophilia
atgacggccctccggtatcgtgcgcggatgacttcccccactccggccccccgcggcggcgtggcgcgtgtgtgccgttacctgtaccgcgtaccgctgctgttggtccacatcatcgtgttcctgccgctcatcctgatcggcatgcttcggccgtggggcgaactgcgcgtgggcgaggcgaccctgggggccaaagtggtcaactggtggcagggggggctgatgtggatcttcggcttccgcctggtgcagatcggcaggccgctgcccggcgccgtgctgttcgtcgccaaccacgtcagctgggtcgacatctgcatcctgcacagccagcgcatgatgggcttcgtcgccaagcgcgagatcgccagctggccgctggtcgggtggctggccgcgcgcgggcagaccatcttccaccagcgcggcaacaccgaatcgctcggtggcgtgatgcaggtgatggccgatcgcctgcgcgaaggcaaggcagtgggcgtgttccccgaagggcgtacccgcggtggccacgaagtgggcccgttccatgcccgcatcttccaggcggcggttgagaccggcgtgccggtgcagccggtggctctggtgtacgggctcaagggcgacgcgcagaccattgtcgcgttcggccccggcgagagtttcttcgccaatttcctgcgcctgctcggtgagccggcgcggcgtgcggaagtgcatttcctggcaccgatcggtgcgcaggacctggaaggccgtcggcgcatcgcggagacgtcgcgcgcgcgcatcgtggcggccatgagcacgcagtga

SEQ ID NO: 494449 - DNA, 1035 bp, Stenotrophomonas maltophilia
gtggccctgatcccgccacccgtcctggacgccggcacgccgacgctgcacgcggctgactaccagccaccgcgctggctgcgcaatccgcacctgcagtcgatgctcagctccagccgcatgcgcctgcagcgcggcctgctgctgctggccgcgaccggcgcgatcagcgaagaactgatcctcgacggcggcgacggcgtgcgcctgcagggctggcacagccatgtcgaaggccgcgaacccaagggcatggccctgctgctgcacggctgggaaggcagtgccgaatccagctacatgcgcatggcggccgcgcgcatgctcgaacagggcttcgacgtggtgcggctgaatttccgcgaccacggcaatacccatcacctcaaccccggcatcttccactccaacctgatcgacgaagtggtgcatgccgcaggcgatatcgcccagcgctggccgcagctgccgctggtggccgccggctactcgctgggcggcaacttcgtgctgcgcctggccctgcgtgcgccggcggccggcgtgccgctgctgcgcgtcgcctcggtatgcccggtgctggacccggcgctgaccatggagagcatcgagaacggcccggcaatgtacgactggtacttccggcgcaagtgggccggttcgttgcggcgcaagcgcgacctgttccccgaactgagcgactgcgacgaccgcgtgctgaagctggacatccgtgcgttgaccgcctggctggtcgagcgccacaccagtttcggctcgttgcaggcctatttcgacggctactcgattgccggcgaccgcctgtcctcgctgcaggtgccggccgacatcctgatggcgcaggatgacccggtgatcccgtacgcgaccttcagcgactggcagctgccgcgccaggcgcacctggaaaccgcctgctggggcggccactgtggcttcctggaaaactggcgcggtgacggcttctccgagcgctgggtggcgcagcgcctgcagcgcgtgctgcaaggctga

SEQ ID NO: 494450 - DNA, 2070 bp, Stenotrophomonas maltophilia
atgcaagaccagatcatccaagcgttgcgccagaacgaggccgaccaggccgtgcagctggcccaggcgtggacccgtgatgaacccggccaggccgaggcccaccgctggctggcgcttgcgctgcagcagcagggcaaggccgaggacgcgatggaggccctgcagcaggcgctgcagctggccccggacaatgcccagctgcacctgcagcacgccggcctgctgctggccctgcgccagttcgacggcgctggcgaagcactgacgcgcaccaccgggctggacccgaacgccttcgctgcctacctgatgcaggcccacctggcgatcggccgcaacgatttcgatgaagcgcagcgcctgtccaccctggcctcgcgtgtcgaaccggaccacccggaactgctgaccatcgacggcatgatcgcgctgcgccgcgatgatgccgatcgcgcgctgacgctgctgtcggccgccaaccaggcccagcccaacgacattcgcgtgctctacgcactgggcttcgcctacctgggcaagaacatgctggccttcgccgagcaggcgttccgccgcgtgctggaactgaacccgaccatcgcctcgctgcatggcctggtggtgcagctggccatgcgccagggcaacctggacgctgccgccgaagcgatgcagatcgcgctgcagcagcagggcctggatacgccatcgatgcgccgcctggccggcgaactggcactgcgcggcggccagccgctgcaggcgctggagcacctgctgccgttgctggaatcgctgcctgacgaccgcgacgtactgcagttgctgctgatgtcctggcagcgcctgggccgcgaagacgaggcccgcgcacgcctggatgccgccctggagcagcacccgcagctgcacgacctgtggctggcacgcctggcggtggaagaggtcggcagtgccaccgccgccgccacggtcgagcgctggatggacgcgatgccgggccacctgccggcgctggaagcgcgcctgcgcctgcacgacatggtgggcgaacacgcccaggccgaagcgatcgccgagcgcatcgtcaacctcgaaccgggccgcgtcagcggcgaaacccgcctggtcgaaggcctgctgcagcgcgatccggccgccgcggtcgcccgcgtgcaggcgctgatcgacatggcaccggaaggccaccgcgccgacctgcgcacctggctgggtgagatccaggatcgcgccgggcagcacgaagacgcgctgcagacctggctggcactgcaggccgaccaggcaccgcagcgcctgccgctgccgccgcaggccaaggcgccgccgagctggccggacaagggcgagatcgacggtgatgccacttccgcgccgatcttcctgtggggcgcgccgggttcgggcgtggagcgcgtggcgaccggcctggccgccgccagcccggtgctgcgcagcgaccgctatacctccaacgcacccgacgacgcgttccagaactaccacacgctgcaggaccttgcctcgggcgtgctgaccccggagcggctggtgcagcgctggcgcgaacagctgccgtcgcgcggcgtgcaggacgacgcgatcatcgactggctgctgtggtgggacaacgcgctgctgtgggcgctgcgcccgcagctgccgcagggccgcctgctggtggtgctgcgcgatccgcgcgacatgctgctggactgggtggcctacggtgccgccgcaccgctggcaatgacctcgctggccgaagccagcgaatggctggcgcgcgcgctggcccaggtcgccgccctgcacgaggacgatctgtacccgcaggtgctgctgcgcatcgaccagatcggcaacgatccgcaggcgatggccgaactgctgggccgcctgttcgagcggccgatgccgccagccgcgcaactgggtgcgccgcgcttcccgccgggccattggcgcaactaccgcgacgtgatgagcgccgccttcgccaagctcaccccgatcgcggtgcgcctgggttatccggaagagtga

SEQ ID NO: 494451 - DNA, 612 bp, Stenotrophomonas maltophilia
atgcaactgagcagccacagcctgaccaacggtgcaccgatcgaccgcgaattcgccgccggcgatgccgcgggcttcgcaccggaccgcaatccgcacctggcctggagcgatgtgccggagggcacccgttcgttcctgctggtgtgtgtcgatccggacgtgccgaccgtgccggagacggtcggccgcaccgacatgagcgtgccgcgcgaccagccgcgctgtgatttcgtgcattgggtcatggccgacattccggcctgggtgcgcgagatcgccgcaggcagctgcagcgacggcttcgtggtgaagggcaagtccaaaccggccggcccggccggcagccgccagggcctgaacgacttcaccggctggttcgcaggcaatccggacatggccggtgactacctgggctatgacggcccgtacccgccgttcaacgacgaacgcctgcaccactacttcttccgcgtgttcgcgctggacgtggcattgctgcagctgccggcacgcttcaccgccgccgacgcctaccgcgccatgcacggccacgtgctcgccgaagcggcactgcacggcacctacacgttgaacccggcgctgggctga

SEQ ID NO: 494452 - DNA, 459 bp, Stenotrophomonas maltophilia
atggagcacgtccccgccttcaccattgtcgcgctgctggccatgtctacggctgcggctgctgccagcacgcccaccaccgggcagctcgaggcacatccgtggcaactggcgcgcgccaccgacgcgcagggccggcgcattgacgcgttgttcgtgcgtggtcgaccgccctacacgctgcgcttccagcccggctacatgagccagttgaacctgtgcaaccagtcaagcagcacctatcacctgcaaggtgaccggctggtcctggagggcggcatcatcaccacagccgcgtgcatccggcccgaggtggccgaacaggaacgtgtcgccggcacgctggtgaatgcacgcgcagagctgacgcttgcgctggatgaacgtggccgcctgctgctgcgcaatgcgcacggcgatgtgctggtgttcgcgccggtacccggtacggacgaatga

SEQ ID NO: 494453 - DNA, 825 bp, Stenotrophomonas maltophilia
atgaaccgcaagctcaccctgctcctcccgctggccctgatggccgcctgcagccagaccccggccccggccggcaccggcggcgacgacgtggccccggccgcggccaaggcagcagaccagcagacgctggcgcacctggatgcgcagcgcctgcagagccagcactggctgctgcagcaggccaccggcgccgacggcaagcgcatcgacgcgctgttcgcccgcgaagacaagccggtcaccctggacttcgcagatggccgactgtcggtcagcaacacctgcaaccgcatgggcggcggctacaccctggccgacggcaagctgacggtcagcgcgatggcctcgaccatgatggcctgcaccgacaaggcgctgatggcgctggacgaagccgtgtcgagccgcctgcagggcgagctgaaggccgagcaggatgccgatggcaagctgacgctgaccaacgccaagggcgacgtgctggtgttcaacccggagccgaccgctgaaacccgctacggcggcgccggcgaaaccgtgttcctggaagtggccgccaagacgcagaagtgctcgcacccgctgatcccggactaccagtgcctgcaggtgcgcgaagtgaagttcgacgacaagggcctgaagcagggtgagccgggcaagttcgagaacttctacggcaccatcgagggctacacccacgaagacggcgtgcgcaacgtggtgcgcgtgaagcgctacgaagtgaagaacccgccggccgatgcgccgtcgcaggcgtacgtgctggacatggtggtcgagtcggccatcgagaagtga

SEQ ID NO: 494454 - DNA, 795 bp, Stenotrophomonas maltophilia
atgtccgacctgctctccgccctgctgctgggcatcctcgaaggcttgaccgaattcctgccgatctccagcaccggccacctgctcatcgcccagcactggctgggtgcccgctcggacttcttcaacatcgtcatccaggccggcgcgatcgtggccgtggtgctggtgttccgccagcgcctgctgcagctggccaccggcttcaaccagcgcgagaaccgtgagtacgtgttcaagctgggcgccgccttcctggtcaccgccgtggtcggcctggtggtgcgcaaggccggctggtcgctgccggagacggtcagcccggtggcctgggcattgatcatcggtggtgtctggatgctgctggtggaggcctacaccgcgcgcctgcccgaccgcgaccaggtgacctggacggtggcgatcggcgtgggcctggcacaggtcgtggccggcgtgttccccggcacctcgcgctcggcctcggcgatcttcctggccatgctgctgggcctgagccgccgcgccgccgccgccgagttcgtgttcctggtcggcattcccaccatgttcgccgccagcgcctacaccttcctggaaatggccaaggccgggcagctgggcagcgaggactgggccgacgtgggcgtggccttccttgccgcggccatcaccggcttcgtcgtagtgaagtggctgatgggctacatcaagtcgcacaggttcaccgccttcgcgatctaccgcatcgcactgggcgcggcgctgctgctgtggttgccctccggcagctga

SEQ ID NO: 494455 - DNA, 1410 bp, Stenotrophomonas maltophilia
atgtccgtggaaaacgttgagaagctgatcaaggacaaccagatcgagttcgtcgatctgcgtttcgtggatatgcgtggcgtcgagcagcacgtcaccttcccggtcagcattgtcgaaccgtcgctgttcgaagaaggcaagatgttcgacggcagctcgatcgccggctggaagggcatcaacgaatcggacatggtcctgctgcccgacaccaccagcgcctacgtcgacccgttctacgcagatccgaccatcgtgatcagctgcgacatcctcgatccggccaccatgcagccgtacggccgctgcccgcgcggcatcgccaagcgcgccgaggcctacctgaagtcctccggcatcgccgaaaccgcgttcttcggcccggagccggagttcttcatcttcgactcggtccgtttcgccaatgaaatgggcaacaccttcttcaaggtcgattccgaagaagccgcctggaacagcggcgccaagtacgacggcgccaacagcggctaccgcccgggcgtgaagggcggctacttccccgtgccgccgaccgacaccctgcacgacctgcgcgccgagatgtgcaagaccctggaacaggtcggcatcgaagtggaagtgcagcaccacgaagtggccaccgccggacagtgcgagatcggcaccaagttcagcaccctggtgcagaaggccgatgaactgctgcgcatgaagtacgtgatcaagaacgtcgcgcaccgcaacggcaagaccgtcaccttcatgcccaagccgatcgtgggcgacaacggcagcggcatgcacgtgcaccagtcgctgtccaagggcggcaccaacctgttctccggtgacggctacggtggcctgagccagctggcgctgtggtatatcggcggcatcttcaagcacgccaaggccatcaatgccttcgccaactcgggcaccaacagctacaagcgcctggtgccgggcttcgaggcgccggtgatgctggcctactcggcccgcaaccgttcggcgtcgtgccgcattccgtgggtgtccaacccgaaggcgcgccgcatcgaaatgcgcttcccggacccgatccagtccggctacctgaccttcaccgcactgatgatggccggcctggacggcatcaagaaccagatcgacccgggtgcaccgagcgacaaggacctgtacgacctgccgccggaggaagagaagctgatcccgcaggtctgctcctcgctggaccaggcgctggaagcgctggacaaggaccgcgagttcctgaaggccggcggcgtgatgagcgatgacttcattgacggctacatcgcgctgaagatgcaggaagtgaccaagttccgcgcggccacccacccgctggaataccagctgtactacgccagctga

SEQ ID NO: 494456 - DNA, 339 bp, Stenotrophomonas maltophilia
atgaaactgatctccgccatcatccgaccgttcaagctcgacgaggtccgcgaggccctgtccgatgcaggcgtgtcgggcatcaccgtgaccgaagtgaaaggtttcggtcgccagaagggccacaccgagctgtatcgcggcgccgagtacgtcgtcgatttcctgcccaagatcaagatcgaaacggtggtcaccgacgagcgtgccgacgcggtgatcgaagcgatccagtcgtcggcaggcaccggcaagatcggtgacggcaagattttcgtcaccgccgtcgaacaggtcatccgcatccgcaccggcgaaatcggtgccgacgcgctgtaa

SEQ ID NO: 494457 - DNA, 1431 bp, Stenotrophomonas maltophilia
atgaagatgcgccttctcaccgggtggcaagcccggttccatctggtgtgcctgttgatgctgctcagcgcactggccgccggtgcctggccgggcagcgcccatgcccaggcccaggtatcgccgttgccgagcgaaagcgtggcggtcgagccgctgcacgatgcggccgccaccgccgcggcgccggccgtggccgaagcggccgccgcctatgatcgtggcgacgtcgcctggatgctcacctcgaccctgctggtgctgttgatggtggtaccgggcctggccctgttctacggcggcctggtgcgttcgaagaatgtgctgtcggtgctcagccagatcctggtggtgttctcgctggtgctgctgctgtgggtggcctatggctacagcgcggtgttcagcgccggcaatccgttcttcggctcgttcaccgaattcgccttcctcaagggcttcaccccggagtcggtgggcaacacgccgatcaagggcctgccggactatctgttcgtcgcgttccagtcgacctttgccggcatcaccaccgcgctgatcgtcggtgccttcgccgagcgcatcaagttccgcgcggtgctgctgttctcggcgctgtggttcaccctcagctacatcccgatggcacatatcgtctggggtggcggctacctgggtgagctgggtgccatcgacttcgccggcggtaccgtggtccacatcaacgcgggcgtcgccggcctggtcggcgcgtggttcgtcggtaagcgcctgggctatggccagaccgcgctgaagccgcacaatgtgccgtttacctacatcggcgcgatgctgctgtgggtgggctggttcggcttcaacgccggctcggcagcagcggccgacaccgtggcctcgctggccttcctcaacaccgtgctggccaccgccgctgccgtgcttggctggaccctggtggaggcgatcggcaagggcaagccgtcggcgctgggcgctgcttcgggtgcggtggccggtctggtcggcatcaccccggcctgtggcaccgtcgggccgcttggcgcgatcgtgatcggttttgtcgccggcgtggtctgcgtgtggggcgtgaccggcctgaagcgcctgttgaaggtggacgacaccgccgacgtgttcggtgtgcatggtgtcggcggcatcgtcggcgcgatcctcaccggcgtgttcagtgcgcagtcgctgggcggcacaaaggccgatctggatatcgcccatcaggtctgggtgcaggtggtcagcgtcggcctgaccgtggtgtggtcggcggtggtgaccgcggtcatcctgctggtggtcaaggtcgtggtcggcctgcgcgtgaccgaagaagcagagcgcaccggcctggatgtgacttcgcacggcgagtccgcctacgaggcctga

SEQ ID NO: 494458 - DNA, 378 bp, Stenotrophomonas maltophilia
gtgacgacggcgctggtgggcggtgtggcgggacagggcgctggccaggccgcgtccaatgcactggcgccctatgccgctcacttcatcggcagcacgcttgacccgaaccacggcagcgaccccaatgcgactctgcaactgctgtcgcatgcggtgttgggtgcgctgctggcggaagccgatggtggcagtgcgggaaccggagcggtgtccgcggccggcggcgagttggccgcgaaggtactgactaatacattgaccggcggagacccctccaagctgagcccggagcagaaagagatggtgctggcgttgtcgcaggcagttggcgcactggcgggcgggctgtcggagcaaaagaaggtcacgaaatga

SEQ ID NO: 494459 - DNA, 822 bp, Stenotrophomonas maltophilia
atgacagctccccagttctccagcgatccggacgaagcgaagaaccacggctgcagtcatggttacaatccgtccatgatcagcccccgccttctggcttccacactgctggccctggccctttcggcctgcaccgccaccgcgcctgtgcagcacaacccgctcgccacctgggtcccatcacccaaccagaacgcgcgcaccccggtcatcatcgtcatccaccacaccgagcagaaatcggtgcagcagagcctgcatacgttgcgcacggccaacagcggtgggccggtcagtgcgcactacctgatcggcgccgatggccatcgttaccagctggtggctgatgagcgccgtgcctggcacgccggcgccgggcgctggggcaccatcaccgatctcaattcggcttcgatcggtatcgagctcgacaacgatggccgcagcccgttcagtgcggcacagatcgaatcgctgatcgtgctgctgcgcgatctcaccacgcgcctgaacatcccgccgcgccaggtgatcggccatgccgacctggcgccgacgcgcaagcaggatccgagccgcttcttcccatggcagcagttggccgaggccggcttcggcgtgtggccgcgcgccgccgacggcgcggcaccggaaggattcgacgcgtggaatgcgctggcccgcttcggttatccgctcgacaaccgcgaagccaccgtcgccgccttccaccgccgtttccgtggccgcgacgacctgccgaagacgctggatgccgaggacgcgcgcatcctgcactcgctgctgctgcagacgccgtga

SEQ ID NO: 494460 - DNA, 1167 bp, Stenotrophomonas maltophilia
atgatcgattccgctaccttcttcaagcgcaagcactggaccctgttggcagcggcggtgctcgccggttgcgccaccaccgctccccgcacgggttccgaagcgcccacgccgacctcaccgccggcggccacctacgccaaggtcgactggaaagcgctgccagcggtctcggacagcgatctgcaggccggcttcgttgcctggcgcagcagctgcgcccgcctgaaaaacgacgctgtctgggccaagccctgcgccaccgccgcagcggtgtcagacaagaacccggccgcgatccgccagttcctgcagcgcgacctcgatgcctatgcgctgcgtgccggtggccatcaggccgacggattgatcaccggctactacgagccgatctaccccggcagccttacccgcaccgacaaggcgacggtgccggtgtacggcacgccggatgatctggtggtggtgcagctggacagcctctacccggaactgaagggcaagcgcctgcgcgggcgcgtcgaaggcaaggtgctcaagccctatgacgacgccggtaccatcgcggccaagggcgccaaggcgccggtgctggcctggctgaccgatccgatggacctgcagctgctgcagatccaggggtccggccgcgtgcgcctggccgatggcaagcaggtacggctggcctatgcggaacagaacggccacccctaccgtgccatcggtcgttggctggtggaccagggccagctgaagaaggaagacgtcaccatggatgcgatccgcgcctgggcccgggccaatcccgcgcgcgtgccggaactgctgtgcagcaaccccagctatgtgttcttcgtgcgcaatccggacagcccggaaggcccgcgtggttcactgaacgtgccgctcaccgcgggctacagcgtggcggtggaccgtaccgtggtgccgctgggcagcctgctgtggctgtcgaccacgcgccccgatggcacgcccgtggtacgcccggtggctgcgcaggacaccggcggcgccatcgccggcgaggtgcgcgccgacctgtactggggcagtggcgatgccgccggcaagctggccggcgacatgaagcagaagggcaacatctggatgctgtggccgaagggcgtgcccctgccgaactga

SEQ ID NO: 494461 - DNA, 315 bp, Stenotrophomonas maltophilia
atgacctacgcaaagcacaacgcaaaacccggcgcgaaatccgccgcaaagaagtactacaagcactgggccgaatcgggcctgggcaagggcaacgtgctgatggaagcgcgcggcgacaagatcgtgcggcaggtggaaatctacggcaccaagatggtctgggccgacgagcacgcccacagcgatgaccgtttcctgctggccgaccagccggtgtcgttcctggatttcgacgaggacgacgaaatctccgcgcgtgaattcgaagccgcctggaagaaggcacgggaagccaccggctacccggtgtaa

SEQ ID NO: 494462 - DNA, 2046 bp, Stenotrophomonas maltophilia
atgaagacctccacgctggtcgccgccctggcggccgcaccgttcgcccctgaagccttcgcgcagtcggccgacgccgcgctcaccctcggcaaggtgcaggtgcaccagcacggcgaaggccagctcagtgcgcaccaggtgctgacttcggtggacgtgctgggtgcagaccagatcgaaaaccgcaacgtctcgcacagctgggaactgctcgggcagatgcccggcatccagctcaccgaaacccggcagggcgccgaatcgggcaaggtcagcttccgcgccttcaacggcgagggttacctcaatgccatcaagacgctgatcgatggcatccccagcaacgtcaacagcggcaaccagcgcttcatcgacatgctgttcccgctggacatcagctacatcgaagtagtgcgtggtaccaacgatccgcgctatggcctgcacaacatcggcggcaacgtgaacttcggtacgcgccagggcggcagctacaccgatgtgcgcctggcctacggcagctacaacacccgtgatgcgcagctggcgattggccgcgaagccaatggcttcgcgcagaactactttgtcggcacccaggtcagcgatggttatcgcgaccacgacacctccaggaagtactcgctgggcggcaagtggttcttcggcacgctggacgaagggctgcgcgtgggcctgaccgcgcgcgcctatcaccatgaagccgacgaacccggcttcatgaccgccgaggaactgcgcacgcgccgccgtggcagcgagctgcgcaacggcaacgatggcgatgaccgcgacatgcggcagatcgccgcgcacgtcgacctgaagctgtccgacgcactcagcttcggcacgcggctctactacaaccgctatgaagacgaccgccgcgtgaccttcagcgacctgcccaccggcaacctgccgcgtcagcgccgcgtgtgggatgaacgccagactggcctgctcagcacgctgacctggcaggccagccccacgcttaccgtcgaaggcggcctgaactacgagcagcaggacaacggctatatccgcgagcgctacgcctacgctgaaccgaccgattacagccagccgccggcgcgcgtgcagaacgacgaccgccacagcttcgacaactggggcgcctacgtgcaggccatctaccagcccgtcgaggcctggaagatcgtgccggcctaccgcgtcgaccgcttcggtggccgcacgcacctgatgaacggcatcaccgctcggctgcaggattacggcagcatcggccagcccaagctgagcgtcatccacagcctgggccagaccacccacgtctatgccaactggggccgcactttccaggtgctgaccggctccaccgcaccggcctatctcatcccggggcaggcaccgatgcagccgtccaccaatacgggcatggagctgggcctgaagttccagccgttccagggcgcccaggcgcgcctggcggtgtggcagcaggacgcggaaaacgaggtatccaacatgccggccaccggcacgacggtcaccctgggcaagacccgccggcgcggcgtggatgcgcagttgagcctgcaactgggcgacgactggacgatatgggcctcgcacgcctaccaggaagcgaagatcacccgcgacgaccgcgatgccggcatttccctgcacggccgcgaagtggccgccaccccgcgccacatcagcaatctgggtgtggactaccgcgccagcgacgcgctgcgcctcggcctgcaggcacgcgcgcagggcgactattaccttgaggagcgcaacgtggccggcaagttcggtggcttcgccgtgctcgacctcagtgctgcctatcagctcaccccgcgtttcagcgtggacctgcaactgaagaacgtcaccggccgcgagtacgcctacgcctggtacgacagcttcttctgggacagcgcccgccctatgttctcgccggcgccgggccgcagcgtattcgtcggcctcaacatgaagctgtag

SEQ ID NO: 494463 - DNA, 1062 bp, Stenotrophomonas maltophilia
atgtccgaccccgcaccctcgccgtccctcgatgccctgggcacgccgctggcctgggccgggcccgatggctgcattgccggctgcaacccggccttcgcccgctggctgggcgtcagcgcgcggcgcctgctgggtcggccgttggccgcactggaagtgcagggcgaggcgctggcccatttcctggcccgcgatgagcgcgacagcctgcgcctgaaccggctggcgctggcggtgcccggcgaggcgccgcgcttcgccgagggctggatgagccgccgcgacgatggtggctggctgctggaggcgcatccagtcgatgaattccccgggctggacccaacccaggcgctgcccagcgcgctcagcgcggcgctgaagggcctggcccacgagctgcgcaacccgctggccgggctgaagggcgcggcccagctgctggcccgccgcgcggcgcagcgcgatgccagcgaacgtgagctgatcgaactgatcggctcggagatcgagcgcctcaacggccttctcgaccagctgctgtcgccggccccggctgcgccgcatgcggaactgaacatccatgccgcgctcgagcgcgtgctgcgcctggccgagaacgaggccggctgggcggtgcgcctgcagcgcgactacgaccccagcattcccgaattccacggcgacgccgaccgcctcacgcaggcggtgtggaacctggtgcgcaacgcgatccaggccggcgccggcagcatcaccctgcgtacccgcgtggagcatggcgtgcgcatcgccgagcagttgcacacgttggccttgcgcctggaaatcgccgacgacggccgtggcgtgcccgaggagctggccgaacacctgttcctgccgctggtcagtggccgtgccgaaggcaccgggctgggcctggcactggcccagcaggtcgcgcgcgagcatcgcggcacgctcacctaccgctcgcgtccgggccataccgtgttcaccctgctgttgccgatcggcaacggcgccgctcctgccgaggaggccccgcgcgatgtctga

SEQ ID NO: 494464 - DNA, 1449 bp, Stenotrophomonas maltophilia
atgtctgagtcccccaccaccgcacagcgcatctgggtggtcgacgatgatcgtgcggtgcgcttcgtactgtgcaccgcgctgcgcgaggcggggtaccaggtcgttgatttcgacagtgccgctcccgccctgcaggcgttgagcgcgggcccgccaccggcgctgctgttcaccgatgtgcgcatgcccggcgacgatggcctggtactgctggacaagctcaaggccgcgttgccgcagctgccggtggtggtgatgtcggcctataccgatgtcgccagcaccgccggtgcgttccgcgggggcgcgcatgaattcctgtccaagccgttcgacctggacgatgccgtggcgctggcgcagcgggtgctgccagcggtggcgcccgcgctggccgctcccagccccgccgccgaaacgcccagcgaccagccgccgcaactggtgggtgatacgccgccgatgcgcgcgctgttccgcgccatcggtcgcctggcgcaggcaccgctggcggtgctgatcaccggcgagaccggcaccggcaaggagctggtggccaatgcgctgcaccgcgaatcgccgcgtgcgcagcgcccgttcgtcgcgctcaataccgccgcgatccctgccgaactgctggagagcgagttgttcggccacgaagctggcgccttcaccggtgcgcaacgccgccatgtcggccgcttcgagcaggccaacggcggcacgctgttcctggatgagatcggcgacatgccgttgccgctgcagacccgcctgctgcgtgtgctggcgcagggtgagttcttccgcgtcggtggccgcgagctgatccgcgtcgatgtgcgcgtggtggccgccacccaccaggatctggaaggcctggtcgcgcagggcaaattccgcgccgatctgctgcatcgcctggatgtggtgcgcctgcagttgccgccgctgcgcgagcgccgcgaggacatcgcgcaactggccagcacgttcctggccgccgccgcacgcaggctggatacgccgccgaagcgcctcaccgccgcggccctgcaggcgctgcgcgaacacgactggccgggcaacgtgcgcgaactggagaacgtgtgctggcggatggccgcgctggccgccgccgacaccatcggcgtggccgatgtcgataccgcgctgaaccgcgcgcgcggccgccgcaacagtgccagcgcagccgatccaggccaatgggaagcgctgctggccgaatgggcgcgccgtcagctggccgaaggcgtggaagggctgcacgcgcaggtgcgcgagcgggtcgaccatgccctgctggaggcagcgctgcagatcacccacggtcgccgcgccgaagccgctgcccgcctcggcctcggccgcaatacccttacccgcaagctgggcgccgggcgccgtcgcgggggccattga

SEQ ID NO: 494465 - DNA, 570 bp, Stenotrophomonas maltophilia
atgcgtctgtcctttgccatcctgccgttgtccgccgccgtgctgctgtctgcctgtggcagcgcgccgaagaaggccgagcccaccccgccgccgcccaccgtggtcagcgcagcgaagcagggcgaggccaatctgtcgccggcctcggccagcatcgtcagtggccgcatcgcactgatggtggagcccggcggtatccacatcaccggcctgatcggtggcctgcagccgttgcagcaagccggtttccacatccacgagcgtggcgactgcagcgcggtggatgccagcagcgccggcaaccacttcaaccccggtggcgccgcgcatggccgcgccggcaccggcaagcaccacctgggcgacatggacaacctgcgtgccgatgcccagggccgcgccaacgtcgatatccacctcaagggcgttacccttggcggaggcgccgccaccgatatcgccggacgtgcactggtcgtgcatgccaacgccgacgactatcgcagccagcccgccggcaatgccggcgtccgcatcgcctgtggcgtgatccgggtcgtccgctga

SEQ ID NO: 494466 - DNA, 627 bp, Stenotrophomonas maltophilia
atgcgtctgatccacacttcgctgtttgcggccatcgccgcgctgggcctggcggcctgtaaccagcagcccgccgcgccgcagactgagactccgccggccgcgccggctgacggcgccaccaccgagccggctgcaactcctgaaccggctgcggcaccggcggccgatgcttcggcaacggccgagctggcaccgacccagggcaacgagaccaagggcagcgtcaccttcaaggtggtcgacggcaagatccacgtgaccggccagatcactggcctgaagccgggcagcgagcacggcttccacatccacgagaagggcgactgcagcgccccggacggcatgagcgccggcggccacttcaacccgggcaagcaggatcacggcaacgtcgccaccgatccgcaccacggcggcgacatgcccaacatcaaggccgacgacaagggcgtggccaccatcgacggctcggtgtcgagcaatgtcaacatcggcaagggtgatgacttcgacatcatcggccgcggcctgatcgtccacgccgatgcggacgactacaagacccagccgaccggcaacgccggcgcacgcctggcgtgtgcggtgatccagaaggccccgtaa

SEQ ID NO: 494467 - DNA, 888 bp, Stenotrophomonas maltophilia
atgagcaaacccgaccccgcgatgaatgcccttggcgtgctggccctggaactggccggcggcgaaatcccccgccaggcggtgctcagcgctgaacaggccggtgaactggccgaacgcgtcggccgtgacctttccaagctggtgccgcaggtggccgagctggacctggtgttcgcggccgcccatttcgacccggccgaagtactgcgcccgggctggccgatccatcgccgcctggaagaactgcagatgcgtgccccgggccgcaaccagggcccgcgcctgctggccttcggcaccgatgccgcaggcgatgtgccgctgccgttccaggccgatgcgaccctggtggggggcggcctgcgcgtggtgccgttcctgctgaccggcagcgacgtggccaccaccaacgcggtggccaatgcgctggaagaaacactgctggccaacggcatggcgcatgccgataccgcgttgatggcacagaacagcttcggtgcccgcatcgaacacgcgcgctatttcaccgtgaacgacctggccgcgatgatgtcgatgcagtacgacaaccagggcttggcggcgctgtggccgctgatcgagaccgcgatcatggcgccgggcgaagacgagtggctcaatgccgcgcccgagccgctgctgcgctatacccatggcgaggcacgcatggcgctgttcgatccggccggttggtgcgcgtactacaaccacagcaagaacgattgcgaccgcctgcagggcatctacgagcagttcctgatgcgccagcggcagatggccgcggtgctggaagcgcacggcgtgccggtgctcttcgtgcactgcgaggccggccaggacgcgcgcgaactgctggcgcgctga

SEQ ID NO: 494468 - DNA, 1281 bp, Stenotrophomonas maltophilia
atgcccaacgctcgtcccgtcgccatcctcggtggcgtccgcattccgttctgccgccagaacaccgcgtattcggatgtcggcaacctcggcatgtcggtccgtacgctgggcgcgctggtcgaacgtttcggcctgcacggccagcagctgggcgaagtggcgatgggtgcggtgatcaagcactccagcgactggaacctgggccgtgaggccacgctgtcctccggcctgtcgccgctgaccccgggcatcaccctgcagcgcgcctgcggcacttcgctggacagcatcatcaccgtggccaacaagatcgcgctgggccagatcgaatcgggcatcggtggcggttctgacaccacctccgacgtgccgatcgtctacggcaagaagctgcgtgcacgcctgctggccgccaaccgcgccaagagcaccggcgacaagatccgcgccctcaccgccggcttcaagttctccgagctcaagcccgagttcccgggcgtggccgagccgcgcaccggcaagagcatgggcgaccactgcgaggacatggccaaggaatggaacatctcgcgcgactcgcaggatgagtgggcggtgtcctcgcacaagaagctggccgctgcctatgagcgcggtttcttcaacgacctgatcgcaccgttccgcggcgtcgagcgcgacaacatcctgcgtccggatacctcgctggaaaagctggccacgctgaagccggcgttcgacaaggtctccggccgcggcacgctgaccgccgccaattccaccccgctgaccgacggtgccgctgcggtactgctggccagcgaagagtgggcgcgcgcgcacggccatgagccgcaggcctacctgcgcgacgcgcatgtctctgcggtggacttcgtgcatggcgaaggcctgcttatggcgccgaccatcgcagtgccggagatgctcaagcgcaatggcctgaccctgcaggacttcgacatctacgagatccacgaagccttcgccgcgcaggtgctgtgcaccctgcgtgcgtgggagagcgaggattactgccgcaaccgcctggggctggacgcaccgctgggccgcatcgacccggacaagatcaacctgctgggttcgtcgctggccaccggtcatccgttcgccgccaccggcgcccgcgtcatcgccaccgccgccaagcagctggccgaacgcggcggtggtcgcgcgctggtgtcgatctgcaccgccggcggcatgggcgtggtggcgatcgtcgaacgctga

SEQ ID NO: 494469 - DNA, 1296 bp, Stenotrophomonas maltophilia
atgaaacccctgcaatccctggtcgtgctgttgctggccgtggccatcggcgtggtcgctgcgcaatggctcggcgccgatgacctgaaccgcttcggcgaagtgaccctgcgctacggcggctacgactaccacagcaacctgccgaaggtggcgctgctggcagtgatcgcggtgctggtgctatggctgctgtggagcctgatcgccgcaccgttccgcgcctggggccgctaccgccgcaaacagggccgggtgcgcctgatcgacggcctgcaggcctatgagcacggccagtggcagcgtgccgagaaactgctggacggtgccgccaaggatccggaagtgagcgcggtggcgctggccaacgccgtgcgcagcgcgcaggcacgtgccgacggcccggctggcgaggcgctgctgcagcgcctgggcgaaagtgatgccaccctgcaggcgctgctgcgcgccgaacagctgctggcgcgcgatctgccggtggatgcgatcaacgcattggacgtagcggcgatccagccgctgccgccacgcggcctgtggctgcgcaccgaggcactggcacaggccggccgcgcccacgaggcgtatggccagctgggtgcactgcgccagagcaaggtgctgccggccgaggccaatagtgaactggaagcacgcctggctgcgcaggcgctgctggaagcggccgacgtcaacgcgctggccgcgcagtgggaagccacgccgaaggcactgcgaccgactccggacgtggttggcgcctatgccagccgcgcggtggcgctggactgggacgagccggcgctgctggcgctggaacaggcgctggaccagcgctgggatgacgaactggtggcgctgtatggccgtctgccggccgagcgcctggctacccgccaggccaacctcgcacgttggcgcaacgtgcatgacggctcggccgcgttgcgcctggcgcagggccgcgtggccctggcccagcagcagtgggaggccgccgatgcgttcctgcacgaggccatcgccgcgggcgccggtgcaccggcgtgggaagcgctgggtgaactgttcgcccagcgtggcgaacacgcgctggccgcgcagtgcctggccaatgcgctgcgcctgcagcgcggcgaggacagcgtggcgctggtgcgcggcggcgagacgccactgcgtgccacggtggaagaacagccgctcgcggtgcagccgccggtgtatgacgccaacgaagagcgcgacgaattcggtaatccgcggttgccgtga

SEQ ID NO: 494470 - DNA, 978 bp, Stenotrophomonas maltophilia
atgaacgacactccgcccgtttccccgccccgtcgacccgtgcgctggctgctgccgctggccggtgtggtcgtgctaggcgtgggcggctatgccggctggtatgtctggcaacagcaacagaacgaacaggcagcgcaggcacagaccacggctgtccagctgaagggcctggaggccacgctggatgcgctgcgtcgtgaccagcgcgcgaccagccagcgcctgcaggacgcggccgccaccaaccgcgtgctgcgcgacgagatgctgggcctttcccagcgcagcgcattgctggaagagaacctggccaagctggccgacagcgccaaccagggccgccaggcggtacagcgcgatgaggccgaactgctgctgacccaggccgcgcagcgcctgaactacgccgacgatgtggaaggcgcacgccggttgtacgcccaggccgcgacggcactggccgaactgcccgacagtgatggcctgaacctgcgccaggcgctggtgcaggagcgcgaggcactggatgcgctcggcagcggcccccgcgtgcagtcgctgcagcgcctggatgctgtgggcagggcactgcagggcctgccttcgcagatcaccggcacgaccggcagcagcaccgccaaaccctggtggcaggcagctctggcgccgttcgtggacatcaccccgagccgccagaacggcccgctgaccgccgccgaacagcgcaatgccgacgacgcgctgcagctggaactgacattggcacgtgcggcaatcgagcgcggcgaccgcgcggggcgcaataccgcattggaccgcgtggagcactgggcacagcggcgctggccggattcaccagccctgcgcgcgcaacgtgctgaactgaaggccttgcgcgaactgccgctgcaggccaacgacgctgtccttggcagcaccctgcaacaactgcgcacccagaccgaccggaggtaa

SEQ ID NO: 494471 - DNA, 813 bp, Stenotrophomonas maltophilia
atgcaggcaatggccgaccatacgatacccactggcgccacccgttccggcgcgcgctggaccctgatctcgctgcgcccgcagggccagaatgtggcgctgcgccgcgccgttgctgggctgggcggggatgtcctggccctggcgccctggcgcctgcagcgcctgcatggcacgcccgtggtgcgccagctgcaacgcgcgctgaactgtgatcgggtggtgttcaccagcccggccgccgtgaccgcggccgccaccctgctgccgctggccgaggcgcagcgcagcccgtggctgaccgtcggcgaaggcaccgcgcgcgcattgcgggcacacggcatcaccgaggtgcatgcgccgcagcggatggacagtgaaggcctgctggcgctgccggtgctggctgacgtacagggcctgcgcatcggcctggtgaccgcgcccggcgggcgtggcctgattgccgcgcagctgcaggcggccggcgccacaatcgaacgtgccgacatctaccagcgtcgcctgctgcacctgccgccccgtgcgctggcccgattggcgcattcagcgcagccgtggatgctggcggtgagcagtggcgaagcgctgcagcatttctggcagcagcttccgccgcccttgcagcagcgcctgcaggcgcacgcgactgccgtggtggccagtgatcgcctcggcgaacaggcccgggcactgggcctgcagcatgtcgtgcgcgcggcaggccccaccagcgcgcagctggtggcggccgccgcacacgccacgctcaccgtcccggcagcgacctga

SEQ ID NO: 494472 - DNA, 468 bp, Stenotrophomonas maltophilia
atgtccgttgatgccctgacttcctcgttggccgccctgcaggacgtgctggactgcatgccggcggtgcgcgccatgcagatccagctcgacggctatgccgatggcgtgctgcgcatcaccgcgccgctggccgccaacgtcaacgacaagggcaacgccttcggcggcagcctggcctcggtgctgaccctgtccggctgggcgctggtcagcctgcgcctgcgcctggccggccacgatgccgaggtctacgtggccgacagcaacctgcgctacctggccccggtctacgaagacctgcacgcccacgccgaagcggccgaggccaccggctgggacgcattcctgaacaccttccggcaacgccgcaaggcccgcatcagcatcatcgccacccagcccggcgccgatggcaagcccgccgccgaattcagcggtcgcttcgttgccttcgccaaagggtag

SEQ ID NO: 494473 - DNA, 426 bp, Stenotrophomonas maltophilia
atgcgccgcctgatccagttcctgatctgttccctgctgctggccagtgccgtggcctcggccgacgacctcagccgcaagcagcgcaagctgctggaagagacccagatcgcctacggggcgaccatccgctggggcagcatggacgatgccatcggctacctcgaccccaagctgcgcaaggaaaagccgcccaccgagttcgagctcaaccgttacgcgcagctgcgcgtgtcgtcctaccgcgagcgcagcagtgcctcactggacgggggactggtcgagcgccgggtcgaaatcggggtgatcaaccagaacacccaggccgagcgcacggtggtcgtggtcgagcgctggcgctgggacccggaagccaagcgctggtggcagaccgccggcctgccggacctgtggaaggggcagtga

SEQ ID NO: 494474 - DNA, 396 bp, Stenotrophomonas maltophilia
atgctgtccgcggccctggtcggcctgaccgtggccatcatcgtcaccgagatccgccgcctgttccggggcttcaagggcatcaagcccgccgaactgacccagctgatcaacgcgggcggcacggtggtagtcgacctctcggccagcggtgacttcgagaagggccacattgccggcagccgcaacgcccaggccagtgccttcggcccggaccacaagctggtggccaacgccaagcagtcgccggtggtgctggtgtgccgcagcggcaacgcctcggaaaccgccgccaaggcgctgaagaaggccggcttcgagaaggtctacgtgctcgacggcggcattcccgcctggcagcaggccgagctgccgctggtcaagggccgcaactga

SEQ ID NO: 494475 - DNA, 519 bp, Stenotrophomonas maltophilia
atgtccgaagagatcaccaacggcgctgctgcgccggtcgatgccgccaccggccccgctttcaccgtcgagaagatctacgtcaaggacgtctccttcgagtcgccgaacgccccgaccatcttcaatgaccaggtgcagccggagctgcagctgaacctgaaccagcaggtgcagcgcctgggtgagaacgccttcgaagtcgtgctggccgtgaccctgacctgccaggccggtgagcgcaccgcctacgtggccgaagtgaagcaggccggcgtgttcggcctggtcggcctggacccgcagtcgatcgacgtgctgctcggcacccagtgcccgaacatcctgttcccgtacgtgcgccagctgatcagcgacctgatccaggccggcggcttcccgccgttcttcctgcagccgatcaacttcgaaggcctgtacgcagaaaccctgcgccagcgccaggagcagggcgacgcaccgtcgctggctgactccgagccggctggcaacgcctga

SEQ ID NO: 494476 - DNA, 1026 bp, Stenotrophomonas maltophilia
atgagcactcccgctgacaagatcgccgtgctgggcgccggttcctggggaaccgcgctggccagcctgctcgcacggcacggtcatccgaccgtgctgtgggggcgcgacgctgccgtggtcgaggccatcgaccagcgccacgagaacccgcgctacctgccgggcatcccgctgccggacagcctgcgtgccaccaccgacctggcgtcggcggtggaaggcgcggcctggatcctggtggtgaccccgtcgcatgccttcggtgaaaccgtgcgtgcgctggcgccgctgcgtccggccggtgccggcgtggcctgggccaccaagggcttcgaacccggttcgggccgtttcctgcatgaagtggcgcgcgaagtgctgggcgaggacgtgcctctggccgtcgtcaccgggccgtcgttcgccaaggaagtaacccagggcctgcccaccgcgatcaccgtgcacggcgacgtgcccgagttcgcgcagacggtggccgaggcgatgcatggcccggcgttccgcgcctacaccggcgacgacatggtcggtgccgagctgggcggtgcgatgaagaacgtgctggcggtggccaccggcgtggccgatggcatgcagctgggcctcaacgcccgtgccggcctgatcacccgcggtctcaatgaaatgctgcgcctggctgcggcgatcggcgccaagccggaaacgctgatgggcctggccggcctgggcgatctggtgctgacctgcaccggcgatctgtcgcgcaaccgtcgcctgggcctggccctgggccgtggccagacgctgcaggatgccgtgcgcgaaatcggccaggtggtcgagtcggtgcagaccgccgacgaagtgatgcgacaggcacgccgccatggcatcgacctgccgatctccgacggcgtgcgtgccgtgctgcacggcgagcagaccccggaagaaggcctgcgcgcactgctggcgcgggaacagaaaccggaatacccggacacgctgttcaagtga

SEQ ID NO: 494477 - DNA, 477 bp, Stenotrophomonas maltophilia
atgcgccgtacacgactcgccatgatcttctgcagtgccctgctgctggcatcgccggcaactgcccacgatgcagaaggcgcgaagcctgcacagcctctcccgggcgcagccctgcccgcaccgctggagcgcgtactacgcgattacgagcgggcgtggcgctcggctgatgccagggcattggctgcgctgtttgccgaggatggttttgtactgcagagcaaccagccgccggtgcgcgggcgtactgcgatcgaggccgcgtatgccggccagggcggcagtccgttgcggctgcgggcgttggctcactcggtggagggcaacacgggctacatcattggtgcgtatcgctacggcagcaacgagggggacaccggcaagttcacgctgaccctgaagcgcgtgggcgacgggccgtggttgatcttctcggacatggacaacaccagcgcgccgccacgggcgcggtga

SEQ ID NO: 494478 - DNA, 666 bp, Stenotrophomonas maltophilia
atgaagattcgaatcacagggatggcactgacggtcgcattactggccgcctgcgggcaggcaccggcacccgatgcagcaccagccgcaccagcaccggccacagaagcacctgcggccacggcaacggtgggcgagaaggcgccatccatcgaagatggcgtggatccctcggtgtgggacaacgaaggcgaaccggaagacccgagtgccggcggcgaactcacctgcacggacaacccgctggcgacgcatttcttcaccctggtgggcggcaataccgtggacgactgcggccgcaaggacccgaaggtgctggcggccttcaacacccttatgaaggacacctcggcagccgaatccagcgacaaggagattccctcgctgcgccagcggctgttgagcggccccagcgggcccggtgagctgctggtgctgcagggcgagccgtggtggttctataccgcctgccaggcccacgactgcccgggcaccgcattggcgatgctgtattcgccgacggaggcgaagatggtcggccgtcttaccgcgcgctgtcgtgtgtggtggctgggtgagccgacggcggaacaacgtgcgcagatcgaacagcgccagccactgcaggatgccgcgttgaaggaagacagcgcactctgcgagtga

SEQ ID NO: 494479 - DNA, 375 bp, Stenotrophomonas maltophilia
atgagcacacccgaatcctcccgactacgcacgcagtacgtacccgccaacgcggacgcgccttcggaagcggcgcacgcgcacgatcctctcggtttcatcgccacgctcgaccgcattggcaagggcgccgccgccgacggtcagccctggccggaacgtcatcagatgcccggccgccgcatggccttggccgacgcggactgcgcattgaccggcctgcgcgtggcgctggaaatgctgctggctgccgagcgcgtgcgccagaacggacccgacgaggagtacgtgggcgaccgggtgatggagggcctgatgatggtcagtctgtcgctgaccgcacaggtcagcgcacgcatgcgcccggaagggtga

SEQ ID NO: 494480 - DNA, 291 bp, Stenotrophomonas maltophilia
atgtcgcgctactatgtacacaatggctacagtggctggtcctacggtacgccaagcaatccccagctgatctcgccggaggatgctgccaagctgatgaagtccgctgggctcagttccatgcaggtttccaccaccctgccacccgcccagtatgccgaggccggaaccagactttttgacgtgactggcggcaatcgattcctgttctttggtgactacaccgagtgttttgatgttgacgcggggaaggtctcttcgccgctcatcatcgactggtcggcggtctga

SEQ ID NO: 494481 - DNA, 687 bp, Stenotrophomonas maltophilia
atggcactggccgttgcgtgcagcggcgtagccaacgccagggacaaggacgcacctgcaccatcggtcgccgccgttgatgaacttccgcccgaccagagcgtgtccgagacagtgatcgagctggccggctgggtggtcgccagcaaggacaaccagggctatccgtttgcggtcatggacaaggcggcggcgcaggttctggtcttcggcggcgacggcaagctgcgcggcgcagcaccggcgttgttcggttcggcgatcggcgatcactccgcaccgggcgtcgccaagctcgcactgagcgcgattcccggccacgaccgcaccacgcctgccggccgcttcattggcggttacggcccgtccgacgatgccggacgcgtgctgtgggtggactacgattccgcagtctcgatgcacccgctgccgccgggcagcccgaaggaaaagcgcgccgagcggttggcatcgccctcgccggacgacaaccgcgtcacccacggctgcatcaatgtctcgcccgcgttctacgagcagatcgtgcaatccacgttcgagaagggcggcgtgttctacatcctgccggacaaggattcgatcgcgaagacgttcccggagttcgcgcagagccgtggggatgcaaaggacgaaggcgagaagggcgcgcggcgcgcgagcagatag

SEQ ID NO: 494482 - DNA, 273 bp, Stenotrophomonas maltophilia
atgaacctgaacccgcaacacatgaagacggcccgcgcacttgctgtggctctcatcgccaccgtaagccttggcgcctgcgcgtcatacaagaacgagtttgcaaccatcaactcgcgtctcgatcagctcgacgtcaaggtgcagggcgctgcgcagagcgcggagtccgccaaccagtccgcacagcaggccaatcagcgcctggaccagatcgaaggtcgcgtgcagcagcttgaaagggcacctgccggccgcaagccgcgcgggtaa

SEQ ID NO: 494483 - DNA, 1005 bp, Stenotrophomonas maltophilia
atgccgcacgcgtccgtcgcatcactgctgtttccgccccatgcgcgccgcgcggtgcgggtgctgctgctcgtcgccctgccgatgatgcagctgccagccaacgcggccgagcgcgcccaaccttctgcacgcatcgtggtacagacagacgatgtcacgcgtttcttcagcgtgctggatgccactggcggaaaaccaagtgccgaagacctgcagcgcggctatctggacatcggcacggaggcgttgcgcagcttcaccggcagccgcatcggttcaatggagcgtttggccagggccatccaggacaagccggcgttgttcgccagggcgcgggcctgtgcagcggcattgccggcgatccgcgcgcgggttgccgacgcactcgatcggttgggcacgctgctccccactgcacgttttcctccggtcaccgtgctggtcgggcggggcaacagcggcggcgtcaccaccgaagatggtgtggtgatcggtctggaagcactgtgcaacgccgactggatgcagcctgacgtcggcgatcgtttcgtgcacctgatcgcccatgagtacgtgcacgtgcaacagcccggtgcgagcgtcgatgtcgcgcagcccaccctgctctatcagacgttgcttgaaggcggcgccgagtacgtgggtgaactgatctcggggcaaccggccagcgcgcatctgcgtcgctgggcccagggccgcgaatgtgcgctggagcgcgcgttcgtacaggacagcgggggcaccgatctttcgaagtggctgtacgacggccccggcgatgaagcacgacgtggagatctcggatactgggtcggctaccgcatcgcgcgcagctatgtttcccgcgcgccagacaggaccagggccatcgccacgctgctggatgtgcggcccgacaccgccgcgaccgtgttcgaggcgagtggatggacgcctgcctgcactgctgccaaaggcgtggaaacgcacgtgctgtga

SEQ ID NO: 494484 - DNA, 576 bp, Stenotrophomonas maltophilia
atgaacaagaattcgctgctcgccctgggtcttctggctgccctgccgttcgccgcatcggcaaccgacggcctgtcgtacaactacgttgaaggcggctacgtgaacaccgatgccaagggcggcgacgccgatggctggaaggtgaagggttccgtggcggtgcacccgaacttccacatcttcggcgactacagcgcgcaggagaccgacaagttcaagaatgacgtcgaccagtggcgcatcggcgccggctacaactacggcatcgcaccgaacaccgacctggtggcccgcgttgcgtaccagaagttcgacatgaagcatggcctggacttcaacggctactcgaccgaagtcggcgtgcgcaccgcgttcaacccgtacgtggaaggctacgtgatggccggctacgaggactacaccaagaagcacggcatcaacccggacggcgagttctacggccgcgtcggcgccaccgccaagttcaaccagaactggggcctgagtggcgaagtgaagctggccaaggccggcgaccgcgagtggttcgtgggcccgcgcttcacctggtaa

SEQ ID NO: 494485 - DNA, 768 bp, Stenotrophomonas maltophilia
atgggcgaccctttctctcttgcaggcaccggcacgacctaccaggaacatctgacgcctgcgccgctgcgtggccgcttcggccagctgtggcagagccagctccctgccgatgccgatgggcacatcaccgtattgcccgatggctgcgtggatatcctctggcgcgacggtgcgctgttcgtcgtcggcccggaccgtgtggccgcgcacccggcgctggcacccggtgcgcaggtgctgggcgcacgcttccgccccggccaggcattggccgcgctgggcctgccgctggccgggatcatcggccaggccgtgccactggctgatctgaagggcgcgtgggcgaacaaggcggcggcctccatcggcgacaccgcgcctgcacagcgcctgcagcgaatggcgcactgcctgcaacagcacatgggtgcggccgcgctcgatacgccggcgcagcgcgcccatgtcctgttccaagcgctcgccgcgggtaatgccacgctggatacgctggcggcgcagttgggcctgagcccgcgcagcctgcggcgtttcagccagtcgcagttcggctacggcgccaagacgctggagcggatcctgcggctgcaacgtttcctgcgccagagtcgcgcgctgccacagcattcgttggcgatgctggccgctgatgccggctatgccgaccaggcccatctcagccgcgaggcgcgcgagctgactggcatgaccgccagcgagctgcgcctggagtggggacaatga

SEQ ID NO: 494486 - DNA, 369 bp, Stenotrophomonas maltophilia
atgagccacgaagttacccacgaagccgaacgccgcatcgacaacatcgaattcaacgtcgccgacatcgcccgcagcaaacgcttctacggcgaggtgttcggctggcagttcaccgactatggtccgtcctacaccgagttcgacgatggccggctgaagggcggcttcgtgtctgacgcgccgttgcgtgctcacggaggaccgctggtgatcctgtactgcgcggacctggccgacgcacagcagcgcgtggtcgccgccggtggcgaagtggtgcaggcggtgttcgccttccccgggggccgccgcttccacttccgcgatctggatggctacgaactggcggtctggagtgatgtggactga

SEQ ID NO: 494487 - DNA, 975 bp, Stenotrophomonas maltophilia
gtgaactcccagcccgcaccgatcaccgccgtcaaccacacgctcgacaacgagccgcagcagatcactgcgccgctcacccattcggcggcgttcctggtgctgaaggtgaaggatgacgaggcgtcgatcgccaaggcgcgcgaggtgctggccagcaccgatgacctgatcaagaacaccgccatccgcgagatcgagcgcaccttcacctgcaacgtggccatcggccatcgcgtgtggcagccgctggtaggctccacgccgccacgcgagctgaagccgttccgcgagatcaagggcgcgacccacaccgccgtgtccacgcccggtgatctgctgtaccacatccgcgcacgcaccatggacctgatcgtggcgttcgagcgcaacctgctgatggccttcggtgatgcggtcgaagcggtcgatgacgtggccggcttccgctatttcgatggccgcgacctgctcgacttcgtcgatggcaccgccaacccagaagggctgtcgttgccggaagccacgatcgtgggtgacgaggacccggagcatgccggcggcagttacgtggtggtgcagaagtacctgcacaacctcgatgcgtggcgcgcgcagaagaccgaggcgcaggaggcgatcatcggccgcaccaagcacgacaacatcgagctggacgacgcgccggccgatgcgcagaaatcgcacaagaccctgtgcaccatcgaggatgccgacggcgagcacgagatcctgcgcgacaacatgccgttcgccaacccggggcgtggcgagtacggtacctacttcatcggctacacccgccgcctgtgggtgatcgagaagatgctcgagcgcatgttcatcggcaatcctgcgccgctgcatgaccgcatcctcgacttctccaccgccaccaccggcgtgaccttcttcgcgccctcgcgcaaggtgctggccgacctgggcgagtga

SEQ ID NO: 494488 - DNA, 420 bp, Stenotrophomonas maltophilia
atggccatggcagggaacaggaccggcctacgccgctggtggcggcgtctggccgcggtgttcggcgcgttggcactggggagtgccagcgtttccgcgcaggaagcccctgcgcactggatggcctacgccgccgtcgtgggtggccagctgcagcagcgcctgcagcaggagcaggacccgcaggcgcagcgtgtgctggcgtggttgcaggcgcaccctgacacaccggcaccgctgccggtgagcgtgtggatcgcggcggacggccgtatttcgaaactggaatttgacagcctgggcgatgcccaggtcgacgccgacctgcgcgcgacgctgcaggccgcgccgttgcaggcggcaccgccggccgacatgcgccagccgctgcgcctgggcctgctgctggagccgaagtag

SEQ ID NO: 494489 - DNA, 570 bp, Stenotrophomonas maltophilia
atgctcgagtggaccgccgcactgtgcagcatcctcggcgtctggctgatggcccggcgccggctggcggcgtggccggtgggcctgctatcggtggcgctgtatggcctggtgttcgccgaggccaagctgtactcggacaccctgctgcagatcgccttcggtggtttcctggtctatggctggctcaactggcggcagcatgccgccgatgaaggcagcatccgcatcgtgccgctggcacgcggcacgctgctgcgcgacctggccatcggcctgtgcggtggcgtggtgctgggtgcagccatgcacagcttcaccgacgctgccctgccgtggttggatgcgctgctgaccggtctgagcctggtcgggcaatggtggcaggcccgccgccacgtggcctgctggtgggtgtggatcgcagtggacgtggtctatgtgggtgcgtacctgttcaagtcgctgcacgtgaccgccgcgctgtacgtgttctttctcggcctggccgtgttcggcctgcgcgcatggagcgccgccgcgcgtgaaccgcaggtggcaacacggtag

SEQ ID NO: 494490 - DNA, 2190 bp, Stenotrophomonas maltophilia
atgaaccgctgcctgcgccccaccctgctctcactcgccctctgcgccgcgctgccgctgcatgccagcgaggccgaggccaccaccgatgcggctgccactggtgccgaacgctcgccgaccgaactggcggcggtgcgcgtggaggccggcaagccgaaggccgatacctcgcgcgtgaatgccttcggcggcggttcgtggaaggacacgccggcttcggtgaacgtgctcgagcgcgactatctcgaccgtcgccaggtacgttcgctgtccgagctggccagcaacgatgcctcgctgggtgatgcgtatgcacctgtgggctactaccagaacatcgccatccgtggcttcgccctggacgccgccaccggctaccgcttcaacggcctgtccatcgccggcgaacaacgcctggcgctggagaacgtgcagtcggtggagatcctcaagggtgaagccggcctggcggcaggggtgatggcgccgggcgggatcatcaactacatcggcaagcgcccggccgaagtgcgcaccgccacgctcggtaccgattcggaaggctcgcgctacgtcgccgtcgatgtcggccactggatcaccccgcgtttcggcctgcgcctgaatgccgcatgggactccagcaattcctacgtcgcgcacgccgatggccgccgcaacttctactcgctggccgccgactggctgatcggcgagcgcggcaagctggaagtagatgccaactaccagaccagctcgcagcgctcggtgtccggctaccagctgctgggcgcgcgtgacctgccgcgcggtgtcgaccgcgagcacctgctcggctaccagccgtggcagcgcccggtggatatcgccagcaccaacatcaccgcgctgcatacctacgacttcaacgatgcctggcagtcgcgcgtctcggtcggccacagccgctcggtgatcgatgacaacgtcgccttcgcctacggttgctactacgccgtgctgtgcgccgatggcagcgtgccgggcaactacttcgcgcccaacggcgactatgacgtctacgactaccgcagcccggacgacacccgtcgcaaccagcaggcccgtgccgagctgcgtggccgcttcgagaccggcagcgtcggccatgaactgaccgtcggtgccgactacttccgccgcaccgtggacaagcgcccgagcgtcaacgagtacgtcggcaccagcaacatccacgaagcaccggtgccggtattcgcgccgtcgccgaagatgccgggaccgtccgcacgtcgcctggacagccgccagaccgcgttcttcgcgctggaccggatgagcttcggcgatgactggcagtggctggccggtggccgcttcgtgcgcctcgatgagcgcgcctacgacaagcgtggcaccccgcagcggcacagccgcttgtcgcgcttcctgccgcagaccgcggtggtgtggaaggccaccgaccagctcaatgcctatgccagctacgtgcgcggcatttcgctgggccaggaagcgccgttctggaccagcaatgccgacactttcctgccgtcggtgcagtcgcggcagctggaagtgggcgtgaagtacgtgccggtcgaagcactgaccttgggcgcggcggtgttccgcatctcgcagccctaccagtacgccaggcccgacagcagcgacgtcggctacaccttcgtcgaggaaggcacgcagacccacaccggcctggagctgaccgccaacggccagctgaccgacgcactgcagatcgtggccagcgccagcgtgctgcaggcgcgcgcgcgcgacaccggcacgccggcctatgaaggccatcagctggtgaacgtgccgaaggtacgcgccagcgtgcacgtggcctacgcgctgccgttcgtgcagggcctggacgtgaccggcggctggcgctatgccggtgccaacgtggcgcgcgccgacggcggcgtgcgcgcaccggactactcggtgttcgatgccggcctgcgcttccagcatcgcctgcacgaacgcgcggtgacctggaacctgtcggtggacaacgtattcaaccgcttctactggcgcgataccggcagcagcggcggtgactactacctgttccccggcgcaccgcgacaggcccgcctgtcggtgacgttcgcgctgtga

SEQ ID NO: 494491 - DNA, 1125 bp, Stenotrophomonas maltophilia
atgacatcttcctcccaccgcgtgcagggcctcaacaacgacgaggtcgctgccgactggccaccgatcagcgcggcggacatcgcgtggctgagtacgcgttacccgcagctgggcgggcacagccaaccgcgctggcacagcccgcggccgctgtctgccgccgccatcgtcgacgacacgcgcggcgcggtgttcatcaagcgccaccaccacagcgtgcgcagcgcggcctgtctggaagaagaacaccacttcatcgcccatctcgccgccgccggcgtgccagtggtgcaggtgctgccggccaccgatggccacactgcggtcgaacacggcgaatggacgtttgaactgcacgatgtcggcgtgggcgacgacctgtatcgcgacgcggtgtcgtggtcgctgttgaccgatgtcgcgcaggcccgcgaggcagggcgcacgctcgcacagctgcaccgtgccgccgccagctaccacgcgccccagcgcagcacccatctgctggtggcgcgcgacgacctgatccgtgccgacgatccgatcgccgccatcaaggcaggactggatgaacgtcccgggctggcacgctatctcgcgcgcattccatgggaagcacagctgcagcgcgacgtgctgccgtggcacgccggcctggccgagcgcctgcgcgccgagccccggctgtgggcgcacaacgactggcatgtctccaacctgctgtggcgcaacggcgaggtcagcaccgtgctggatttcggcctggcgtcgcccaccagcgcgctgttcgacctcgccaccgcgatcgagcgcaacgcagtggcgtggctggaactggagcgcggcatggaggcagtgcgcatcgatatcgcgctggccctgctcgacggctaccgcgaggtgctgccgttgtcggcggcacgcgtgcacctgctggccgacctgctgccaatggtccatttcgacttcgcactgtccgaagtggagtacttcgaaggtgtcacccgctcagccgcgaatgccgacgtggcctggcagcccttcatgctgggccatccggcgtggttccacagcgcgccgggacgggcactgctgcaggccctgcacgccgtcgcgtga

SEQ ID NO: 494492 - DNA, 408 bp, Stenotrophomonas maltophilia
atgctcagtacttccacactcagcttccgtggtctggcgatggcgctggcactggttgccggtgtcgccgtggtcagcgatgccagcgcgatgtcgaggaaggacaagcgcaccctggtcggcgccgtggtcggtggcgtggccggcaacctgctctcgaacggtgatcctgcggccaccgtcggcggtgccgtggccggcggcgcgatcggcaacctgaccacctccgatcgccgcgaccgccgttactacgacaatcgccgttacgacgaccgctacgatcgccgttacgaccgtggctactaccgcagtggctactacgaccgtggcgatgaccgccgctggcagcgtgagcgctactacgacaaccgctactaccacgaccgcggccgccatcgcggctggtaa

SEQ ID NO: 494493 - DNA, 1989 bp, Stenotrophomonas maltophilia
atggcacagcatgactacagcaaaaaggaagtcctggacatcgtcgagcaggtcgcccggcagaagggcatcccggtcgatgacttcatgcgcttcgcgcacatcgagaccggcggcaccttcaacgagcgcgcccacaacacctcgaccggcgccaaaggcctgttccagttcgtgcccggctcggcccgccaataccacctgaccggccacgaattcgacccgacccgcaacaccgaagccgccgcgcagatgtaccaggacaacctgggctcgatggcgcgccgcaatgagcgcaccggccacccgtacctgtccggcggcgacacgccgaccggcctggacctgtacctggcccaccagcagggcagcgccggctatggctcggtgcagaccgcgatcgccaccggcaccttcggcgtggtccgcaacggccatggcgaagagatcaacatgcgccgcaacgtgctcaaccagatcgggtccgatgccaaggcgctgaccggccacaccctggccgaaatgcgtggcatgaacgacggcgacctggcgcggaccttctccagctactacatccacaagtacgcagcgatcagcatcccggaaaagcacatcacgccgcagaccgtggcaccgggccaggcccaggctccaggcacacctgcgcagaccgccgcagtgggcgccgctgcggccacgctggcggcgaccgcaacggctcctgctgcgccgaagccgggcatcgaactgcacgccgcgtacgacgctggcgtgaagtacgacgatgtgaagtacgccatcaacatcccgggccacgcgctgtacgtgccgggcaagaccggcaagaacgtggaccagggctacatcgattgctccggctgggtcggcaccctgcagaaccggaccatggacgagatcaaccagaaggccgggcacgctgtcttcagcaaggccgaccgcatcgacctgggcaacctcggttccggcggcatcgtgcacaaggccgtcgaacagtccggcgtgctgctcgagcgcgacgccatcctcaagcccggtgcgctgaaggaaggcatggtcatcggcctggatacggccaggacccgccacgagcactggaatggcatcgaccacatcgtgatggtggtgcgcgacccgaacaccgacaagctgctgatcagccagtccaccggcagcaagggcgtgcacaccatgccggtggaggattacctcaagcaggtgaaggaccacccgcactggaagctgttcgcgtcggacccgttgtccaaggcgcgcgacctgctggaaagccgcacccaatcgcatgagcagacccagggcaagcctgcggccgaacacaaggccgctgccgccccgcacgccgagctgtacaagccgggcgcgcacagcgagggcgtgcgcaaggtacaggagcagctgggccacctcggctatgccggggccgacggcaagccgctggtcgaggacggccgcttcggccgcaataccgaagcggcggtacgccagctgcagaaggacaacgggctggttgccgacggcatcgtcggtgcgaagacgctggatgcgatcaaggaggcccgcgagcgcccgctgctgaacgacgagcggcacccgcgccatccgatgtacctgcaggccaccgaaggcctggaacggatgccggcgggcaccttcaaggaccgccacgcgctggaaagcgccgcagcggccctgaccagggaggcgcatgccgccggcctgcagcgcatcgacgcagtggtgcccagcccgaacggtgagcgcctgttcgccgtgcagggcacggtcggtgacccggcggccagccgcgttgcggtggaaacccgcaccgccagcgagcagagcatggcgctcagcagcggcgcggtgcagggcgcgccgaacgtgctgcaccagcagcaggacgcgcagcaggaacagacccgccaggtgcagaaggccatgggcgtctga

SEQ ID NO: 494494 - DNA, 771 bp, Stenotrophomonas maltophilia
atgcagaacccctctcccgatgccgccgtcaccccgcccgacgcgccgaccgtgatgtatttcatctaccaggtcgatggcgacggtgcgacgtcctatgaggtccagaacggcagcgtggcgaccttctggttcggccaccgcttcaccttggacggcaccacctactacaccggcttttcctgggatacccgcgagcattacggcaagccgggcgaacagcagccggccggccccgacgaccgcgccaatctggccgaggccaccttcgtgctggccggcggcgacgcgaagaagccgtggaagttccgcggccaggaatggaccatcggtgcgctcggcgcctacgacaaggccgacgacgtcgatacccggcgcaagccgatcgaacaccgcaccgccgacggccgcctgctgctggcggtgccgaccagcagcttcgaccgcggcatcagcagcagcggctacgccctgctgctgttcaaccccaagcgcagcgaggacgacctggacagcaaggtctggcgctacgtcggctcggtgcgcaccggcgaagacaacagcgcggcctgcgacgacggcaacgtgatgccgtgcaccgacagcgatggcgaactggccttcgtggccgatggcaacggcctgccgcagctgaccgtgaccttcaagggcaccaccatcgaagccccaggcaagacccgcgcgctgggtgccggcgacaccgtgcactaccgcttcgacagcaaggcccagcagtacatcgcgccctga

SEQ ID NO: 494495 - DNA, 639 bp, Stenotrophomonas maltophilia
atgagcttgcgcatcatcatcgcagacgatcacccggtggtccgcatcggtacccgcgccgtcatcgagtcgagcggcgtgggccgcgtggtcggcgaggccgacagcgcgcaggcgctgatgaccctgctcgccaaccagccctgtgacctgctggtcaccgactactccatgccgggcagcccgcaggccgatggcttcgccatgatcggcatgatccgccgccggcatccggacctgccggtgctgatgctcagcgtctccagcaacctggcgatcctgcgcatggtgctcgacagtggcgtgctcggtctggtcgacaagagttcgtcaatggacgagctgccgcaggccatccagtcggtgtaccgcggccagccctacatcagccgcagcctgcgcgagcgggtggacgcggccggcagctggcgcatgcgcgagggcgacggcaagccgttgtcaccacgcgaagtggaggtgctgcggctgctcggcaccggcatgacggtgaaggagatttcgctgcagctgcacaagagcgtcagcaccatcagccggcagaagggcgacgccatgctcaagctggggttgaagggcgacgccgaattgttcgactacctgcgtgacggcaagatctga

SEQ ID NO: 494496 - DNA, 3600 bp, Stenotrophomonas maltophilia
atgcgtaggtgggctgttcgcgggctgctcctgctgctggcggtgctggccctgcccgtggcccaggcacagccggcccctgggctgctgccgctcagcccgttgcagcgcgaatacctggtggcgcatccgaccatcgttgtcgggcagtatgacagcggttggccgccgttcgagtccctccgtgacggccagcaggtcggtctgggaccggactacctgtcgcatcttgcacgccagctcggcatgaaggtcgaggcgcgccgctatccggactggacatccgtgctggatgcggcatgtcgtggcgagatcgacgtggtgatgaatgtcggcctcagtgccgaccgcacccgctgcatggtctataccgcggcctacagcgaagcgccgctggccctggtgggccggccggacgacctgcgtgcctccgacatgcccgacctggagggtctgcgggtggtgatcgagcaggatttcctgaccggtccgcaggtgcgcgcccgattcccgcgtgcccgccagcttgtcgtaaacgacacgttgagcgcattgcagatggtcagagacgacaaggccgacgtctacatcggcaatgcctttgtcgccaccgagctgattgccagccggcgcctgcagggcgtggcgctgttgcggcccagcgacctgccccctgaacggctgcacttcggcattcccaacagcaagcaacccctggctgaagccctggacctggcgctggcggccaccagccaggcccagcgtgatgccctcgcacaacgatggctgccaccgccgcactggtcggcatcggcgcagctggcgctgagccaggccgagaagcgcgtgctggagcagccgttgaagatcggtttcgccccgaatgccgcgccactgtcgttcaccggcgaggatggccggcccagcgggctggccagcgaatacctgcagcgcctgatgcaggccggtgccaacctgcaggtcgaggacagccacgactggtacgaggtgcgcgagaaggcccgccgcggtgagctgcaggcggtgatgggcattcctgtcgattcacgttacctgggcccggactgggtgttcagccagcccttcatcagcgtgccgaacgtgattgtggtcaggagcgatggcgagtcgctgctgggcctggctgacctgcagggcaagcgcgtgctgctgtccgacccggagcgtgtgcgcggctacgtgctgcagcaggcaccgcaggcgcggatcatcgctgcacgcagtgccgaacagtcgctgcagcgcctgctcgctggcgacgccgatgcgtacatcggcaaccttgccgtggtcgatcacctgctgcgcagccgtttcccggggcggctgcaggtggcggcaccggccggcttcaacgaccagctggtgctggccgtggatcgtcgccacgcggcactggctaccaccttcgatcgcctgctgctgcagatgaccccacgcaagcgcgaggccctgcgcaatgcctggctgggggtggagtaccgcaacggtgtcgactggaacaaggtgctgcggtggggcgtgccggtgctgctggtgctgctgaccgcgctgctggtgcatggcgtcggccattggcggctgcgccgcgaggtggcaggacgtcgccagctggagcagcgtctggccgaggtgaccgacaacctgcctgcagtggtctatcaggcgcgtcgcgacgccgatggcgcgctcagcttcccgttcatcgccggtgacctgcctgcgttgttcggcattacacggcagcaggccgaacaggatgcgagggtgttgctggaacgcatcgaggaagaggaccgcgcgcacatcctgcactccatcgagcaggccgcgcgccagttcgccccattgatcctggagttccgcctgcgcagcgatggggagggcgtgcgctgggtgcgcagccaggcccacccctatgccgccgaagagggcgcggtgatctggagcggttactgggtggacgtgagcgaagcgcggatgcaggccgatgccctggcggcggcgaaggcggacgccgagcaggccgccgaggccaaatcgcgcttcctggccacgatgagccatgagatccgcacgccgatgagtggcgtgctggggatgctggaggtgctggcgcactcaccgctggacagcgaacagcagcgcatcctcggcgttatcgaggattcggcccagatgctgcggcagatcctcgatgacatcctcgattactcgcggctggaagcaggggcgttgcgcctggagccggtgccgcaaccgctgcggcccctgctggagagcgtgtgccgcctgctgtcggcccaggccagcgcgcgtggcctggcgctgcacgtgcagatcgatcccgagctggcgccggcccacgaagtggacggcgtgcggctgcgccagatcgtgttcaacctgctcagcaatgccatcaagttcaccgcacagggcgaggtgcgcctgcaactggaggtgctggggccgaccagcgaagacggcgtgcaaccgctgtgcctgagcgttaccgacaccggcatcggcatcgcaccggaacaactgcagcacctgttcgcgccctttacgcaggccggcgcctacatccagcgtgaccacggcggcactggcctgggcttgagcatctgccagcgactggtgcagatgatgcagggcgaattgaccctgcacagcacgctgggcgaaggaacccgcgccgaagtgcgggtatcgctggtggaggccggcagcgaggacgcggcggcactgctggccgagcaggaccagaccgcgctgctgcccgccgcgctgcgtcaggcacgggtgctggtgatcgaggaccacccgaccaaccaggcgatgatggcgtggcggctgcagcagctgggcgtgccccatgtgctgctgggcgatggccagcaggcgctggatcgcctgtcgtcggagagcttcgacctggtgatcaccgactgccgcatgccggtactcgatggatttggcttcacccgcctgctgcgcgaacgcgagggccgtaccggccagccgcggctgacggtgctggcgctgaccgccagcgtgctggacgacgatgcgcgccgctgccgcgaggccggcatggacgaggtactggccaagccgctgtcgctggccacgctgcgtgcggcgctgctgcgctggctgacgcaggcccagggccagtcgttcgaggtgccggtgccggaggttgccgccgacgacggtgaagcattgcctgatctggccaccctgcagcagcgcttcggctcgcgcgtggtggccgagcagctgcgcgacagcctgttgcaggccagcgagggtgacctggccgccgtgcagcgcgccttgcaggctggcgaccgccaggctgcggcgctgcacctgcatcgccaggccggcgggctcggggcgatcggggccacggcactggcccagcaggccaatgccctggtcgagcgcctgcaggatgcggcagaggccgatacggcgccgttgttcgccaccgtaacgacgttcgtggcgcggctgcagcaacagctgcagcgcctggctcactga

SEQ ID NO: 494497 - DNA, 402 bp, Stenotrophomonas maltophilia
atgcgtgcctgccgcctgctcaccgccgttgccgtggccctgcttgccacggcctgccagcgcccgcccgcggtgccggccacgcccgaacaggcccggcagcaggccatgcagcgcgcgttcgaactgtgtgccggctgccacaccgtgcagcccggtggcatccaccgcttcgggcccaaccttcacggcgtgatcggccgccgcgccggcagcctgcccgactatgggtattccgacggcatgcgccgcgccgacatcacctggaccgcacagacgctggataccttcctgcagtcacccacgcacctggtgccgggcacccgcatgtacaacgccttccccagcgcagaacgccgcgccctggtgatcgcctacctgcagcagcagtcggctcagtga

SEQ ID NO: 494498 - DNA, 1677 bp, Stenotrophomonas maltophilia
atgagcgctgaagccaacgccctgcccccgcgtgaagtaatggaattcgacgtggtgatcgtcggcgccggccccgccggcctggccaccgcgatccgcctgcgccagcgcgcgatcgaagccggccgcgagttgtcggtgtgcgtgctggagaaggggtccgaaccaggcgcgcacgtgctgtctggtgcggtgatggatccgcgcgcgctgaccgagctgttcccggactgggccgagcgcggcgcaccgctgaagcagaaggtcacccgtgacgaattcctgttcctcagcgaaaccggcgcgcgcagcacgcccaacgcgctgctgccggagtgcttccacaacgaaggcaactacatcatcagcctgggcgaagtgacccgctggctggcgcagcaggccgaggcgctggaagtggcgatcttccccggcttcgccgcagccgaggtgctgtacggcgacaacggtgaagtgatcggcgtggccaccggcgacatgggtatcgagaaggatggcagcatcggcccggcgttcgagcgcggcatggcgctgcaggcgaaatacacgatcttcgccgaaggcgcgcgcggccatctcggccgccagttgatcgcgcgttacacgctggacgaaggcaaggacccgcaggcctacggcatcggcatcaaggagctgtggcagatcgacccgtcccggcatgagccgggtctggtggttcacgccgccggctggccgctggacagcgacacctacggcggcgcgttcctgtaccacgccgacggcggcaaggtcgccatcggctacgtggtaggcctggactacaggaacccgtggctgagcccattcgaagagttccagcgcttcaagacccatccgtccatccgcaagcatctggaaggcggtacccgcatcggttacggcgcgcgtgcgatcaccgccggtggcctgctgtcgctgccgaagacggtgttcccgggcggtgcactggtcggctgcgaggccggctacctcaacgccagccgcatcaagggcagccatgccgcgatcaagaccggcatgctgtgcgccgacgccgcgttcgacgcgctggccgccgaccgccagcacgatgaactgagcgcctacccgaaggcgttcgaagccagctggctgttcaccgaactgcagcaggccaagaacttcaagcagtggttcaagaagggccagaccgtggccacgctgatgaccggcgtcgagcagtggctgctgccgaagctgggcgtgcgcaacccgccgtggaccctgcaccgcacgcagccggatcatgcctgcctggagccggccgccaagcacacccgcatcgcctacccgaagccggatggggtgctgaccttcgaccgcctcagctcggtgttcctgagcagcaccaaccacgacgagaaccagcccagccacctgacgctgaaggaccccagcattccggtgaaggtgaacctggccgagtacgcaggcccggaagcccgctattgcccggccggtgtgtacgagttcgttggcgaagccgacaacgcgcgcctgcagatcaacgcgcagaactgcgtgcactgcaagacctgcgacatcaaggatccgacccagaacatcgtctgggtgaccccgcagggcggcggcggcccgaactactcgggcatgtga

SEQ ID NO: 494499 - DNA, 1164 bp, Stenotrophomonas maltophilia
atggctttgcatccgtacgatctgttcgatgtccgttccctgctcaatgaggaagagcgcgcggtgcaggagagcgtcgcccgcttcaccaacgagcgcgtgctgccgatcatcggcgatgccttcgaccaggcccgtttccccgatgaactggtgccggagatcgcctcgctgggcctgctgggcgccaccctgccggccgaatacggcggcggtgatctgggtgcggtcagctatggcctgatctgccaggagctggagcgcggcgattcgggcctgcgcagcttcgtctcggtgcagagctcgctgtgcatgtacccgatctatgcctacggcagcgaggaacagcgccagcagtggctgccggcgatggcacgcggcgaactgatcggctgtttcggcctgaccgaggcgcacggcggttccgatccggccagcatgaagacccgcgcggtgcgcgacggcagcgactggcgcatcagcggcggcaagatgtggatcaccagcggcccggtggccgacctggccatcgtctgggcgcagaccgaggacggcatccagggcttcgtgctggagaagggcatggccggcttcaccacgcaggagatcaagcacaagatgagcctgcgggcatcgctgaccggtgcgctgttcttcgatgacgtgcgcgtgcccgacagccaccgcctgccgaacgtgaagggcctgaaggggccgctgggctgcctgacccaggcccgctacggcatcagctggggcccgatcggcgcggccatcgcctgcctggatgaagcgctgggctacgccaaggagcgcgtgctgttcggccgcccgctggcggccacccagagcgcgcagatcaagctggcggaaatggcccgccgcatcaccaccgcgcagctgctggccctgcagctgggccgcctgaaggaagccgggcagctgcagccgcagcaggtcagcctggccaaatggaacaactgccgcatggcgatcgacatcgcccgcgaatgtcgcgatctgctgggtggggccggcatcaccaccgaacacgtggcgatccggcatgcactgaacctggaatcggtgatcacctatgaaggcaccgagaccgtgcaccagctggtgatcggccgcgaactgaccggcatcaacgcgttctga

SEQ ID NO: 494500 - DNA, 480 bp, Stenotrophomonas maltophilia
atgaatgccgcgcccccgttccacgtaatcctgttccaaccggaaatcccgcccaacacgggcaatgtgatccggctctgcgccaacaccggcgcgcagctgcacctggtcgagccgctcggcttcgcactggaagacaagcagctcaagcgcgccggcctggactaccacgagtactcgcgcctgcaggtgcaccccgacctggacaccgcgctggcgcggatcgcaccgaagcggttgttcgccctgagtacgcgtgccagcgtccgctatgacagcgtggcgttcgaagatggtgatgccttcctgttcggtccggaaagccgcggcctgccgcaggacgtgctcgatgcattgccggatggacgccgcctgcgcctgccgatgcggccggacaaccgcagcctcaatctttccaacaccgttgccgtggtgatgtacgaggcgtggcggcagcatgggtttgccggcggcgcgtaa

SEQ ID NO: 494501 - DNA, 381 bp, Stenotrophomonas maltophilia
atgaacgccaagaccattgccatcgccatcgccctgatcgccggcaccgcggttgtttcgtcggtgcaggcctccgaatccatcaagaccctggccaccgtgcaggttcgcccggccgccgaccagctggcccagcaggcctgggaacaggccagcggcatcccgaccctggccaccgtggaagtgcgcccgagcctggaacagcgcgtcgccctggccgccgaactggaagcccagcgctacgccgtcaccctggctgccgctgccaccagcgtcgccaaccaggtgatcgtcaacctgccggccctgcaggtgcgtccgagcgctgcagacctgcaggccctggccaccgaaaccgcccaggtcctgctgcgcccgtaa

SEQ ID NO: 494502 - DNA, 2850 bp, Stenotrophomonas maltophilia
atgtctctcgcccttcgcccgcgcgccgcattgctggccgtcgccctcagcaccgccctgggcacgcttgcgcccacctccgcgcttgccgccaggccgacggcaccggccaaggtcgatatcccgtacgagcagttcaccctgcccaacggcctgcgcgtgatcgtgcataccgatcgcaaggcgccgatcgtcgcggtcaacgtctggtaccacgtgggcagcaaggatgagccggccggccgcaccggcttcgcgcacctgttcgagcacctgatgttccagggcagcgagaaccacgacggcgaattcttcgaaccgttcaagcaggtcggtgccaccaaccagaacggcaccaccaacaccgaccgcaccaactacttcgagaacgtgccgaccaccgcgctggacatggcgctgtggatggagtcggaccgcatgggccatctggtcggtgcgatcgaccaggctgcgctggacgagcagcgcggcgtggtgcagaacgagaagcgccagggcgagaaccagccctacggccaggcctgggaccagatcaacaaggcgctgtatccggttggccacccgtaccaccacggcgtgatcggctcgatgaacgatctcaacgcggcctcgctggatgacgtgaagacctggttccgcacctggtatggcccgaacaacgcggtgctggtgctggccggcgacatcgacctggccaccgccaaggagaaggtcgccaggtacttcggcagcatccccgctggcccgaccatggcgcagccggcggtgaacgtggccaagcgcagtgccgatacccgcgagacgatgaccgacaaggtgccgcaggcgcgcatctaccgcgcctggaacgtgccgcaggtcggcaccgccgacatcgaccagttgcagctgttctccgaagtgctgggcggcgccaagtcctcacgcctgagccagcgcctgcagcaccaggacaagctggtggacagcatcggctcgggcctgtcgacgtcgcagctgggctccaacttcgtgatcgtggcgaccgtcaagcagggccaggacccggtcaaggtcgagaagatcatcgacgaggaactggaccgcctgatcaagcagggcccgaccgcggccgagctggagcgcgccaagaccggcgcccgtgccggcttcatccgtggcatcgagcgcatcggtggcttcggcggcaaggccgatgcgctggccgagtgcgcggtgttcaccggcgacccgggttgcttccgcacctcgctggccaacatcgagaaggccagtgccgccgatctgagccgcctgggcgcagagtggctggacaagggcagccacaccctggtgatcgcaccgggtgagcgcgtggcgctgaaggaagaaccgagccagacgccgaagccgttcaccgtgccggcggtggacccgaagtacagcaccctgccggaacaggtggaccgcaaggccggcgtgccgcagacccgcgagttcccgcagctgaagttcccggcactgcagcgcgccacgctgaagaacggcacccaggtgatcctggccgaacgccacgagattccggtggtgcagttcagctaccagttcccgggcggcttcagcgccgaccagggccgcaagcccggcaccgccaacttcaccatgagcctgatgaccgaaggcgccggcaagctcggttcgctggccttcgccgacgccgccgacgcactgggcgccagcctggatgcctcggccggcctggactcgatgagcgtggacctgtcggcgctgaaggaaaacctggcaccgtcgctggcgctgtaccgcgacctgctgcgcgaaccgcgtttcgagcagggcgagatcgaccgggtcaaggcgacctggatcgccggcatccagcaggagaaggtgaacccgggtgcagtggccatgcgcgtgctgccgccgctgctgtacggcaagggccacccgtacgccatcccgttcaccggcagcggcgacgaggcggcgatcaacggcctgacccgcgaagatctggttgatttccaccacgactggctgcgcccgcagaacggcaccctgatcgtggtcggtgacaccaccctggccgagatcgtgccgctgctggacaagcagctgggcgactggaaggcgaccggcgaggcgccgcaggtgaaggcggccaccgatgtcgcgctgccgaagggcccgcgcgtgttcctgatcgaccagccgggtgcggtgcaggccaacctgttcgccggccaggtggtggcgccgtccggcgccgccagttcgacccgcttcgacattgccaacggcgtgatcggcggcgacttcacctcgcgcctgaacatgaacctgcgcgaggacaagcactggtcgtacggcgcgcgcagcagcgcgaccagttcggtgggccagcgcccgtggatggccagtgcgccggtgcagatcgacaagaccggcccggcactggcggaaatgcgcaaggagatcgccgcattcgccgacggcagcaagccggccaccgctgccgaagtcaaccgcatccgcaacatccagaccctcagcctgcccggtgcctacgagaccgccagtgccgtggccgcgaccatcggttcgatcgtgcagttcaagcgcccggacgactatgtgctgcgtcgcaaggccgagatcgaagcgatgaccccggcgcaggtgcagcaggccgctgccgagatcaagccgcaggccctgacctgggtggtggtgggcgatctcaagcagaccgaagcggccgtgcgcgcgctgaacctgggcgaggtgacggtgatcgacgccgagggcaacccggtcaagaaataa

SEQ ID NO: 494503 - DNA, 318 bp, Stenotrophomonas maltophilia
atgcgcgttctgctgctttcctccctgctgctcaccgtcactgcctgtacctgggtgccgatcgaaccggccggcaaggcgacccgcgtgttgccggcaggtccggttccggccggctgcatcgccaagggcgaggtggtggtcaccgtgaagagcaaggtcggcttctacaaccgcaacccgctgcgcgtgcaggaagagctggaaaccctggcccgcaacgaggccccgagtgccggcgccaacgccgtacaggccgccgccgcgcccgccgatggcagccagcggttcgccgcgttccagtgcccgccgcgctga

SEQ ID NO: 494504 - DNA, 1017 bp, Stenotrophomonas maltophilia
atgctcttcaagaatgtctcgatcgccggcctggcacacgttgatgcgccgcatacgctgacgaccaaggaaatcaacgagcggctgcagccgacgttggatcgcctcggtatccgcaccgacgtgctcggcgatatcgccggcatccatgcccgccgcctgtgggacaacggcgtgctggcgtccgatgccgccaccatggccggccgcaaggcgctggaagacgcaggcatcgatgcgacgcaggtcggcctgctggtcaacacctcggtcagccgcgactacctggagccgtccaccgcctcgatcgtgtcgggcaacctcggcgtcagcgacgagtgcatgaccttcgacgtcgccaatgcctgcctggccttcatcaacggcatggatatcgcggcgcgcatgatcgagcgtggcgacatcgactacgcgctggtggtggatggcgagaccgccaacctggtgtacgagaagaccctggagcgcatgaccgccccggacgtcaccgccgacgacttccgcaacgagctggccgccctgaccaccggttcgggcgccgccgcgatggtgatggcgcgctcggaactggtgccggatgcaccccgctacaagggtggcgtgacccgttcggccaccgagtggaaccagctgtgcctgggcaatctggaccgcatggtcaccgatacccgcctgctgctgatcgaaggcatcaagctggcccagaagaccttcaccgccgcgaagatcgccttgggctgggccgtggaagagctggaccagttcgtgatccaccaggtcagccagccgcacaccgctgcgttcatcaagaacttcggcatcgacccgaagaaggtcatgaccatcttcggcgagcacggcaacatcggcccggcctcggtgccgatcgtgctgagcaagctcaagcagctgggcaagctgaagaagggcgatcgcattgcacttctgggcattggttccggcctgaactgctcgatggctgaagtggtctggtaa

SEQ ID NO: 494505 - DNA, 891 bp, Stenotrophomonas maltophilia
atgcgcgatcttcccggttaccccgcccacccgaagcgcttcgaggtacgccccggcctgtcgatgaactatctcgacgaaggcccgcgcgacggcgaagtggtggtgatggtgcacggtaacccgtcgtggagctattactggcgcacgctggtcgccggcctgtcggacacgtaccgctgcatcgtgccggaccacatcggcatgggcctgtcggacaagcccgatgacagccgctacgagtacacgctgcagtcgcgcgttgacgacctcgatgcgctgctgaagcacctgggcatcaccggcccggtgaccctggcggtgcacgactggggcggcatgatcggtttcggctgggcgctgtcgcaccacgaccaggtcaagcgcctggtggtgctcaataccgccgcgttcccgatgccggcggcgaagacgatgccgtggcagatcgcgctgggccgccactggaagatcggcgagtggatcatccgcagcttcaatgcgttctcgtccggtgcctcgtggctgggcgtggagcggaagatgccggccgacgtgcgccgcgcctacgtgtcgccgtacaacagctgggccaaccgcatcagcaccatccgtttcatgcaggacatcccgctgtcgccggccgacaaggcctggtcgctgctggagcgggccggcaaggcgctgccgtcgttcgccgaccgaccggccttcctcggctggggcctgcgcgacttcgtgttcgacgaccacttcctgaagggcttccaggccgcgttgccgcaggcccaggtgcatgccttcgaggacgccgggcactacgtgctggaagacaagcacgaagtgctggtgccggagatccgcgcttttctggacaagaacccgatctga

SEQ ID NO: 494506 - DNA, 432 bp, Stenotrophomonas maltophilia
atgcaacatccctgcatgacctgcggcgcctgctgcacccaataccgcgtggccttccactggatggaatcggacgaggtcacccccggcggcgtgccgcaccagctgaccgaggtgctggacccgcaccgcctgtgcatgcgcggcacccactccaagccggtgcgctgcgtggcgctggacgcgcagatcggcgtgtactcacgctgcaccatccaccccaaccggcccagcgtgtgccgtgaggtggatgcatcgtgggagtacggcaaggccagcccgcagtgcgacaaggcacgcatcgcctacggcctggacccgctgacgctggccgactggcgctggcgcgatgacgccgacaatgacgacgatcacccggacgacaacggcaacagcccgtcctcaccgccgcaggcaccggtcgcggcgtag

SEQ ID NO: 494507 - DNA, 1722 bp, Stenotrophomonas maltophilia
gtgcggattttccacgaagtgggccgccgcgcaagaaattccgtaagcggcgacaatgaacggatgaaccgaccctgcaacattgccgcgcgcctgcctgaactggcgcgtgaacgccctgaccagatcgccatccgctgcccgggccgccggggcgccggcaacggcatggccgcctacgatgtcaccctggattaccgccagctggacgcccgcagtgatgccatggccgccggcctggccggctatgggatcggccgtggagtgcgcacggtggtgatggtgcggccgtcgccggagttcttcctgctgatgttcgcgttgttcaagctgggcgcggtgccggtgctggtcgatccgggcatcgacaagcgcgcgctgaaacagtgcctggacgaggcgcagccgcaggccttcatcggcattccgttggcgcacgtggcgcggctggcgctgcgctgggcgccgtcggcgacccgcctggtcaccgttggccgccgcctcggctggggcggtaccagcctggctgcgctggagcgcgccggcgccaagggcggggcgatgctggccgataccgatggcgaggacatggcggcgatcctgttcaccagcggctccaccggtgtgcccaagggcgtggtctaccgccaccgccacttcgtgggccagatccagctgctgggcagcgcgttcggcatggaagcgggcggcgtggacctgccgaccttcccgccctttgccttgttcgacccggcgctgggcctgacctcggtgatcccggacatggacccgacccggccggcgcaggccgatccggcacgcctgcacgatgccatccagcgcttcggcgtgacccagctgttcggctcgccggcattgatgcgggtgctggcccggcatggccggccgttgccgacggtgacccgggtgacctcggccggtgcgccggtgccgccggacgtggtcgccaccatccgcagcctgctgcccgccgatgcgcagttctggaccccgtacggcgccaccgagtgcctgccggtggcggtggtcgaggggcgtgagctggagcgtacccgcgcggccaccgaggccggcgccggcacctgcgtgggcagcgtggtggcccccaacgaggtgcgcatcatcgccatcgacgacgccccgctggccgactggtcgcaggcgcgcgtgctggcggttggcgaagtgggagaaatcacggtggctggcccgaccgccaccgacagctacttcaaccgcccgcaggccacggccgccgcgaagatccgcgagacgctggccgatggcagcacccgcatcgtccatcgcatgggtgacgtgggctacttcgatgcgcagggccggctgtggttctgcgggcgcaagacccatcgcgtggaaaccgcacaagggccgctgtacaccgaacaggtcgagccggtgttcaataccgtgcccggcgtggcacgcacggcactggtcggcgttggcccggcgggtgcgcaggtaccggtgctgtgcgtggaactgcagcgtggccagagcgacagcccggcgctgcaggaagcgctgcgtgcgcatgccgcagcgcgcacgcctgaggccggcctgcagcacttcctgatgcatcccgcgttccccgtcgatatccgtcacaacgccaagatcggccgcgagaagctcgccgtctgggccagcgccgaactggagaagcgcgcatga

SEQ ID NO: 494508 - DNA, 993 bp, Stenotrophomonas maltophilia
atgaagatcctggtcaccggtggtggtggtttccttggccaggcgctgtgccgcgggctggtcgaacgtggccaccaggtgctggcgttcaaccgcagccactacccggaactgcaggccatgggcgtgggccagatccgcggcgatctggccgatgcgcaggcagtgctgcacgcggtggccggcgtcgatgcggtgttccacaacggcgccaaggccggcgcctggggcagctatgacagctaccaccaggccaacgtggtcggcaccgacaatgtcattgcggcatgccgcgcgcacggcatcaaccggctggtctacacctcaacgcccagcgtgacccaccgcgccacgcatccggtggaaggcctgggggctgacgaggtgccgtacggcgaggacttccaggcaccgtatgcggcgaccaaggcgatcgccgaacagcgcgtgctggccgccaacgatgtatcgctggcgacggtggcactgcgcccgcgcctgatctggggcccgggtgaccagcagctggtgccacgcctggccgagcgtgcacgtcagggccgcctgcgcttggtcggcgacggcaacaacaaggtcgataccacctacatcgacaacgccgcgctcgcgcatttcctcgctttcgaggcattggcgccgggtgccgcgtgtgcgggcaaggcctacttcatttccaacggcgaaccgctgcccatgcgcgaactggtcaaccagctgctggccgctgttggcgcgccgacggtggacaaggcgatcagtttcaagaccgcctatcgcatcggcgcggtctgcgaacggctgtggccgctgctgcgcctgcgtggcgagccgccgctgacccgcttcctggccgagcagctgtgcacgccgcactggtacagcatggagccggcccgccgcgatttcggctatgtgccgcaggtcagcatcgaagaagggctgcgcaggctgaaggcttcatctgctgcatag

SEQ ID NO: 494509 - DNA, 156 bp, Stenotrophomonas maltophilia
atgctgcattacgccatcattttctttgtcatcgccatcatcgccgccgttctgggcttttccggtattgccggcgccgcaacgaacatcgcctggatcctgttcgtggtgttcctgatccttgcggtgatctccatgttccgcaagcgcggctag

SEQ ID NO: 494510 - DNA, 1095 bp, Stenotrophomonas maltophilia
atggcacggacccgggtcggcatcatcttcgggggcaaatcctccgagcacgaggtttcactgcagtcggcgaagaacattctcgatgcgcttgatcgcgagcgcttcgagccggtgctggtcggcatcgacaagcagggccagtggcatctgaaccagccggacaccttcctgatcaacgccgatgatccgtcgcgcatcgcgctgcatcgctcgggccagtcgctggcggtgcgcccgggtgcggaacaggcacagctgcagccgtccgatccggccagcgcgctgggccagatcgatgtggtgctgccgatcgtgcatgggccgctgggcgaagacggtgcgctgcagggcctgctgcgcatggccaacctgcccttcgtcggctcgccggtactgggttcggcagtggcgatggacaaggacgtgaccaagcgcctgttgcgcgacgctggcctgcaggtggcaccgtggctgtgcatccgtcgccaccaggcggcaacggtcgatgtcgatgcggtgatcgcacagctcggcctgccgctgttcgtgaagccggccaaccagggttcgtcggtgggcgtgagcagggtcaaggacgcagcgggcttcgccgaggcactggcattggcgctgcgctacgaccacaaggtgctggtggaatcggcggtggtcggccgcgagatcgagtgcgcggtactgggcaacgcgcacccgcaggccagcctgtgcggcgaggtggtggtgcacgacgagttctacgcctacgacaccaagtacatcaacgaaactggcgccgaggtggtggtacctgcggatatcgatgccgcaacccaggcgcgcatccagcagatcgcactgcaggcctaccaggcgctggagtgtgccggcatggcgcgcgtggacgtattccttactgctggcggcgggatcgtcatcaacgaggtcaacacgctgccgggcttcacccgcatcagcatgtacccgaaattgtggggtgccagcggagtcgattacacgacgttgcttacgcgcctgatcgaactggcactggagcgtcacgaagccgatcgcggattgcacagcgccgcgtag

SEQ ID NO: 494511 - DNA, 636 bp, Stenotrophomonas maltophilia
atggctctttccctgctcaagtccctcaagccggtcgctggccgcgccctgcagatcgccctgaaccgcgcgctggcgctggatccggatacccgccatgcactggccagcctcgatggccggcacatcgacctgaccctggaagcgccgtcgctggcgatgcgcatcagcgtcgacggcgaccagctgcgggtgggcccggtggatgcgcaggaagccgacctggccgtgcgcagcagcctggccggtgtgctggcgcagctgccgctgctggccaacgcacggcgcggcgagtccaataacaagggccgtgtacgcgtggccggtgacgccgaactggcgcgacgcctgcagcagctggccaagggcttcgatccagactggcagcagccgttcgtcagcgtgttcggcgaggtactgggcgtgcaggtggccaacaccctgcgcagcgccctgcagcacgcgcgccagggtgcgatcgatctggcccacagcgctgccgagttcatcaccgaggaatcgcgcgacgtggtaccgcgcgccgaactggatgccttccacgatgatgtggacgtactgcgtgatgacgtcgagcgccttggcgcgcgcgtccagcgcctgcggggtgccgcatga

SEQ ID NO: 494512 - DNA, 1656 bp, Stenotrophomonas maltophilia
atgaaggccgtgctgcgggcaagccgcatcggccgggtgatcctgcgctaccgcctggacgacctgctgcacggcacgccggctgagcgctggctgcgcctggccaaaccgttcgtgccgcgtgcttcggccgacatcgctgtacagtcgcgcggtgcgcgcctgcgcctggcgctgcaggatctcggcccgatcttcgtcaagttcggccagatcctgtccacccgccgcgacctggtgccgccggacgtggccaacgaactgaccctgctgcaggaccgggtcaagccgttcgacggcgataccgcgcgccgcatcgtcgaggaagcactcggcctgccggtcagcgaggcattcgccagcttcgataccgaaccgctggcctcggcctcgatcgcacaggtgcatgcggccacgctggccgatggccgccaggtggtggtcaaggtgctgcgcccgggcatcgagaagcagatcgacgccgacatcgccctgctcaactcgctggccgccctggtcgagcgtacccatccgcgtgccgacaagatccgtccgcgcgaagtggtggccgaagtcgagaacaccctggccgctgagctggacctgcagcgcgaaggcgccaatgccagcgtgctgcgccgcttctgggaaaacagcgacgacctgtacgtgccggaagtgatctggagccacaccgccgagcgcgcgctgaccctggagcgcgtgtggggcattccgtccgatgacatcgctgcactggacaaggccggcatcgaccgcaaggcgctggccgccaagggcgtgcgggtgttctacacccaggtgttccgcgacaacttcttccatgccgatgcgcacgccggcaacatctgggtcgataccgatccgtcgcgtcgcgccaacccgcgcttcatcgcgctggacttcggcatcatgggccagctgtcgcaggaagatcagtactacctggccgagaacttcatggccatcttcaaccgcgattatcgccgcatcgccgaactgcacgtgcaggcgcgctggatgccggacaacgtgcgcatcgatgatctggaagcggccgtgcgttcggtgtgcgagccgtacttcacccgcccgctgtcgcagatctcgctggccgaagtgctgatgaagctgttccgcgtggcgcagcgctaccagctgaccctgcagccgcagctgatcctgctgcagaagaccctgctgaacatcgaaggtgtcgggcgccagctggatccgcagatcgacatctgggcggtggccaagccggtgctggcgaagatcctgcgcgagcgctacagcccgcgtcgggtcgtgcgcgagatcggcaagcgcttgccggaaatcatgacccacgcgccggacatgccgcgcctggtacatgcctggctgacccagcaggtggagggccgccatgagctggcgatgcgctcgcgcgatctggtcgcgctcgatgccagcgtgcagcgcctgcagaaacgcgcggtcggtgcgatcaccggcgtcggcctgctggccatcgccgcactggtgtacgtgctgcagccgccaggctggtactggggcgacctgccgatgtggagctgggtgtccggtgccgtcggcgcgctggcgctggcgcgcgcgtggtggcgctga

SEQ ID NO: 494513 - DNA, 786 bp, Stenotrophomonas maltophilia
atgcgattgatcatccgtggcgcactgccgtgcgccctgctgctggctgtgtccagcgcccatgccggcatcgaccgggtctcggtgcagctggatcatgccgactacaccgatggcttcggcaagcgcgacgtacagaccgtggatgtggccggtcgcagcggtgacagccgctggcatctgggcctggcccatggtgaacgcgactacggcagcaagcgcttcagcggcaaccgggtgcagggctccctgcaccagcgctggagtccacgcttttcgacccgcaccgccttgaccgcctccaacgatgacccggtattcgtcaaccgccagctcaaccaggacttccagtggaaggtggcaccgcagaccgtgctgagcgtgggcggcaagtacgcccagtaccatgccggcgcatacgtgagtggctggtcggtaggtgcctcgcactacttcccgcgcgtgaccacctcactgcgccacgagcggcatcgccagtccaatgggcccgacggccatggcaccacgctgtcactacgcctgaaggatgcgcagggcggtggttcgacccagctgtggctgggcagcggtacttccggctacaccgccgattccgatccgctgctgctgcgcgaacacgatgcacgtcgtgccttcctgcgccgcagccagccgctgggggagcatctggtgctggacatgggcattggcaagacctggcacaagacgcgcctggaccgcttccagagcgtgcagtcgcacctgggcctgggctaccactggtag

SEQ ID NO: 494514 - DNA, 606 bp, Stenotrophomonas maltophilia
atgtggtggaatgacctcgccgccatggccgacgcgctatcgacgctgccaccccacgtcgattccagcgcccaggtttcgccgcgtgcgatcgtgcggggcgaggtacggatcggcgctggcagccgcatctgcgacggcgcccagctgcacgggccggtatcgatcggccgcgactgcctgatcggcaacaacgcactgctgcgcggtccgctgcacatcggtgacggtgtgcacatcggctttgccagtgaactgaagaacgcactgatcggcgacggcgcctgcatcggcccgcagtgcttcatcgccgacagccgcgtcgacgcccgtgcctacctgggcgcgctggtgcgtaccagcaaccatcgcctggatggcgcaacggtcaccgtccacatcggcgacaccgtcatcgacagccagcgcgacaagctcggcgcctggatcggcgaaggtgccgcgctgggcgtcggcgtgatcatcctgcccggtcgcatcgtcgccccgggcagccagttcggcccgcgcatcaccgtggaacgaaacctgccgcccggtcgctaccggctgctgcagtcgctgcattcccaacccctggagtaa

SEQ ID NO: 494515 - DNA, 1140 bp, Stenotrophomonas maltophilia
atgaaaacgctgctgttcctggccatgtgtgccttcatcctggtgcgtgtgtgcgtgcaggcctcgcgtcgccccagcacgcgcctgtacagcatcgatgcgatcgtgccggcctacaacgaagcgccgtgcctggagcgctcgttgaccggcctgctgcagaacccctacgtggcacgggtgatctgcgtgaatgacggttccaccgacaacaccgcccaggtactcgatgcgctgcaggcgcgctggcccgggcgcctcgtggccgtgcaccaggccaacaccggcaagggcggcgcgctgatgcatggcctgcggcacgccaccgccgagcaggtgttcctgaccgacgccgacacccacatcgatccgcgcggccatggcctgggccacctgctggacgagatcgagcgcggtgccgatgcggtcggtggcgtaccctcgtccagcctgcagggtgccggcttcctgccgcatgtgcgcgccagcctgaagctgccgatgatcgtcatcaagcgcagcttccagcaatggctgggcggcgcaccgttcatcgtctccggctcgtgtggcctgttccgcacctcggtgctgcgcaaggtcggcttctccgaccgcacccgcgtcgaagacctggacatgtcctggtcgctggtcgcgcagggctaccgtgtccgccagagcgtgcgctgcgtggtctacccgcaggaatgcaacacgctggtggaggaatggcggcgctggcgacgctggatcgtcggctatgcggtatgcatgcgcctgcatcgcggcctgctgctgacccgcttcggcgtgttcagcatcctgccgatgatgctgcttgcccttgccggcatcgtgctgacgctgcaggtctggttcggtgcgacccagctgcatgggccgggtggcctcgccctgtcggtgatgccgttgttctggatcggcatcgtcatgttgctggcggtgatcagtgcgatccaccaccgccgcgcgtcgctggtccctgccgccgcgttctcgatgctgtacgtgctgctcgcctatgcgatctggctgatgcatggcgtggccgggctgtttaccggccgcgagccggcacgcgacaagccgaccaggtatccgcatgtggtggaatga

SEQ ID NO: 494516 - DNA, 612 bp, Stenotrophomonas maltophilia
atggttctcgacattctggcaatcggcgcccaccccgacgacatcgagctcggttgcggcggcagcctggccaagctggcccgcgacggtgcacgcatccatgcgctggtgctcagccgtggtggccgtggctgccatgccggcatcgaccgcagcgacgaatcccaccgcgcgttgcgccgcctgggtgtgaccgaggtgatccagcaggatttcccggatacgcgctttcctgcctgccgcaacgacatcgtcgcggtgatcgagcaggcctgcgcgcagatcgcaccgcatcgcgtctacacgatgtgcggcgaagaccaccaccaggaccatcgcaccgtccatgaagcgtcaatcatcgcctgccgcagcatcccgcagatcctctgctacgagagccccagcaccctgccgcagttcgcaccgcaggtgttcgaggacatcagcgcacaactggatctgaagatccacgcattgcgcgagcatgccagccagggcgatcgccactacatgcaggaggaccacctgcgctgccacgcgcagttccgcggccagcagatcggcatcggccccagtgagggcttcgtgccctaccggctggtgctgtga

SEQ ID NO: 494517 - DNA, 582 bp, Stenotrophomonas maltophilia
atgcagctttcggaattgaagaacgaactggcacgcttcggtgctgaaaacgacgcgcatgaaaccgagcgcgctcggcgcatgctcaacatcacgccggacaccggtgaattcctgtcggtgctggtgcgtttcggcaatgcgcgccgggtgctggagatcggcacctccaacggttattccacgctgtggattgccgaagccgcagccgccatcgacggccacgtgaccacactggaatacgccgcggacaaggtggcgatggcgcgtgacaccttcgcgcgcagtggccttgccgatcgcatcacgctggtccacggcgatgccgggcagtggctggcacaggccgccgatgccagcattgacctgctgttcctcgattcggaccgcgaacagtacgccggctggtggccgcggctgcgccgcgtgctgcggcggggggggctgctggtggtggacaacgccacctcgcacgccgcgcagatggaaccgttgcgggtgctgctggacgctgatccggacttcagcaccagcctggtgccggtgggcaacggcgagcttctggccgtgcgcaacgcttga

SEQ ID NO: 494518 - DNA, 744 bp, Stenotrophomonas maltophilia
gtgagcaccgaacctgacaccctcgccgcggtcgagaccgaaaccgcgcccctgcagctgctgcacctggacgagcgcctggccgtggtcaacaagcccgccgggctgatggtccacgacagcaagctggcccgtggcgaagatgatttcctggccgaccgcctgcgcgagcagctgggccgcccgatcttcctcgtgcaccgcctggaccgggccaccagcggctgcctgctgctggccttcgaccgcgagaccgccagtgcgctgggcaaggcgttgatggggggtgaagtggccaaggactacctgacggtctgccggggctggccggccgagctgtcctggcgggtggaccatgacctggacggcgggccgggcaagccggtgaagaagccggcggtcaccgacttccagcgcctggccaccggcgagctgtcggtgccggtgggtgagttcagcagttcgcgctacgcgctgctgcgctgccagccgcagaccgggcgcttccggcagatccgccggcacctcaagcacctgtcgcaccacatgatcggcgacaccagccacggcgatggccgccacaaccgcatcttccgcatgcagggcgtgcaccgcatgctgctgcacgccgagcgcctgcgcttcccgcacccggacggtggcagcgtggatgtcagtgcgccgctggatcgcgagttccagaaggcgctggacctgttcggctggcaggtggacgacgcctga

SEQ ID NO: 494519 - DNA, 528 bp, Stenotrophomonas maltophilia
atgacccgctccacacccgccctgccgtccctgctgcgccgcgccgccctgctgctggcgctggccgtggccagcgttccggccctggccgccccgccgaccgacggcgacatcaaccgcctgctgtcggcctcgcgcgcgcagagcatgatcgacaccatggtgccgcagatcgaagccatgcagcagcagcagttccagcaggtggccgcgcagcgccagctcaccgcccagcagcaggaacagctgaagcggatccaggcccggaccagccagaccctgcgccaggcgatgtcgtggcaacagctgcggcccatgtacgtggacctgtacaagaagaccttcagcaaggaagacgtgctggcaatggccgagttctacgagagcgcggccggccagagcctgctggacaagaccccggcgctgatgcagaacgtgatggtggcgatccaggcgcgcatgcagccgctgttcgcggatctgcagaaggacctggaagcgatcgtcaacgagccggaaaagaaataa

SEQ ID NO: 494520 - DNA, 432 bp, Stenotrophomonas maltophilia
atgggcagtggaccggtcaccatcagcgcgcagcttgaaatccccgacggcgagatcgtcgagcggttcgtgcgcgccagtggcgccggcggccagaacgtcaacaaggtgtccaccgcggtggaactgcgtttcgacgtggccaactcgccctcgttgcccgaaccgttgcgcgcgcgcctgctggcgcggcgtgaccggcgcatgaccggcgaaggcgtgctggtcatcgacgcgcaacgattccgcacccaggatcgcaatcgcgaggatgcgcgcgagcggctggcggccttcatccaggccgggctgagcgtgcccaaaccgcgcaaggccaccaagccgaccctcgggtcgaaactgcgtcgtctggacgccaaacgcgggcgcgcgcagatcaagcgcgggcgctcatcacgtgactgggagtga

SEQ ID NO: 494521 - DNA, 603 bp, Stenotrophomonas maltophilia
ttgaacaacccgacttcgttgctgccggccgtgccgccgcagatgccgcaggtcaaacccaacgccttcctgcgctggctggcgcgctgcaccctgcgcatgggcggctggaaggtgaccggcaccctgccggacatccccaggctggtcttcatcatcgccccgcattcgtccaactgggacgggctgtggggcatggcggcgaagatcgcgctgggcatgaaggtgaaggtgctgggcaaggcctcgctgttctggtggccgctgggcccgctgctgcacaagctgggcgtgatcccgctcgatcgcagctcgccgcagggcaccgtcggccaggccgtggacctgctgcgcaacaacgagaagatgtggttcgccatcacgcccgagggcacccgcaaggcggtgaaggactggaaggccggcttcctgaagatcgcccggatggccgacgtgccgatcctggcggcgtatttccactacccggaaaagaccatcggcatcggcccgctgttcacgccgagcggcgatgacgcggccgacatggccgccatccgcgagttctaccggccctggatcggcaagacccgcggcacggtctga

SEQ ID NO: 494522 - DNA, 2157 bp, Stenotrophomonas maltophilia
atgtcgcgtaccgtagtcctggccgccgccatcagcctggcgctggcggcctgttccggcaaggagtccacccccgtgtccgaagcccagaagaccccggcccagcagccggccgaagcctccaccaatccgctgctgagcgcgagcacgctgccgttccaggcaccgccgttcgacaagatcaaggacagcgactacctgccggcgtttgaagaaggcatgcgccagcacctggccgacgtgcgcaggatcgccgacagcagcgagccggccaccttcgacaacaccatcgtggcgatggagcgcagcggcgagaccctgacccgcgtgtcgcgcatcttcttcggcctggtccaggccgataccaacgacgcacgccagaagatccaggaagaagtggcgccgaagctggccgcgcaccaggacgagatcaacctcgatccgaagctgttcgcgcgcgtgaagtcgctgtacgaccagcgtgacacgctggagctggacccggtgcagaagcgcctggtcgagcactactacgacggcctggtgcgcgccggtgcgcagctgtccgacgccgacaaggcgagcctgcgcaagctcaacgtggaagagaccacgctctccacccagttccacacccgcctggtggccgccaccgctgctgcggccgttgtcgttgacgacaaggccaagctggccggcctggacgagggcgcaatcaacaacgctgcggccgccgccaaggaccgcaagctggatggcaagttcctgctgccgctgcagaacaccacccagcagccggtgctcggctcgctgagcgaccgcgaccagcgcgccgccgtgctgaaggcctcggaaacccgcgccgagcgcggcgatgccaacgacacccggcagaccgtgcagcgcctggcccagctgcgtgcgcagaaggccaagctgctcggcttcgacaccttcgccgactaccagctgggcgaccagatggccaagaccccggccgccgcgctcaagctgctgaccgataccgtgccggccgctactgccaaggcgcgtgccgaagccggcgagatccagaaggtgatcgacgcgcagaagggcggattccaggtggccgcttcggactgggacttctacgccgagcaggttcgcaaggccaagtacgatctggacgagtcgcagatcaagccgtacttcgaactggacaacgtgctgcagaacggcgtcttctacgccgccacccagctgtacggcatcaccttcaagccgcgcaccgacattccgacctacaacccggacatgaaggtgtacgaagtgttcgacaaggacggcacctcgctggcgctgttctacaccgactacttcaagcgtgacagcaagtccggtggcgcctggatggacgtgttcgtcgaacaggacggcctgaccggtgccaagccggtggtctacaacgtctgcaacttcaccaagccggccgccggccagcctgcgctgatcagcttcgacgacgtcaccaccatgttccatgagttcggccatgcgctgcacggcatgttctcgaacgtgaagtacccgtcgatcgccggcaccgcgacctcgcgcgacttcgtcgagttcccgtcgcagttcaacgagcactgggcgctggacccgaaggtgttcgccaactacgccaagcactacaagaccggcgaggcgatgccgcaggagctggtcgacaagatcctcaaggcacgcagcttcaaccagggctacgcgacgaccgagtacctgtcggccgcgctgctggacctggcctggcacacgcagaaggccgacgcgccgctgcaggatgtcggcgcctttgaagccagcgcgctgaagaagttcaaggtcgacctgccgcaggtgccgccgcgctaccgcaccacctacttcgaccacatctggggtggtggttactcggccggctactacgcctacttctgggccgaagtgctcgaccatgacgcctaccagtggttcaccgagcacggtgggctgacggcggccaacggccaggagttccgcgacaagatcctctcgcgcggcaacagcgtggagctgtcgaccctgtaccgcgatttccgcggcaaggacccgtcggtggaaccgctgctgaagttccgcgggctgaaataa

SEQ ID NO: 494523 - DNA, 447 bp, Stenotrophomonas maltophilia
atgtcgatcttcatcatccgtggcccggaagcggccggcgccctgatccgcaccgcgatgccgctgccggcaccggtcctgaagtcactggtgcatcgtgcgatcgacgccggcaccagcgtggcgatccgtgcctgtggttcggaacaggaactgctggacgccctgcgcgtggccgaccacagccgcggcgaggtgaccctgctggacccgggcgcgtgtgccaacagcctgcgtcttcagcgcctgctgccctacctgcacaacgcctacgtggaagtacatgacgacggcgcggtggccgagccgtgcctgccggccggtgtcggccagcgcctgggcatcgccgccggctacggcgcgcagagctacgtgctggcgctggacatcgcactggatcatctgggattgggcgagcaggccaaccgggtgcacgtgggaacgtaa

SEQ ID NO: 494524 - DNA, 402 bp, Stenotrophomonas maltophilia
atgaccctcctggtgatccgccacgcctcttcgtcggcaccgcgtccccaactgccgacgcagctggccggccatcgcgtgctgtgcagcgactgcgccagcctgtccgaggtacgccagtgcctgtgccagccgcaggcgcgctcggccgactgggtactgctggatgtcggtaccgctgacgaggcgcaatggcaggccgaaggtggcgcgctgcaggcggcgctggaacggctgccggcgcagtacatcgaactgcaggcccccagcgaacccggtctggaggcacgcctgcgcctgcagcacggtcccgccgccgtggtggtcgaccagcgcagccagcaggccggctacccgttgtcgctggccattgtcggccgccgcctggcacaggagggctga

SEQ ID NO: 494525 - DNA, 627 bp, Stenotrophomonas maltophilia
atggatgctgatgcccgtcctcccttgtccgaacgcgcgctggtctggctgaagaaggaagcattgccgctgctggtgatgctcggcctgctcgccgccgcccgcgataccctcgccaaccactacgtggtgccgagtggctcgatgcagccgaccctgcagccgggcgaccgggtggtggtggacatgcgcgcctacggcctgcgcctgccgttcaccggcaaggaactgatggccaccggcgtcccgcagcgcggtgaagtggcggtgttcgattcaccggccgacggcacccgcctgatcaagcgcgtggcggcggtggccggtgaccacgtgcagatgcgcgagggccatctgagcatcaacggccagccgctgcagatcgccgatctgcaggacgtggaagccttcggcgagcgccgtgcccgcctcgacctggacatgggcggcggtccggacatcgccgatctggtggtgccggccggcaaggtgctggtgctgggtgaccaccgcggcaacagcttcgacggccgcttcttcggcttcgtcgacgccgacaaggtctacggccgtgcggtggcggtgtactaccgccgcggcgacggtttcgagtggcagcgcctgtaa

SEQ ID NO: 494526 - DNA, 1257 bp, Stenotrophomonas maltophilia
atgactggcgaaaccgcggcggccgtcgagcgccgtccccccactgtcgatcccatcgccgagacccgcatccagcagggcacgccggccttccgccgcaccgcgctggcactgttcctggccggcttctccaccttcggcctgctgtacaccgtgcagccgctgctgcccgagttcagccgccacttcggcgtgtccgccgcaggcagcgcgatgtcgttgtcgctgaccaccggcacgctggcggtggcgatgctgttggccggcctgctgtccgatgcggtcggccgccgcccgttgatgattgccgcgctgctggcctcggccatgctgtcgctgagcacggcgctggtggacgactggaccacgctgctggtgctgcgcaccctgcttggcctggcgctgagcggcgtgccggcagtggcgatgacctacctggtcgaggagatggacagccgcgcgctgggcctggcgatgggcctgtacatcggcggcaacgccatcggtggcatgagcgggcgcctgctggccggcatcatcgccgatcactggggctggcgttggggcatcggcgtggtgtcgatcatcgccgtggccagcaccgtgctgctgtggctgcagctgccgccgtcgcgtcatttcagcgcgcgacgcgatggcctgcgcgagttgccgtcgcgctggcgcacgctgttcgccgaccggggcctgccgtggctgttcgccacctcgttcgtgctgatgggcgtgttcgtcaccctctacaactacctgggctatcacctgctggcgccgccgtaccacctcagccagaccgtggtcgggctgatcttcagcgtgtacctggtgggcaccttcagttcggcgtggatgggccagcaggccacgcggtacgggcgcggccgcatcctgtcgatctcgttcgcgctgatcggcgccggcatcgcgctgctggcgatgccgtggctgagcacgatggccctgggcatcgcgctggtgaccttcggcttcttcggtggtcactcggtggccagcagctgggtcggcagccgtgccggtacgatgcgcgcggaagcgtcggcgctgtacctgttcgcctactacttgggctccagcgtgctgggcggggtcggcggcctggcctacgcggcctgggactggctgggcgtgtgcgcgttcgctgccgtgctgaccctgatcgggggcggcatcgtctgggcgctgcagcagcgcgcgccgcagccggtcacggcctga

SEQ ID NO: 494527 - DNA, 909 bp, Stenotrophomonas maltophilia
atgtccatcgaactccgccacctgcgttacttcctcgccgttgccgatacgctgcacttcggccaggcggcggagcggctgggcatgtcgcaaccgccgctcagccagcagatccgccagctggaagacctgatcggggcgcgcctgttcgtgcgcagccatcgtcgtgtgcagctgacgcctgcgggtgagctgctgcaggagcgcgcacgggccatcgtgcagcaggtggaaaccgcggtggacgaggtacagcgcgcgcagcgcggcgagcagggcgaactgcgtatcggcctgacccgggccacgccgctgtcgccgcagattccgcgttcgatcctgcgctaccgccagcagtacccacaggtgcggctgcagctgagcgagatgaacacgctgcagcagatcgatgcgctgctcgacggttcactggacgtgggcatcatccgcaagcgcgcattgccgccggagctggtggcgcacagcctgttcgtcgatccactggcgttgatcgtgcatgccgaccaccctgccctgcgcaggctgtcgaagcagggcacgttgtcgctacgcgacttcgcgcaggagccgttcgtggcatttcgccgcagcgcgggcgcgggcatccatgaccacatgatcgcgctgtgcgcggccgccgggttcacgccgcgcatcgtgcaggaagccggtgaggcatcgacattgatcagtcttgcggctgcaggcctgggtgcggcgatcctgccctcgtcctgcgatcacatccgcgtggaaggcgcgcgcttcgtggcgctggccgatgccggtgcgcattcggaggtgcagctggcatggcaccgcgagggggtgacgccgctgatccgcaacttcgccgggctgttgcgcggggcgttcgccgaagggtga

SEQ ID NO: 494528 - DNA, 1332 bp, Stenotrophomonas maltophilia
atgcagccacgcaacaacgacattttcacccccagccagctcaacaccctggcccgcgacctgctggaaggcagtttcccggcgatctgggtcgaggccgaactgggcagcgtggcgcgtcctgcctccggtcacctgtatttcaccctgaaggacgcgcgtgcgcagctgcgtgccgcaatgttccggatgaaggcgcagtacctgaagttcgtgccacgcgaaggcatgcgcgtgctggtgcgcggcaaggtgaccctgtacgacgcccgtggcgagtaccagatggtgctggaccacatggaggaggcgggcgaaggcgcactgcgccgcgccttcgaggaactgaaggcacggctggaggccgagggcctgttcgacccggcgcgcaaacggccactgccggcgcatgtacaacgtctggcagtgatcacctcgccgaccggcgccgccgtgcgcgatgtgctgagcgtgctcggccgccgtttcccgctgctggaagtcgacctgctgccgaccctggtgcagggcagcagcgccgccgcgcagatcacccgcctgctgcaggcggccgatgccagtggtcgctacgacgtgatcctgctgacccgcggcggcggttcgctggaagacctgtgggccttcaatgacgaagccctggcccgtgcgatcgccgccagccacaccccagtggtttcggcggtcggccacgaaaccgacttcagcctcagcgacttcgccgccgacctgcgtgcaccgacgccttcggtggcagctgaactgctggtacccgaccagcgcgaactggcactgcgcctgcgccgcacggccgcgcgcatggtgcagctgcaacggcatgcgatgcagcaggcgatgcagcgcgccgaccgcgccctgctgcgcctgaacgcccagagcccgcaggcgcggctggacttgttgcgccgacgccagctggatctgggccggcgcctgcatgcggcgttcaatcagcagcaggagcgccgcgccgcgcgcctgcgtcatgcggcggcagtgctgcgcgggcaccatccgcagcgccagctcgatgcgatgcagcgccgtctggctgccctgcgcgggcggccgcaggccgcaatgcagcgcctgctggagcgcgatgcactgcgactgcgcggactggcgcgttcacttgaagcagtcagcccgctggcgaccgtggcgcgtggctacagcatcctgacccgcagcgatgacggtacgctggtgcggcacatcgaccaggtgcagcctggtgacgccctgcaggcccgcgtcggcgacggcgtgatcgacgtacaggtcaagtaa

SEQ ID NO: 494529 - DNA, 1071 bp, Stenotrophomonas maltophilia
atgtcccccgcccccacccctgtcgatccggtccaggccgtgcagcgcatccgcgaactggcgcgtgcgcatggcttccagcgctgcggcatcgctggtatcgaactgggcgaggatgaagcgcacctggccgactggctgggccagggcctgtacggcacgatggactggatggcgcgccacggcaccttgcgcgcgcgaccggccgagctgctgcccggcaccgtgcgcgtgatttcagtgggcatggactacagccacaaggacgacaccgaagcctgggcgaccctggccgacccgggccgcgcctacgtggcgcgctacgcgctgggccgcgactatcacaagctgatgcgcaaccgcctgcagaagctggcgacgcagatcaacgatgaagtagcgccactgggctaccgcgtgttcgtcgattccgcccccgtgctggaacgcgcactggcgcgcaacgccggcctcggctggatcggcaagcacacctgcctgatcgaccgccatggcggttcatggttcttcatcggcgagatctacatcgacatcccgttgccgatcgatacgccggccacggcgcactgcggcacctgcacgcgttgcatcgacgtctgcccgacccaggccatcaccggcccgcagcggctggacgcgcggcgctgcatttcctacctgaccatcgagcacgacggcgccattcccgaagacatgcgtccgttgatcggcaaccgcatctacggctgcgacgactgccagctggtctgcccctggaacaagttcgccaagcgcaccgacgaagccgatttccgcgcgcgcaacaacctcgataccgcgcgcctggaccagctgttcgcctgggacgaggccgagttcctgcgccgcaccgagggcagcccgatccgccgcagcgggcacgagcgctggctgcgcaatatcgccgtggcactgggcaacgcaccgtcctcggccgaagcattggccgcgttgcagacccgcgtcgatgatccctcgccgctggtgcgtgaacacgtgcagtgggcgctgggccagcacacggcgcgctga

SEQ ID NO: 494530 - DNA, 1485 bp, Stenotrophomonas maltophilia
atggccaaccttgccgatctgttcgattccgctgccgcgcgtgcgcttgatgcgcaggcctcggcgttggccgccgacggcggctggggcctgatggcgcaggcaggccaggccgcctggcagtgcctgctgcagcattggccgcaggcgcggcggatcggcgtggtggtcggcgctggcaacaatgggggcgatggccatgtgctggcccgtcacgcgctgcaggccgggcgcgaggtgacagtgatcgccctgccgggcaggccgccctcgaccgcgctggcacagcgtgcagcatctgaattcaggtccggcggcggcaccatcaccgatttcgacggcatgctgcccgaggccgacgtctgggttgatgccctgttcgggctgggctttgatcgcgcgccggagggtaccgcgcaggcgttgattaccgcgctcaacgcgcagactgcgccgttgctggcgctggatgttcccagtggcgtcgatgccgaccgtggggcggtgccgggcgtagcagtgcgcgctgcactgaccctgcagttcatcgtggcgcatcgcgggctgtattccggcgatgcgctggatcattgcgggcacaaggtcctggcgcccctgctgttgcccgcggcggcctggcaaggcgtggtacccgctgcggagcactggacgcaggtgaggttgcgggccctgttgccaccgcgccgcgccaatacccacaagggcgaatccgggcacgtgctgtgcgtcggcggcaaccatggcagcggcggtgccatcgcgatggcggccgaagccgccttgcgcgcgggtgcggggctgttgagcctgggcacccgccgcgaccacgtcggtccactgctggcccggttgcccgaggccatgacccatgcactggaagatggcgatgtgctgccggcgctgctggacaaggcgaaggtggtggcgatcgggcccggtctgggccaggacgaatgggcacgcgccttgtttgcgcgggtgctggccagcaacaagccattggtggtcgatgctgacgccctgaacctgctggcgcaggatccgcgcgcgttgcccgatgccattctcacaccgcacccgggcgaggccgcgcgcctgctcggctgcagcacggctgaaatccaggccgaccgctacacctgtgcgcacatgctggccgagcgcttccatgccgtggtggtgctgaagggcgctggcagcatcgtggcagcgcctgggcaaacgccccggttgatcgctgccggtaacccagggatggccgtgggaggcatgggcgacctgctcaccggcatcatcgccagcctgcgcgcgcagggccttgcggccttcgatgccgcggccgcgggcgcgctgctgcatgcgctggcgggcgatgcagctgccgccgatggcgcgcgcggcctgcttcctactgatctgctggcgccgctgcggcgactggccaacccggacctctccccatga

SEQ ID NO: 494531 - DNA, 483 bp, Stenotrophomonas maltophilia
atgaccgaattcttccttgccgacagcgacgccaccgaactgctcgggcagtggctggcggccacccggccgccgcaggcgctgatcgaactgcgcggcgacctgggtgccggcaagtccaccacggcccgcgcgctgctgcgcgcgctgggcgtgcagggcgcgatccgcagccccacctacaccctggtcgagcgctatccgctggccagtggcggcgaggcgtggcacctggacctgtatcgcatcggccaggccggtgagctggatttcctcggcctggacgagggcagcgcggtgctgtggctggtcgaatggccggaacggggcgccggcgcgctgccgccgaccgacctggtggtggcgctggagatcgaggggcagggacggcgcgtccgtctcactggggccagcgacgtaggacatgaatggctggaacggctgccgcaagggggcgacttgcaggccatttctgtcggctga

SEQ ID NO: 494532 - DNA, 1569 bp, Stenotrophomonas maltophilia
atgcgcccggggaaccgtctcatcgccatctgtgccgccgtcggactgggtctggcgagcgtcagtacgtgggcgggtgaagtccgacaggtcctgctgaacaccggcgctaccggcacccgtgccgagatctcgctggtcggcagtggcggctacaagaccctgtcgctggccggcccgaaccgcctggtggtcgatttccccgactccagcgccatacgcaacctgaagatgccggccgcgcagggcgtggtcacggcggtgcgtaccggacagccggtcccgggcacgttccgcgtcgttttcgacctcgccgaatcggtggcgccgttccgcccgcagatgcagcgcgagggcaatgaatccaagctggtgatcgaatggccgggcgatggcccggccgtggccagcagccgcccggcggcgacgccagccgggcagccgcaggcgcccgctgcgggagctgcacctgtaccgactccggccgagagcgcgcagtcgcgcaccgatgccgcgcgtgccacggccctgctgaccgcacaggtacagcagcaggccagcgccactgccgccgcaccggccacgccgaccccggcaccgaccaccgcgccggcccaggttgctgcggccggtgtcaccgccagcagcacgccgtcgtcttcgccggccgcgatcctcgccggccagcgcaccgcagcggtggtgaccacgccgccggccaccgtgcctacaccggcaccgacgccggtggaaccgccgcgtcctgtcatgcccagcgatgcgtcgcgtatccgcatgcaggccggcatgcgccacctggtggtggcgatcgatcccggccacggcggccaggacccgggtgcgataggcccgaccggcaagcgcgagaaggatgtcactctggcagtggcgcgcgagctggcccgccaggtcaacgccacgccgggcctgaaggcctacctgacgcgcgacagcgacgtgttcattccgctgccgatgcgtgcgcagaaggcgcgtgcgaacaaggcggacatcttcatctcgatccatgccgacgcggccgaaaaccgctcggccacgggctcatcggtctacgtgctgtcgaccaagggcgcctcttcgcagcgcgcccgctggctggcggacaaggaaaacgcggccgacctggtcggtggcgtgcgcctgcagcaaaccgaaggcaccctggccaacgtgctgctggacctggcgcagagcggctacatgaaggcgtccgaagacgcggccggccacgtgctgggcggcctgaagcggatcggcaacaaccacaagccgaacatcgagcgcgccaacttcgcggtgctgcgcacctcggacatgccggcgatgctggtggaaaccgcgttcatctccaatccggatgaagaacgccgcctgatggacccggcgtaccagcgcaagatcgctggcgccgtgctggatggggtgcacaccttcttcagccgccagccgccgccggggacgttgtatgcggcccgcgcccaggccgagatcgacgcggccggcaccatggccggcggcagcaagtaa

SEQ ID NO: 494533 - DNA, 1905 bp, Stenotrophomonas maltophilia
atgagcgcgcccggtccgcgcccgatccggccgttgccggagatcctcatcaaccagatcgccgctggcgaagtggtcgaacggcctgcgtcggtggtcaaggaactggtcgagaacgcgatcgatgccggcgccagccgtgtcgacatcgatctggaagaaggcggtgtacgcctgatccgcattcgcgacaatggcagcggcatcgcaccggagcagctgcccctggcggtatcgcgccacgccaccagcaagatcgccgacctggacgatctggaatcggtggcaacgctggggttccgcggtgaagcgctgccttcgatcgcctcggtcagccgcttcaccctggcctcgcgccgcgcgcatgacgagcacggttcggcgttgcagatcgaaggcggcaagatcggcgaggtgaccccgcgcgcgcacgcgccgggcaccacggtggaggtgcgcgagctgttctacaacgtgccggcgcggcgcaagttcctgcgcgccgagcgcaccgaactgggccatatcgaagagtggctgcgttcgctggcgctggcacggccggatgtcgagctgcgcgtgtcgcacaacggcaaggcctcgcggcgctacaagccgggcgatctgtattccgatgcgcgccttgccgaaacgctgggcgaggatttcgccaaccaggccgtgcgcgtggaccacagcggtgccggcctgcgcctgcatggctggatcgcgcagccgcattattcgcgcgcgagcgccgaccagcagtacctgtacgtcaacggtcgctcggtgcgtgaccgcagcgtcgcccacgcagtgaagatggcctacggcgatgtgctgtaccacggccgccagccggcctatgtgctgttcctggaactggatccgacccgcgtcgacgtcaacgtgcaccctgccaagcacgaagtgcgcttccgtgattcgcggctggtccatgatttcgtctaccgcacgctgaaggatgcgctggccgatacccgcgccggcatgtcggcgcaggagatcggtgccggtgctgcgcagccggtggatgccacggccgtgccgatggcatcgagcgcaggcgcgtcgggattcgggctggtgcgtgggcccgcgccgggtgccggctcgggaggtggtggtggcggattctccgcatggcgcccgcagcagccgctgggcctgcaggtggccgatgcaccggctgcctatgccgcgctgtatgccgcaccggccggcgccgagcgcggtgctgcgctgccgccgatgccgaccgagaacggactgccggtcaccagtgccgacgcaggcgtgccgccgctgggctatgcgatcgcgcagctgcatggcatctacatcctggccgagaacgccgaaggcctgatcgtggtcgacatgcatgcggcccacgaacgcatcggctacgagcgcctgaagaacgcgcacgatggcatcggcctgcagtcgcagccgttgctggtgccgatcacgctggcagtgggcgagcgcgaggccgacaccgccgagagcgaagctgaaaccctggcggcgctcggcttcgaggtgacccgtgccggccccggttcgctgcacgtgcgcagtattccggcattgttggcgcatgccgaaccggaagggctgctgcgcgacgtgctgaccgacctgcgcgagcatggccagagccgccgcgtggccagtgcacgcgacgaactgctgtcgaccatggcctgccacggcgcggtgcgtgccaaccggcgcttgaccctgccggaaatgaacgcgctgctgcgcgacatggaaatcaccgaacggtccggccagtgcaaccacggccgaccgacctgggcccgtttttcgctggcggagatcgaccgctggttcctgcgcggacgttga

SEQ ID NO: 494534 - DNA, 930 bp, Stenotrophomonas maltophilia
atgcgttatcggggaatggcgggcctgctggccgccgtggtgttggccgcctgcagcccggcaacaccgccggtgccgacggccgctgaagatccggcctacgcggccgcgcagcaacaatggcgtgtagcgcgctaccaggacctgacccggcccgatggctggacggccctggtgggcctgcactggctgcagaacaaatcgcatttcgttggcagcggcgctaccaacggcatccgcctgacggttggcccggacaagctgggcctgctgcgtcgcgaagggacgcagtggtggttcacgcctgaagccggtgtcgatgtcagtcatgatggcctgccggtgcgcggccgcatccgcgttgacaccgacaaggacgcgcaaccgacgctgctggccttcgatggcggcaagggccagctcagcatcatccgccgggggccgcgggacgcgctgcgggtcaagcatgccgatgcgcctgcgcggcgtgactttgccggcctgcagtactggccgggcggcgtggactggcaggtgcaggcgcgcttcatcgcgcacccgccgggcaagaccctgccgatcgtcgacatcaccggcctgaccaccgagatgcccaatgccggcgcggtcgagttcgaacgcgatggccgcagctggcggctggaagcgatcggtgcgcccgggcagccgctgttcctgatcttcgccgaccgcaccagcggccgcggcagctatccggccggtcgctacctggataccggtgcgcccgccgcagacggcaccgtgcgcatcgatttcaaccatgcctacaacccgccgtgcgcgttcaccgcctacgccacctgtccgctggcgccaccggaaaaccggctggacctgcgcgtggaagcgggcgagaaggcgtaccacctgcctgaaggagaaggctga

SEQ ID NO: 494535 - DNA, 963 bp, Stenotrophomonas maltophilia
atgccgatcaaacacctgttccgtgccgcgttgctgatggcggcgtgcgcgatggcacccctggccactgcccgcgatgcgccgggcaccacggctgcggccgcgaccgccgcggcggccaagccgcccgtaccgctgttgtggaaagtcaccggcccgggcgatgcacgcgtgtacctgctggggtcgttccatctgctgaagccgcaggactacccgctgtcgcccgatgtcgagcaggcgttcgaggcctcgcagcgggtggtgttcgaactgtcgccggaagacatgcagtcgccgcagctggccagccgcatggtgcaggccgcgacccgcaccgatggcagcgagctgaagcgtgatctggatgcgccgacctggcagaagctgcaggcctttgctgcccagaaccagctgccgctggcccagatgcagggcatgaaggcctggtttgtcggcctgagcatttcggtcgggcagatgcagaagctgggcctggacccggcgctgggcctggaccgccacttcatggagcgtgcgcagaagaccggccgcaagacggcgggcctggaggacatcgatacccagatcggcatgcttgacgggatgacggtgcaggagcagcggcagatgctggccgaagcgctggaccaggccggcaaggccgatgagcaggcgcggctgctgcatgatgcatggcgtcgcggcgacgagcgcctgctgtggaccaagatggcggcggagatgcgccagcagtatccgcagctgtaccaacgcatcaacaccgggcgcaacgatgcctgggtgccgaagctgcagccgtacctgcaggccgggcagggcggtacgctggtggtggtcggcacgctgcacctgctgggcagtgatggcgtggtcgagaagctgaaggccaagggctacaaggtcgagcgcgtgtgcacggggtgcaaggcgaaacgctga

SEQ ID NO: 494536 - DNA, 639 bp, Stenotrophomonas maltophilia
atgatcgcccctgaaagccaagcctggcgggggctggagcggttgcaaccgctgctgcactgcgccatgctgcgcgtctactgtgacgagtaccgcttcatggctgcgacccgcatcatcaagaagtatccgaaccgccgtctctacgacaccgagatctccagctacatcaccatcgaggacgtgcgccagctgatcctggacggtgaagacttcgaagtccgcgacgccaagagcggcgacgacctcactcgatcggtcctgctgcagatcatcgccgaccaggaacaggacggcgaaccgatgctgtccacccagctgctgagccagctgatccgcttctacggcgattccctgcagggcttcatgggcaactatctggagcgcagcatgcaggtcttcctcgaccagcagcagcagttccgccagcagatgggcaacctgctgggccagaccccgtgggcgatgatgaaccagctgaccgagcgcaacctggagttgtggcaggaattccagcgcagcatgggcagcggtttcggtggcccgcgcccgggcggtaccggaacgggaaccggcaccggcaacaagcccggcgaaccgggcaccggcaccggcaccggcggcaagacccgccgctga

SEQ ID NO: 494537 - DNA, 741 bp, Stenotrophomonas maltophilia
atgacatctcgcgtcgcactggtcaccggcggaaccggcggcatcggtaccgccatctgccaacgcctggccgaccagggccaccgggtcgccaccaactaccgcgacgaggccaaggcccgcgcctggcagcaggcgatgaccgagcgcggctaccacgtggcgatcttcccgggcgatgtctccgatccggacagcgccgaagcactcgtgcgcgccgtcgaggccgagctgggcccggtcgagatcctggtcaacaacgccggcatcacccgtgacaccaccttccaccgcatgcgcgcggaccagtggcacgatgtgatcaacaccaatctcaactcggtgttcaacgtcacccggccggtcatcgaaggcatgcgccgccgcggctggggccgggtcatccagatcagctcgatcaacggcctgaagggccagtacggccaggccaactacgctgcggccaaggccggcatgcacggcttcaccatctcgctggcccgcgagaacgccggcttcggcatcactgtcaacaccatttcgcccggctacgtcgccaccgacatggtgatggcggttccggaggacgtgcgcgccaagatcatcgccgacatcccgaccggacgcctcggcaagccggaagaaatcgcctatggcgtgtccttccttgtggccgaggaagcctcgtggatcaccggcagcaacctggacatcaacggcggccaccacatgggctggtga

SEQ ID NO: 494538 - DNA, 921 bp, Stenotrophomonas maltophilia
atgacctcccccatttcctgcggccgcttcgcgccctcgccgaccggcctgctccaccccggatccctgcttgccgccttcggcagctggctgctcgcccgccatcacggcggcctgtggcggctgcgcattgaagacgtcgatccgccgcgcacggtgcctggcgccgcggaggcacaactgcaggcgctggccgccttcggcctcacccatgaaggcccggtcctgtggcagagcgcgcgcggggaggcctaccaggccgcgctcgacgtgctgctggccagcgatctggcctttgtctgccactgcagccgcagcgaactggccgccagcggcggcatccaccaccgctgcgttgcgcgacagccacgaccggaccctgccgtccgcttccgcgtgccacgcggcagcatcgtgcacttcaatgatggcctgcgcgggccgcagcaccaggacgtgcatgccgaggttggcgacttcgtgctgcgccgtgcagatggctgctgggcctaccagttggccgtggtggtcgatgacgccgcacagggcgtgaccgaagtggtgcgcggcgccgacctgctcgattccaccgcgcggcagatcctgctgcagcaggcgctgggcctggccgtgccgcgctactggcacctgccgctgctgctcgatgccccggggcacaaactgtccaagtcgctggcgtcgctgccggtggacagcacgcggccggtgccggtattgcgcgcgctctggcagctgctgggccaggcgcctgccgcactggacggcgccgatgagcgggatgcgctgctggaggctgcgcaacgggcgttcgacccggcgcggctgccgcggaccgacatcctgttgccggccggcgcactttccgcgccgatgttgcagaatcccccttcccccacctga

SEQ ID NO: 494539 - DNA, 867 bp, Stenotrophomonas maltophilia
atgtttacccgcattgccctgttcctggcgaccaacttcgcggtcctgatcctcgccagcatcgtgatgtcgttgctgggggtcaatccgagccagatgagtggcctgctggtcatggccgcgatcttcggcttcggtggctccttcatctcgctgctgctgtccaagtggatggccaagcgctccaccggtgcggtggtgatcaccgagccgcgcaaccagaccgagcgctggctgctggccaccgtcgagcggcaggccaaggcggccggcatcggcatgcccgaggtggcggtctatgacggcccggagatcaatgccttcgccaccggtgccaaccgcaacaacgcgctggtggcggtgtccaccggcctgctgcacaacatgagtgaagacgaggccgaagcggtgctgggccacgagatcgcccacgtcgccaacggtgacatgatcaccatggcactgctgcagggcgtgttgaacaccttcgtgatcgtgctggcccgcgtggtcggcggcatcatcgacagcgcgctgtcgggcaaccgcgaaggcggcggccgcggcttcgcctactacatcatcgtgttcgtgctggagatggtgttcggcctgttcgccacgatgatctcgatgtggttctcgcgccaccgcgagttccgtgccgatgcgggtggtgcctcgctggcgggccgccagaagatgatcgccgcgctggagcgcctgcagctgaaccacggccagagcacgctgccgacccagattgccgccttcggcatttccggttcgacggccaagaagctgttcatgagccacccgccgctggaagagcgcatcgccgcgctgcgggcgtcgacggcggcgtaa

SEQ ID NO: 494540 - DNA, 762 bp, Stenotrophomonas maltophilia
atgcggcggagttcgacgcgaagttctgaggtttcgcgtaatgcggttcatggagacggcacctgcgagggtgccgttttcgtttgtgcgcacggagagtcgtttccgcgaccgcggaggggtgtcactttctttgctcgtgcaaagaaagtaaccaaagaaacacgccgccagggcgcgagccgatgctacgcatcggtaccctgcgctcctcggcccgtcgagggacggtgcgggaactcgctgcgctcagacacccgcacctcttcgccctcgccggacctgcggtgctcggctcgctcaaggcggacccaaggtcaaatgccacagctgcacccagtaaatccacgccacgtgtggatgctgttgttcttgatcttgatcttgatcttccagtccgccttgagcgagccgagcatcgcaggggaatcaggggcgaagaggcgccggtgtctgagcgcagcgagttcggcgccgtcccctgattcgccgagaagcacagggaaccgtcgcgcagcgacggctcgcgccccggcggcgtgtttctttggttactttctttgcacgagcaaagaaagtgacacctccccgcaggcgcggaaacgatccgccgggcacgatccggcatcagcaatgcatcgcgcaaacaaaaacgcccggcgcgaagccaggcgttcctgcactaccgtggagcggtggcttacgccgccgtcgacgcccgcagcgcggcgatgcgctcttccagcggcgggtggctcatga

SEQ ID NO: 494541 - DNA, 828 bp, Stenotrophomonas maltophilia
atgcagaaacccgccgtcaccgtcatggtcaaggccgcccgcctcgccggcaacgtcctgttgcgcaacatcaacaagctcgaggcactgaacgtggtgcagaagggccggatggactacgccagcgaagtggatgcggacgcggaaaaggtcatcgtcaaggaactcaagcgcgcttacccggactacggcatcttcggcgaagaaggtggcgtgcagggcgagcgccgccagatgtgggtcatcgacccgctggacggcaccagcaattacctgcgcggcgtgccgcactactgcgtgtcgatcgctctggtcgagaatggcgaaccgaccgatgcggtcatcttcgacccgctgcgcaatgaactgttcaccgcaagccgtggcgctggcgccgtgctgaacgaccgccgcatccgcgtggccgatcgcaaggacctggaaggcacgatgatccacaccggcttcgcaccgcgcgagcgcacccgtgccagcgcccagctgaaggcggttgacgccctgctggtgcacggcgaggacatccgccgcaccggttcggccgcactggacctggcctacgtggcctgcggccgcgccgacgcctacttcgaagccggcgtgaaggcgtgggacatcgccgccggcctgctgctggtccgcgaggcgggtggcaaggtctgcgacttcaagggcgcgaccctgggccgcatggacaaccgtggcccggagacccaccagatcgtggccggcaacctgaaggtggccgagtcgctgcagaaggtgctggtcaacaccggttatgcggcggagttcgacgcgaagttctga

SEQ ID NO: 494542 - DNA, 771 bp, Stenotrophomonas maltophilia
atgtcccagtttcccgccgccacccgcctccgattcgtcctggtcggtacccagcaccccggcaacatgggcgctgccgcccgtgccctgaagaccatgggcctggcccgcctggtgctggtcgcccccgaaaaaccgctggacgaggaggctttccgccgctcggccggtgccgaagacgtgctgggggacgccccggtggtggccaccctggccgaggccgtggccgattgccgactggtgctgggctgcaccgcccgtgcccgccgcgtccagctggaggagtacctgccggccgatgccgccgcccgtgcggtggccaaggcgggcgagggcgccgaggtggcgctggtgttcggtcgcgagcgcaccgggctgaccaacgaggaactgcagctctgccatgcggcggtgcatattccatccgacccggcgttcagctcgctcaacctggcagccgcggtgcaggtgctggcctatgaagcgcgcatgcagctgctgggcgcgcagccggccgccgacgccgagccgggtttccgcgaacaggccgccagccatgagcagatggagagcttcttcgcccagctcggcgacaccttggacgagatcgatttccacaagggccgcgcaccggaatcagcgatgcgcaagctgcgccgcctgttcctgcgcagcgagccgagcgagcaggaagtgcgcctgttgcgcggcatcctggccgacacccagcgcatggcgcgactggcacaagcgggcaacaaggacagctga

SEQ ID NO: 494543 - DNA, 933 bp, Stenotrophomonas maltophilia
atgaagcctgtgtcgggtctgcgaagggcagtgcagaggggactgctgagcctggtcatgatcctgctggccgggacggtgcatgcagcaccggacccggtgctggtgctgggccggatcagcgatgatcccaaggcccattacgagcagctgcagccgttgctggactatgtggtggcgcgcatgcatgacgtcggcatcaaggaggggcggatcctgatggcgcgcgacccgcagcagatggccagctatctgcggcgggggcgggtcgactgggtcacggaaacgtcgggtacggcggtggcactcggccagcgcagtggcgcgcggccgttgttgctgaccgagcgcaatggtgtgcgtgagtaccagaccgtgttcttcgtgcgccgcgacagtccggtccagcgcatccaggatatgcgtgggcatcgcttggcgttgcagaacacggcgtccaccagtgcctacctggtgccggtgatgacgctgctgcaggaggggctggcgccgcagatcctggccggcgtgtgggacatgccgggccgggacagtgtggggtatgtgttcgcgcgcagcgagttgaacatcgctacgttcgtgcacaagggcgtggttgacgtgggggcggtgagcagcgtggactggaacgacgagcgacggatgccggcggcattccggcgcgacttccgcgagctgctgcgcaccaggccctacccgcgggcggtggagatggtgcgcgccgacctcgacccgcgggtgcgtgaccggctgcaggacgtcctgctgcaggcggccagtgacccgcaggcgcagggggcgttgcatcggtttttcggtacttccggtttccaccgcgtcgatgcgcatgcgcagcagcggctggatgaattgaaacaaggattgacgcgcgtgcggatggaagtggaatga

SEQ ID NO: 494544 - DNA, 2127 bp, Stenotrophomonas maltophilia
atgaagtggctcggctcgggaatgcaggcccggttcctgctcgcgatgggcggggcgatggtcgtggtggtggcgatcctggcagtgttgctggggcggcaggcggcgatgcagggcgaggtgcgcaacctcagtggtggcgtcatccatgaactgttcgaccgcagcgtgcgcagccgcggcgaagcgatggcgcgcgagctgtccgacgcgctggccaacccgttgtactaccgcgacctggaccaggtcggtgcgctggtgcgcagcaccgcacggcagccggtcgtgcgctatgtgctggtgttcgacgaccgtggccggctggtgcatgacggctcgatcgaggtgtccggcttcggccagccgatggccgacccgctcgctcccaaggccgcggtggcgcaggcgctggtggtgcaggaatcgcccaaggtgctcgacaacaccatgccgatcatggtcggcaaccagcgcatcggcggcgtccgcgtcggcatggcgctggacgaggtgcagcagcgcgaacaggcagccaatgccacgctcggcgagcgcctgcagcaggtcggcagccgccacctgggctggctgctgctgatgctgggcctgctggtggtgatcggcgtggcggtgatcctgtacgtgcagcgcaccctggtggcgccgatccgggacctggccgctgcggcacgccgcatcgaggctggcgactaccaggcgccgctggccgagaacacccgcaatgacgaggtcggcgagctggtgcgcggctttgcccggatgcgcgattccatcgcccgccatgaccgcgaggtgcggcgcatggcctataccgatgcgctgaccgggttgaccaaccggctggcgttccgggaagcactggaccatcgcctgatggcggcgcgcgcatccaatcatcggctgggcctgctgttcgccgatatcgacgacttcaagcgcgtcaacgatacccttggccatgaggccggtgacgaagcgctgttgcagttcgcacagcgcatcgggcgcgcggttgccgaagcgggaggcgatgaggcgctgctggcccgcttcggcggcgacgagttcgtgatcctggtcggcgatggcgacgtggccgcgaacgcccggctgctggccgaggtgctggtgcgcgaactgggcaagccgctggtggtacagggcagggagctgttcctggggacctcgatcggcgtgaccctgttcccggacgatgccgccgatgcgaccacgctgctgaagaacggcgacatcgccatgtaccaggcgaagatggccggcaagaactgctaccgccattacagccgggcgatggaccatgcggtcgagcgccgcgtgcacatggagcaggaactgcgcggggcctgggagcgcggcgagctgcgcctggcctaccagccgatcttccgcatgcgcgaccggcgcatggtcggcgtcgaagtgctgctgcgctggcagcatccgaccctgggtacgattccgccgtcggtgttcatcgaagtggccgagcagagcgggctgatcgagatcatcggcccgaaggtgctgcgtgcggcctgcatggaagcctcgcagtggccacggggtgcgggcggcgacgatctgttcgtgtcggtgaacgtatcaccgcggcagctgcgcggcggcgagctgccggcgctggttgcacagtgcctgcatgagtccgggctaccggcctcgcgcctgcacctggagctgaccgaaaccgcagtgatcggcgacgagatggttgccgcgcagctgctggacaagctgcaccgcactggcgtgaaggtctggctggatgatttcggaacgggcttctccggtctcagccacctgcgccaggtgccggtggacggcgtgaagatcgacaagagtttcgtggccgacatgcagcgcgatcccgacgatctggcactgaccacggccatcatcgccatggcccacgcgctgggcatcacggtggtggccgaaggcatcgagcagcaggcgcagttcgaactgctggtgcagcgcggctgcgatcttggccagggctactggctgagccacccggtgaccgccaccgaagtggtgcggatgatcgaatcgggtctctga

SEQ ID NO: 494545 - DNA, 1017 bp, Stenotrophomonas maltophilia
atgcagctttccgccttcccccggccccagtcgccaggcgcgcccgcgcgctggcagcagctctggcgccaggcgctgcgcgacccgcacgccctgctggcccggctgcagctggacccggccgcgctgggtgtctcggaggcggccattgcccagttcgcgctgcgcgtgccggagggcttcgtggcgcgcatgcgcgtgggcgacgcggccgacccgctgctgcgccaggtgctgcccgtcgacgaggaaatgcgcccggcacccgggttcagtttcgatgcggtgggtgatggtgccgccaggaaggccaccggcgtcatccagaagtaccgtggacgcgccctgctggtcgccaccggcagctgcgcgatcaactgccgctactgcttccgccgccacttcgactatgccgcggaaaacgccgccaagggcggctggcaggaggccgtagcggccatcgcggtcgacccggacatcgacgaggtcatcctgtccggcggcgacccgctgtcactggccacgcacaagctggccgagctgaccgatgcgctgcgcgcgatcccgcacatccgccgcctgcgcatccacacccggctgccgatcgtgctgccggagcgcgtggacgaggagctgctggcctggctgggcagcctgccgtggccgctggcgatcgtggtccacgccaaccatgccaatgagttcgacgccagcgtggacgctgcgatgagccgcctgcgcggcgtcggcgcccagctgctgaaccaggccgtcctgctgcgcggggtcaacgacagcgtgcaggccctgcaggacctgagcgagcgcagcttcgccgccggcgtgctgccctattacctgcaccagctggaccgggtcgagggcgtggcccacttcgaagtggacgacagccaggccaaggcgctgattgccggcctgaccgcacgcctgtccggctacctgattcccaagctggtgcgcgaagtgcccggcgacccgagcaagcgcccgctgtaa

SEQ ID NO: 494546 - DNA, 567 bp, Stenotrophomonas maltophilia
atggccagctacggcatgaacgacgtcaagaacgggatgaagatcctggtcaacaaccaaccggccgtcatcatcgacaccgaatacgtcaagccgggcaagggccaggccttcacccgcgtgaagtaccgcctgatcaaggacggccgtacccaggaagtgaccatgaagtcgaccgactcgctggatgcagccgacgtcgtcgataccgacatgaacttcatgtacagcgacggcgagtactggcacttcatggacccggaatccttcgagcaggtccaggccaccaaggccggcatgggcggcgccgagaagtggctgaagggcgaggagtcctgcgtggtcaccctgtggaacggtgagccgatcttcgtgcagccgccgaacttcgtcgagctgaagatcaccgaaaccgatccgggcgtccgtggcgacacctcgggcggcggcggcaagccggccaccctggaaaccggcgccgtggtccgcgtgccgctgttcgtgaaccaggacgaagtgatccgcgtcgacacccgttcgggcgaatactccgcacgcgtcaagtaa

SEQ ID NO: 494547 - DNA, 1344 bp, Stenotrophomonas maltophilia
atgagcgatagcccgcacctccccgaagcctgcgacctgctcatcgaagccggttacgtcgttccgatcgagccgcatgcggtggtgctggaagaccatgccgttgccgtgcgtggcagcgagatcgtggccatcctgccgcgtgccgaggcgcgcgcacgcttccgcgccacccaggtggtgagccgacccgaggctgcgctgatgccgggcctggtcaacgcgcacacgcacaacccgatgaccctgctgcgcggcgttgccgacgacctgccgctgatgacctggctgcagcagcacatctggccggtggaagcggcggtgatcggccccgaattcgttgccgacggtaccaccctcgccatcgccgagatgctgcgcggcggcaccacctgcgccaacgagaactacttcttcggcgacgtgcaggccgcggtctacaagaaacacggtttccgcgcgctggtgggcggggtcatcatcgatttccccaccgcctgggccaagaccgacgacgagtacttcgccaaggccggtgaactgcacgaccagtggcgcaccgatccgctgatcggcaccgcgttcgcgccgcatgcgccttacacggtcaatgatgccaacttcgagcgggtgcggatgctgtccgaccagctcgacatgcaggtgcacctgcacacccacgagaccgcgcaggaaatcaacgattcgatcaggctgcacggccagcgcccgctggcgcggctggatcggctcggcctggtcaacgaccgcctgatcgcggtgcacatgacccagctgaccgatgcggaaatccacctgtgcgccgaacgtggcgtcagcgtggtgcattgcccggaatccaacctgaagctggcctccggtttctgcccggcctgcgccctgcagcgcgcaggcgtgaacctggcgatcggtaccgatggctgcgccagcaacaacgacctggacatgttcagcgagaaccgcaccgcggcgatcctggccaaggccgtggccgacgacgccactgcactggacgcggcaaccacgctgcgcgcgtccacgctgggtggcgcacgcgcgctgggcttcggcgaccgcatcggctcgatcgaagtcggcaagcaggccgacctggtctgcgttgatctgtccgcgctggaaacacagccgctgcacaacgtgctgtcgcagctggtgtacgccaccggccgccagcaggtcagcgatgtctggatcgccggcaagccgaagctggtgcagcgcgagctggtcggcatggacctgccgggcatcatcgccaacgcgcgccagtggcgcgagcgcatccgccatatccgcgcctga

SEQ ID NO: 494548 - DNA, 717 bp, Stenotrophomonas maltophilia
atgactgccccccacgcttcctcaaatttcgatcaggccgagctggacaagttcgctgcgctggccaaccgctggtgggacgctgacggcccgcagaagccgctgcatgcgctgaatccggtgcgcctgcagtacgtggctgaccgcgtgccgctgcgcggcgcacgcgtgctcgacatcggctgcggtggcggcctgttgagcgaagcgctggcccaggccggtgctgacgtcaccgccatcgacctggccccggagctggtcaaggtcgcgcgcctgcatgcgctggaaagcggcgcccaggtcgattaccgggtgcaggcggccgaggatctggccgccgagcagccgggcagcttcgacgtggtcacctgcatggaaatgctggagcacgtgccggacccgggcgcgatcatcgaggcctgcaagcgcctgctgaagccgggcggccacctgttcctgtcgaccatcaaccgcaccgccgccgcgttcgcggtggcgatcgtcggcgccgagtacgtggcgcgcctgctgcccaagggcacgcaccactaccaggaattcatcaagccggccgagctggcgcgctggctgcgcgaggccgacctgcagctggtggatgtcagcggcatggcctacgagccgtggcgcaaccatgcccgcctgagcagccgcaccgacatcaactacctggcctacgcggtcaagccggcatga

SEQ ID NO: 494549 - DNA, 696 bp, Stenotrophomonas maltophilia
atgaccgccgcccgcttcccgcgtgcggtgctgttcgacctggacggcaccctgctggacagcgcgccggacttcgtcgccatctgcaacgcgatgctggccgagcgtggtcgtgcgccgatcgatccggcggtgctgcgcccggtggtctccaagggctcgcgcgcgatggtcggggccgctttcccggacctggatgccgctgcgcgagatgcactgattccggaattcctgcagcgctacgaagcgctgatcggccagcacgcggtgctgttcgatggcgtggccggcatgcttgccgcgctggatgacgccggcaccgtgtggggcatcgtcaccaacaagcccgagtacctggcgcggctgatcctgccgcagcacggctggcagcagcgctgtgcagtgctggtcggcggtgacagcctggccgagcgcaaacctcacccgctgccgctgctgcacgctgcgcaggccattggcgttgctgccgaagactgcgtgtacgtgggtgacgacgagcgcgacatcatcgccgcgcgagccgcggccatgccgtcggtggcagccctgtggggctaccgcctgcacagcgacgatccgctggcctggcaggccgacgtgctggtcgagaacgctgaacttctgcaactggccagtctctggccgacccggccggcagccccggcccagccgtaa

SEQ ID NO: 494550 - DNA, 705 bp, Stenotrophomonas maltophilia
gtgagcagtaccgcgctggacagtttcctcgacaagtggcgcagccgttggccggaatggtcggtggccgccccgttcgtggccgaatcgcaacgcgagcttgcagtggcgtggttcgcgctgctgcaggagttcgacgacatgctcaacaccagcggcgatccgctgccggccgacgccaagctggcgtggtggggcgaggagctgcgcagctgggcgggacatcgctcgcgccatccgctgggcaggctgctggagccggtgcgtgcaccgtgggcccagttggccgaagcacttccggatctggttgaagcgcgcacggtcgcgctggatgcggccggcgccgagcgcgcgctggcgaactacgccgaggccgtagccgcggtggaggcggccttgttcgctgacaagccgcgcaccggcgccggtcgtgcggtgcagctgcagaccttggcgcagcgcctgcaggacgctggcgtggcgggtgtgccgcgcagcctgctggacgaggacgccagcaatgccgcacagcgctgggcgcagcatctgttgaaggggtggggcacccgcgtgcccggcccgcgcccgcgccgcgtgtggtccagcctggcgcgtgcgcgggtggcggcacaggccgcaggcaagccgatcgaggccaccccggtgcgcaccctgctgcgcgtgtggtgggccgcgcgcggttga

SEQ ID NO: 494551 - DNA, 846 bp, Stenotrophomonas maltophilia
atgcgctcggcacttctgatcggggcgctgctggccgcgcccctgttttccgtacccgcggcgcaggcgcaggatggcattggcagcctgatcgacagccgcgtggtgttcccggccagtgcgtcgcagggcgcactggtgatcggcaaggttcccgccggcagccgcgtgcagtacgccggtcgccagctgcgggtgagcggctacggcagcgtggtgttcggcattggccgtgacgagaagggcccgctgcgcgtgcaggtgcagcgccccgatggtggcagcgagaccgcgaccattgcggtgacgccgcgcgactggcccacagagcgggtcaatggtgtgccgccgaagacggtcaacccgccgccggcaattgccgagcggatcaagcgcgaacaggcgcaggtgactgccgcgcgtgcccgcgatgacgaccgtaccgacttcacccagaccttcatctggccggtgcagggccgcatcagcggccgcttcggcaatgcgcgcgtgtacaacggccagcccggtgccggtcattccggcatggacatcgcggcgccgaccggcacgccggtgaaagcaccggccgccggcatcgtcaccttcgccggcccggacctgtacctgaccggcggcacgttgctgctcgaccacggcttcggggtcagctccaacttcctgcacctctcgcgcatcgacgtaaaggtcggcgaccgggttgaacagggccaggtgatcgctgcggtcggcgccaccggccgtgccaccggcccgcacctgcactggggcatgaactggttcgagacccgtatcgacccgctgctggtgctggagcgcaagtaa

SEQ ID NO: 494552 - DNA, 1347 bp, Stenotrophomonas maltophilia
atgtcctccaccctcatcaccaatgcccgcatggtcaacgaaggccgcaccttcgacggcgacctgcgcatcgagaacggccgcatcgcgcagatcggcaacgggctggcgccgcgcgacggcgagcaggtggtggacgcggccgggcgctggctgctcccgggcatgatcgatgaccaggtgcacttccgcgaaccaggcctgacccacaagggcgacatcgccagcgaatcggctgcggccgtggccggtggcctgaccagcttcatggacatgcccaacaccaacccgccgacgctggattcgaccatcctggaagccaagtacgagctcgcgcgcggccgcgcctgggccaactacggcttctaccacggcgccagcaatgacaacctggacgccatccgtgcgctggacccgaagaaggcgccgggcgtgaaggtgttcatgggtgcttcgaccggcaacatgctggtcgacaaccccgaaacgctggacgcgatcttccgcgaatgcccgaccccgatcatcacgcactgcgaagacacgccgatgatcgatgccaacctgaaggccttccaggaaaagtacggcgatgcgctgaccccggacatgcacccggacatccgctcgcgcgaagcctgcatcaagtcgacccgcctggcgatgtcgctggcgcgcaaacacggcacccgcctgcacgtgctgcacatctccaccgccgatgaactggcgctgttcgagaagggcccgctgatccgcgccgatggcagccgcaagcagatcaccgctgaaacctgcgtgcacttcttgcacttcgcgcgcccggactatgcgaccaagggcaacctgatcaagtgcaacccagccatcaaggaagtgtccgaccgcgaagcgatcaccgctgcgctggccgacgacgtgctggacgtgctggctaccgaccacgcgccgcacacctgggaagagaagcagaagccctacgcgcaggccccctccggcctgccactggtgcagtacgcgctggtggccgcgctggagcgcgtgcacgaaggcaagctgacccgcgagcaggtggtgcagaagttcgcccacgccccggcgcagctgttcgacgtggaagaacgtggcttcctgcgcgaaggctacttcgccgatctggtcctggtcgaagacgtgccgttcacggtcaagcgcgaggacgtgctgtccaagtgcggctggtcgccgtttgagggcaccaccttccgttcgcgcgtcgcctccacctgggtcaacggccagctggtgtgggacggcagcaacctggtgggcgaacccgccggccagcgcatgacctacgaccgctga

SEQ ID NO: 494553 - DNA, 1227 bp, Stenotrophomonas maltophilia
gtggctgctaaaaaaactgcaaagaaggccgcaacggccgccaagaaaaccgccaagcctgttgtgaagaagttggcggcaaagcccgttgccaagaagccggcgagcaagccggcgaccaaggcagcgtcctcgcaaccggcggccaggaaggccaccgcaaagaaaacgccggtcaaggcaaccaagccggtggcgaagaaggccgctgcgcccgccaaggccaagccagccgctgccagcaagaaggcgccggtgaaaaaggccgtcagcaaggctgcgccggtgaagaagaccgtcgccaagccggtggtcaagaaggcagcagccaagccggcgccgaaggcggtggtgaagaaggctgcagccaagccggtcgccaagccggcggcaaagaaggtcgctgcggccaagccggtcgccacgcctgccgctgcaaagaaggttgccaagaatgttgccgcaccggccgtaaagccggccccggccccagtagtgaagtccgcaccgaagcctgctgccaagccggctccggccaagcctgtcccggccaagaccgtggcagtggcagcagcccaaccggcctccaagccggccccggccgccgctcctgccgcttcgaaggccccgcaatccaagaatcccgtgcccgtttcgaaatcgcctgccaaaaccgccgtgaaatccgattccgccccgaagaccgtgtcgcgccctgtcggcaaggttgccgtggccgtcgccgcccgctcggcagcaccggccccgcgcagcaagtacaaggtggtcgaatacaagaccgacgaggccaccggccgcccgatcctgccggctggctacaagccgtcctcggaagaggaatacatgagcccgctgcagcaggagtatttccgccagcgcctgcagaactggcgcgcggacctggtggaagagtccaagcagaccatcgagaacctgcgcgaggaagtgcgtgacatcggcgacgaagccgagcgcgcgacccgcgagaccgagaactcgctggaactgcgtacccgcgaccgctaccgcaagctgatcggcaagatcgacagcaccctgaagcgcctggaagcgggcgactacggttactgcgtcgacaccggcgaagaaatcggcctggagcgcctggaggcgcgcctgaccgccgagcgcaccatcgatgcccaggagcgttgggagcatctgcagaagcagcagggcgactga

SEQ ID NO: 494554 - DNA, 1248 bp, Stenotrophomonas maltophilia
gtgagcgagcctgccacagccgaagacagcgcgctgggcctgctgtcccggcccggtttcgccaggctgctggcgtaccgcatcttcgcgatgctgtcctaccaggtggtcgcggtcaccgtcggctggcacatctacgaagttacccgcaatccgttctcgctgggcctgatcggcctggccgaggtgctgccgttcttctgcgtggcgccgttcgccggttacctggtggatcacctgccgcgccgccgcctgggcatggtcgcctgttgcggactgatcgccaccgcactggtattgaccagcgtggccatgggctggctgccgatcgacggcgtgtggccgatctacgcagccattgcactgaccggcatggtccgcgccttcctgtcgccgatctacaacgccctgttcgcccgcgtactggcccgtgaccagttcgcgcgtggcgccggcctgggcgcggtggtattccaggccggcatgatcgccggcccggcactgggcggcgtgctggtcggcttcggtggcaagggcctgtcctacgcggtggccaccgccttcgcgctggtggcgatggcctgtctggccacgctgaaagtggaggagccggtgcacaccggccctgccgcgccgatcttcaagagcatcgccgaaggcgcgcgcttcgtggtcggcaaccggatcatggtcggcgcgatggcgctggacatgttctcggtgctgctgggcggcgtggtggcgatgctgccggcgttcctgcacgaaatcctgcaccacggcccggaaggcctgggcatcctgcgcgcgatgccggcgctgggctcggtgtgcgtgggcctgtggctggcccgccacccgctgcaccgcaatgccggccgcgtgctgctgttcgcggtggccggcttcggcctgtgcgtgatcagcttcgggctgtcgcagcacttctggctgtcggcgctgatcctgctgttctacggcgccttcgatggcgtctcggtggtgatccgctcgaccatcctgcagctggccacgccggaagaaatgcgcggtcgcgtatcgtcgatcaacggcatcttcatcagttcgtccaacgagctgggcgcgttctatgccggcacgatggcgaagctgctcggcctggtaccggccgtggtgctgggcgggttcgcggtgctgagcgtggccgggatcaccgcgtggaagaacccgacgctgcggaagttgaatcttcgcgacctgcagtga

SEQ ID NO: 494555 - DNA, 453 bp, Stenotrophomonas maltophilia
gtgaccgactccccgttcccgcttgaacccaccgccgccgaggcacaggccgccatcgccgaggaattcggcttcttcggcgactggtccgagcgttaccagtacctgatcgacctcggccgcaagctgccggccttcccggaagaatggaagaccgaagagcatcgcctgctcggctgccagtcgatggtctggatcgtgcccgaaggcaacgcgcagtcgctgcgcttccatgccatcagtgattcggcgattgtctccggcctgatcttcctggccctgcgtgtgtactccgggcgctcggcgcaggagatcctggccaccgagccgagctacatccaggacatcggcctggcccgccacctctcgccgacccgcagcaacggcgtggcggcgatgctggccttcatccgcgagaccgcgcaggcccagctgcagcgcgacccgtcgtga

SEQ ID NO: 494556 - DNA, 1377 bp, Stenotrophomonas maltophilia
atgaccctgcgcctgcacaacaacctgactcgccagctcgaaccgttcaccccgctcgatccagcctgtccgaccctgtatgtgtgcggcccgacggtctacaactacgtgcacatcggcaacgcccgtggcccggtggtgttcggggtgctggccgacctgctgcggcgccgtttcggtggcctgcgctacgcgcgcaacatcaccgacgtggacgacaagatcaacaccgccgcgcgcgagcagggcgtaccgatcagcaccatcaccgacaggttcgccgccgcctaccgtgaggacatggccgcgctgggcgtggtgccgccggacatcgagccggaggtgaccgcgcacattccgcagatcatcaccatgatcgagcagctgatcgccaacgggcatgcctacgctgccgaaggccacgtgctgttcgcggtggccagcttcgatggctacggcaagctctcgcgccgcgatccggacgaaatgctggccggcgcccgtgtcgacgtggccccgtacaagcgtgatccgggtgatttcgtgctgtggaagccgtccagcgacgacctgcccggctgggcgtcgccctggggccgtggccgcccgggctggcacatcgagtgctcggcaatggccgccgcccacctgggcgagaccatcgacatccatgccggcggcgtcgacctgcagttcccgcaccacgagaacgagcttgcgcagagcgagtgcgcccacggcggcaagatcttcgcccgcttctggctgcacaacggcatgctcaacttcggcggcgccaagatgagcaagtcgctgggcaacatcgagcgcgtgcacgacctggtgcgccagcacccgccggaagcactgcgcctggccctgctgtcggcccactaccggcaaccgctggactggtccgatggcctgatcgaacagtcggtgcgcaccctggaccgcctgtacggcaccttgcgcgaactggcgtcagtcgaggcggtcgttgcgatcccggccacggtcgaagcgaccctggatgacgatctgaacaccccgcaggcactggccgaagtggcccgcatcgccgccgatgcgcgtcgtgccaccgatccggccgagcaggcgcgcctgaagggtgaactgctcggtgccggactggcactgggcctgctgcaggccgatccagcgcagtggttcggcactgcggccagcgacggcggtgacgatgcccgcatccagggcctgatcgatgagcgtgccgcggccaagaaggcgcgcgacttcgcccgttccgacgccatccgcgaccagctggccgccgaaggcatcgtgctggaagacaccccgcagggcgtgcgctggtcgcgcaagcgcggctga

SEQ ID NO: 494557 - DNA, 564 bp, Stenotrophomonas maltophilia
atgaaatccaccgcgttgctgaccctggcctgcctgtcggcgctgcccgccgtggtgctggcgcaggaggccgagccccgcaaccgggtggtgatcgttgagaacgtgaagttcgactacgcccaggtgctgaacgtggagccggtgttccagaccctgcgcgcgacccgcaccgaggagcactgcgagccggtgtcgacccggaccctggccccggtgaacgtgaccggcgaggagccggtcgaggacaagggccggatcagccgcttctgggactcggtgcgttcgatgttcaagcgcagcgacgaagaggccgttgaggagcccggagccgagacgccggccccggcaccggccaacactggcccgatgctgacccgcgactgccgcatcgtgccggtggggcgtgaattccgccggcccatcgcctacgacgtggattacgtctacaagggcaccaagtaccgttcgcggctgccggaagaccccggcaaccggctcaagatccgggtgtcgatcacgccctgggtcggcccggagcagggcacggccagcaatccctga

SEQ ID NO: 494558 - DNA, 1011 bp, Stenotrophomonas maltophilia
atgtcccccaagcacttcctgaacacccaggactggagccgcagcgatctcgacgcgctgttgacccaggcggcgctgttcaagcgcaacaagctcggcgaccagctcaagggcaagtcgatcgcgctggtgttcttcaacccgtccatgcgcacccgcaccagcttcgaactgggcgcgttccagctcggtgcccacgcggtggtgctgcagccgggcaaggatgcgtggccgatcgagttcaacttcggcacggtgatggacggcgataccgaagagcacatcgctgaagtggccaaggtgctgggtcgttactgcgacatcatcgccgtgcgtgcgttccccaagttcatcgactgggcctacgaccgccaggacatcgtcctcaacagcttcgccaggtactcgccggtgccggtcatcaacatggagaccatcacccatccgtgccaggagctggcccacatcatggccctgcaggagcacttcggcacccaggacctgcgtggcaagaagtacgtgctgacctggacctaccaccccaagccgctgaacaccgccgttgccaattcggcgctgaccatcgccacccgcatgggcatggacgtgaccctgctgtgcccgaccgccgactacatcctcgacgagcgttacatgggctgggccgagcagaacgtggccgagagcggcggctcgctgaagatcagccatgacatcgacagcgcctacgccggcgccgacgtggtctacgccaagagctggggcgcgctgccgttcttcggcaactgggaaccggagaagccgatccgcgaccagttcaagcacttcatcgtggacgagcggaagatggcgctgaccaacaatggtgtgttcagccactgcctgccgctgcgccgcaacgtgaaggccaccgacgcggtgatggattcgccgcagtgcatcgccatcaacgaagccgagaaccgcctgcacgtgcagaaggcgatcatggcggcggttgccgggcgctag

SEQ ID NO: 494559 - DNA, 1197 bp, Stenotrophomonas maltophilia
atgagcaacaaagacgtcgttctcgccttctccggcggcctggataccagcttctgcgtgccgtacctgcaggagcgcggctacaacgtgcacaccgtgttcgccgacaccggcggcgtcgatgatgaagagcgtgatttcatcgagaagcgcgccgccgaactgggcgtggcgagccacctcaccgtcaacggtggcccggccatctgggaaggcttcgtcaagccgttcgtgtgggccggcgaaggctaccagggccagtacccgctgctggtctcggaccgctacctgatcgtcgatgccgcgctgaagcgtgctgccgagctgggcaccaacatcatcgcccacggttgcaccggcatgggcaacgaccaggtccgcttcgacctggccgtgaaggcgctgggcgactaccagatcatcgcgccgatccgcgagatccagaaggaacacacccagacccgcgcctacgagcagaagtacctggaagagcgtggcttcggcgtgcgcgccaagcagcaggcctacaccatcaacgagaacctgctgggcctgaccatgtccggcggcgagatcgaccggtgggaagccccgggcgagggtgcgcgtggctggtgcgcaccgcgcagcgagtggccggagcaggccctgaccgtgaccctgaagttcgttgaaggcgaagccgtcgaactggacggcaaggcgctgccgggcgaccagatcctggcccagctcaataagctgttcgccccgtacggcgtgggccgcggcgtctacaccggcgacaccgtgatcggcctgaagggccgcatcgtgttcgaggccccgggcctggtttcgctgctggccgcacaccgtgcgctggaagatgcggtgctgaccaagcagcagaaccgcttcaagccggacgtggcgcgcaagtgggtggagctggtgtacgaaggcttctaccacgacccgctgaagaccgacatcgaagccttcctgaagtcctcgcaggccaaggtcaacggtgaagtggtgctggaaacccgtggtggccgcgtcgatgccgtggccgtgaagtcgccgcacctgctcaacaccaagggcgccacctacgcgcagtcggccgactggggcgtggaggaggctgaaggcttcatcaagctgttcggcatgagctccaccgtttacgcgcaggtcaaccgcggttga

SEQ ID NO: 494560 - DNA, 1089 bp, Stenotrophomonas maltophilia
atgcttgaacagacgctcgatcacctgcaggccctggtgtccttcgacacccgcaacccgccgcgtgcgatcaccaccggtggcatcttcgattacctgcgcgacaacctgcccggcttcaacgtcgaggtgatcgaccatggcgcgggcgcagtcagcctgtacgccgtgcgcgggacgccgaagtacctgttcaacgtgcacctggacaccgtgccggactcgccgcactggagtgccgacccgcatgtgatgcggcgcctggacgaccgtgtggtcggcctgggcgtgtgtgacatcaagggcgccgccgctgcgctggtggcggcggccaatgccagcgatggcgatgccgccttcctgttctccagcgacgaggaagccaacgatccgcgctgtatcgccgcgttcctggcccgtggcctgccgtatgaagcggtgctggtggccgagccgaccatgagtgaagcggtgctggcgcatcgtggcatcagctcggtgctgatgcagttcgccggccgcgccggccatgcgtccggcaagcaggacgcggccgccagcgcgctgcaccaggccatgcgctggggcaaccgtgcactggaccatgtggaatcgctggcctcggcccgcttcggcgggctgaccgggctgcgcttcaacatcggtcgcgtcgaaggcgggatcaaggccaacatgatcgcaccggctgctgaggtgcgcttcgggttccgcccgctgccgtcgatggacattgatggcctgctggcgaccttcgccggtttcgccgaaccggaagccgccgtgttcaccgaaacgttccgtggccccagcctgccggccggtgacatcgccgaggccgagaaccgccgcctgctggcgcgcgatgtggccgatgcgctggagctgccgatcggcaacgcggtggacttctggaccgaggcctcgctgttctccgccggtggctacaccacgctggtgttcggcccgggcgacatcgcccaggcccacaccgccgatgagttcgtgacgctggagcagctgcagcgctacaccgacgccgtgcatcgcatcatcgccgccggcgcctga

SEQ ID NO: 494561 - DNA, 1329 bp, Stenotrophomonas maltophilia
atgtctcctgccctccagccccaccgccagacccgccagaccatcgtgcgcctgctttccagcatggccagcgcgaaggagatcagccagtacctcaagcgcttctcgcagctggacgccaagcgcttcgccgtggtcaaggtcggcggcgcggtgctgcgcgacgacctcgacgcgctgacctcttcgctgtcgttcctgcaggaagtcgggctgaccccgatcgtgctgcacggcgccggcccgcagctggatgccgaactgtcggccgccggcatcgagaagcagaccgtcaacggcctgcgcgtgacgtcgccggaagcgctggcgatcgtgcgccgggtgttccagcagtccaacctgcgcctggtcgaggcgctgcagcagaacggcgcgcgcgccacctcgatcaccggcggcgtgttcgaggcccagtacctggacgtggacacctacggcctggtcggcgaggtgaagaaggtcaacctggcaccgatcgaggccagcctgcgtgccgggtcgatcccggtcatcaccagcctgggcgagaccgctggcggccagatcctcaacgtcaacgccgacttcgccgccaacgagctggtgcaggaactgcagccatacaagatcatcttcctgaccggcactggcggcctgctggacgagcagggcaacgtgatcgattcgatcaacctgtccaccgagtacgaccacctgatcgcgcagccgtggatccacggcggcatgaaggtgaagatcgaacagatcaaggatctgctcgatcgcctgccgctggaatcgtcggtgtcgatcacgcgcccggccgatctggccaaggaactgttcacccacaagggttcggggacgcttgtgcgcaagggcgagaaggtgctgcgcgccaccgcctggaacgcgctggacctgccgcgcctgaagggcctgatcgaatccagcttcggccgcaccctggtgccggagtacttcgaaaagacgaagctgctgcgcgcctacgtcagcgagaactaccgcaccgcggtgatcctcaccgacgaggccgagggcgtgtacctggacaagttcgccgtgctcgacgatgcgcagggcgagggcctgggccgcgcggtctggaacgtgatgctggaggaaaccccgcagctgttctggcgttcgcgccatggcaatccgatcaaccacttctattacgctgaatccgacggctgctacaagcaggaccactggaaggtgttctggttcggcgccgacggcatcgaccggatcaagacctatgtcgaccattgcgctcggcgcgcgccgagcctgcagggctga

SEQ ID NO: 494562 - DNA, 600 bp, Stenotrophomonas maltophilia
atgaaccatgccgactggaccaaggtccctacgctggcgggcacccatgcgcggctggagccgctgcagatggggcatatcgatggcctgcgcggcgcgcttggcgatggcgcgttgtccaggctctggtacacccaggtgcccgatgcgaagaccatggccggctacgtgcaggcagcgctgcaggcgcaggccgaaggcagggtgctgccgttcgtggtgttcgatgccaacgaccagattgtcggcaccacccgctactacgatctgcaagcggacgtgccgcgcctgagtatcggttacacctggtatggcgagtctgcgcaacgcaccggggtcaacaccgagaccaagctgatgctgctcagccacgcgttcgagcggttgcagtgcctgagcgtcgtgttcgagaccagctggttcaacttcacttcgcgcaccgccatcgcacgcctcggcgccaagcaggatggcgtgctgcgcaaccacaagcggcacgccgacggcacgccgcgcgacaccgtcatcttctccatcatcgatgcggaatggcagggcgtgaagcgccacctgcagtaccgcctggacagccacgcatga

SEQ ID NO: 494563 - DNA, 954 bp, Stenotrophomonas maltophilia
atgaacgattcgactttcaccctgggcatcgtcggggcccgcggccataccggcgccgagctgatcaagctggtggccgcccatccgcgcctggatctggccttcgtctcctcgcgcgaacgcgccgggcagcgcctgtccgaccaccacccggaattccagggcgagctgcagtacgagaacctggatgtcgacgcggtggccgccaaaggcgtggacgcggtaatcctggccctgcccaacggcctggccgcaccgttcgtggccgcgcttgaagccgccaagccggacaccgtcatcgtcgatctctcggccgactaccgcttcgacaacagctggtattacggcctgccggagctgacccgcggccgctacaacggccagaagcacatcagcaacccgggctgctatgccacggcgatgcagctggcggtgcatccgctgctggacctgctggccggcccgccgcagtgcttcggtgtctccggctactccggtgccggtaccacgccgtcggacaagaacaacgtcgaactgctggccgacaacctgatgccgtatgcgctgaccaaccacgtgcacgagcgcgaggtgtcggtgcagctgggcgtggccgtcgagttcatgccgcacgtcgcgccgcatttccgcggcatcacgctgaccgccaacctgtggctgaaccgcgtgcagacccgcgaacagatcgtcgagcgcttccagcaggcctatgccggcgaacccctgatcgaagtggtggatgaagcgccgtgggtcagccgcatcgccggccgccacggtgcccaggtcggtggcttcaccctggccccgggcggcaagcgggtggtggtggtggcgaccctggacaacctgctcaagggcgcggccacccaggccatgcagaacctcaacctcgcgctgggcatcgacgaactgacgtcgatcccgcactga

SEQ ID NO: 494564 - DNA, 1296 bp, Stenotrophomonas maltophilia
atggcagaccttctttggcagaagcccggcgtcgctgtcgacgcccagatccagaccttcctcgccggcgacgacgtgatcctcgaccgcgagttcttcctgcatgacatcgctgccagcgccgcgcatgcgcagggcctgcagcacatcagcatcctcagcgccgacgagctggcaggcctgctgcgcgagctcgacgtgctggcgcaggatttccgtgaaggccgcttcgtgctggatacgcagtacgaagacggtcactcagcaatcgaagcgcgtttgaccgaacgcctcggcgacgctggccgcaagatccacaccggccgcagccgcaatgaccagatcctggtcgccacccgcctgtggctgaaggagaagctgctgcgcgtggccgggctcagcaccgacgtggccaagatcgcgctggaccgtgcgcaggccgagaaggacctgccgattcccggctatacccatatccagcgcgccgtggtttcttcggccggcatgtggtgggccggatgggccgaggccttcatcgacaacgccatccgcgcccgtgacacccatgcgctggtcgacgccaatccgctcggcaccgccgccggctacggggtgaacctgccgctggaccgcgagcacaccacggccgcgctcggtttcgcgcgcatgcagatctcgccgatctacgcacagctgtcgcgcggtaagttcgagctggccgcgctggaagcactcggtggcgctacgctggacctgcgccgcatcgcctgggacctgtcgctgttcaccagcgccgagttcggcttcgtcgcgctgccggcgcagtacaccaccggcagttcgatcatgcccaacaagcgcaacccggacgtgatcgagctgatgcgcgcgacccacgccagcgtcgccgccgcgcgcaccgagatcgagcagctgctgtcgctgccttcgggctatcaccgtgacctgcagtcgtccaagggcgccatcttccacggcttcggccgtggcctggccgcgctggaactgctgccggcgctgctggccaatctggagtggcgtgacgacaggctgcgcgcagcgatcgattcgggcatgtatgccaccgacgtcgccgtggaagcggcggtggccggtgtgccgttccgcgaggcctacaaggccgctgcagccggtgccgacagcgcagggcagggacgtaccccggaaggcagcctggctgcgcgtgtatcgccgggctcggccgccgatctgcgcctggacgaactgcgcgcacgctggcaggcgctgtcctga

SEQ ID NO: 494565 - DNA, 264 bp, Stenotrophomonas maltophilia
atggcgggcactgtctacctggtgatggcgatgcgccggccggacttcaacgatgcggcggtgcagccgcaccgcgatttcctcgaggcgttgcaggcacagggaaggctgcagctgaccggtggtttcgccgatggcagcggtggcgcctatgtgctgtgcaatgtcgagagcctggaacaggcgcgggccatcgtcgccaccgatccgctggtgacgatgcacgcttccgagctgaccgtgcacgaatggaatacccgctga

SEQ ID NO: 494566 - DNA, 1158 bp, Stenotrophomonas maltophilia
atgaccctgcacgccgccaccgtcgcttcgccgttcccgcaacaggcgctgccgccatggcggcgtgcggtgctgaaggtcggcagcagcctgctggcggccgatggtggcggcctgtcgccacgccacgcgctgggcctggcccagtttgtatccgccaacgtactggctgggcgcgaggtggtgatcgtctcctccggcgcggttgcggcggggcgcgcgatcctgccgcgggccgatgaacccggtgcggcgatggcggcgcgccaggccctggccgcgctcggccaggcgcagctgatcgggctctggcagcgcttcttcgagcgcccggtggcgcaggtgctgctgacccacgacgacctgcgcaaccgccgccgctacctcaatgcacgcgccacgctgagcgaactgctgcggctgggtgcgctgccggtggtcaacgagaacgacaccgtatcggtggacgagctcaagctcggtgacaacgacaacctggccgcgaccgtggccgcgctggtcgatgccgatgcactgttcatcgccaccgacatcgacggcctgtacagcgcagatccgcgcaccgtggccgacgcgcggccactgcacgacgtgccggaactgagtgacgatgtgctggcgatggccggcggcgccggctcgcgcgccggcaccggcggcatgcgtaccaagcttgaggcggcggccaaggcgggccgccttggcatcgagacctacctgttcaacggccgcagcagcgatgtggtgcgcgcgctggcgcaggaccgcctgttcggcacccgcatccacgccgcacgcagccgcgaggctgcccgcaagcactggctgcggcacgcgccgctggccgagggcgcgatcgtcgtcgatgccggtgcggcacaggcgatgcgggagaagggcgcctcgctgctgcccggcggcatcaccgctgccgagggggcattccggcgcggcgacatggtggaggtgtgctggatcgcaccgcaggggcgtgtctgtgtcgcccgcggcgtcagccagtacgcggccgacgacgtgcgccggatcgccggccatcattcgcgcgacatccaggccgtgctgggctacaactacggtggtagcgtcgtccatcgtgacgacctggtgctgccatga

SEQ ID NO: 494567 - DNA, 1272 bp, Stenotrophomonas maltophilia
atgaccggtttgaaggacaccccgatgagcgaaatcgaagcccaggcgcgcgcctgccgtgatgcagcgcagatcgttgccggcctggacagtgcggcgcgacgcatgctgctgctggcgatggcgcaggccctggaagtaaatgccggactgatcctggccggcaacgcacgcgacctcgccgccgcgcgcgacaagggcgttggcagtgccatgctcgaccgcctcgcactggacccgccgcggctgttcgcgatggccgaggcggtgcgcgaggtggccgcgctgcctgacccggtcggccaggtgacgcgcgacgacgtacgtcccaacggcatccgcgtgcagaaggtgcgcgtgccgctgggcgtgatcgcgatgatctatgaggcgcgcccgaacgtgacggccgaagccgccgcgctgtgcctgaaggccggcaatggcgtgatcctgcgcggtggttccgaagcgatccactccaataccgccatcgcccaggcgctggccggtgcattgaaggccaacggcgtaccgccggcggcggtgaccgtgctcaccgacctgcgccgcgaggcgatgctggaactgctgcagctgcatgagctgatcgacttggccattccgcgtggcggcgaaggcctgatccgtttcgtggccgagcacgcgcgcgtgccggtgatcaagcattacaagggggtgtgccacctgttcgtggacgccagcgccgacctcggcaaggccatcgacctgctggtggacggcaagtgcagccggccggcggcgtgcaattcgctggagacgctgctggtgcaccgcgccgtggctgacgcgttcctgccgcgcgtggcgcaggcgctgggtgagcgtggggtgcagctgcgcgccgatgcgcaggcgcagccgttgctgccgggcagcacggcggcgaccgaggaggattacgccgccgagttcctcgatctggtgctggcggtgcgcgtggtcgatgatcttgatgcagccatcgcgcacatccgcacctatacctccgaccacaccgaagtgatcgccaccgaggacaccggccacgccgagcgcttcgtcaacgcgctgcgctcggcggtggtgatggtcaacgcttcgtcgcgcttctccgatggtggccagctgggcctgggcagtgagatcggtatttccaccacgcgcctgcacgcctacggcccgatgggcttggaagccctcaccgttgaacgatttgtcgtgcgcggcgaagggcagacgcgtacataa

SEQ ID NO: 494568 - DNA, 471 bp, Stenotrophomonas maltophilia
atgaacgcgcaacgcccgtccaaccgcttcgactcgcggatgatccgcaagccgcatcgccagccacacttccagcgcacggcttggggcttcgtcaccctggcgttctggggcttctacttctatctgtgggcccccctggtgaccctgctctcgtggttgatcggtggccagctggcctggcggcagctctacgaacggcagaaccagttcgacccgtacgtgctggtcgcgctgccattgatgctgctgtgcgccagcgtgctgctgatcgcctgggccgagtacaaccgcgcccgcttccgtggccgcgaacgccgcctgccgcggcccctggccagcctcaacgaagtggccgccgatctgggcgccagcaccgggctggccgaacgcctgatgggctgcaaggccgccacgctgcacatggatgatcacgcacggccggtcggcatccgccgcgaggtggtgtag

SEQ ID NO: 494569 - DNA, 1257 bp, Stenotrophomonas maltophilia
gtggacatgcatccgctgctgcaggtcctgttccagttcgccttctactacccgatggtgatggcgttcttctggatgtccggtggcctgtactactacttccggcgcgagcgtcactcacgtccgcgcaacgatccgcccttgatgatcgcccctcccttcgcgaccttgctggtgccctgccacaacgaagcagaaaacctggacgacacgctcactgcggcgctggcccagcgctaccccgccgattacgaagtgatcgccatcgacgatggcagcagcgatgacaccggcgcacggctggatgcgctggcggcaaggcatccacggcttcgcgtgctgcacctggaccgcaacctgggcaaggccaatgcgctgcgcatgggcgcactggccgcacgctcggagtacctggtgtgcatcgatggcgatgcgatgctggaagagcatgcactgcactggatggtctggcacctggtcagtggcaaccgggtcggtgcggtcaccggcaacccgcgcatccgcaaccgctccaccctgctcggacgcctgcaggtggcggaattctcctcgatcatcggcatgatcaagcgggcacagcgcgtgtatggccgcatcttcaccatctccggcgtgatcgccggcttccgccgcactgccctgcaccaggtcggctggtggtcggatgacatggtgaccgaggacatcgacatcagctggcgcctgcagcgcgcgcactgggacatccgctacgaacccaatgcgctgtgcttcatcctgatgccggagacgctcaagggcctctggcggcagcgcctgcgctgggcccagggcggcgtggaagtgatgctgcgccacgcgcgctcgctgctgcactggaaagagcggcgcatgtggggcgtgctgctggagtacgtgctgagcgtggtctgggcctacacgatgctgttcatcgtgctgctgtgggcactgggcaagttcatcgagctgccgccgcagctgcatatcgccagcctgctgccggagtggcatggcgtgatcctggcgctggtctgcctgctgcagttcgccagcagcctcatcatcgaccggcgttacgaaacacagattggacgcaattacttctgggtcatctggtacccgatggcgtactggctgatcagcctttccaccaccctggtggcgctgcccaagacgctgctgcgccgtcgcagcaagcgcgccacctggaccagccctgaccgggggatccgatga

SEQ ID NO: 494570 - DNA, 1887 bp, Stenotrophomonas maltophilia
atggcccgcttcctgcgactgatcgtgctcctgctgctggcctgcgtgccaccggcgttcgcgcagcagcccctgcatcttgatgcgatcgacaacggcctgctgatcctcagctaccacgacatccgcgacaaggtggccgccaagggtgatgccgattcctatgcggtgagcacgcagaacttcgccgcgcaccttgactggctgggcgcgcacggctaccacccggtttcgctgtcgcagctgatcgaggcctcgcagggccgcgccacgctgcctcccaagccggtgctgctgaccttcgacgatggcctgcgcagcgtctacgacaaggccttcccgctgctgcaggcctaccactacccggccctggtggcggtgatcaccgattacgtggacatggcaccgggccgcaccatcgactacggctaccgcccgttcggccacgatgacttcgtgacctgggcgcagctgaagcagatgcacgacagtggcctgatcgaagtggccagccataccgacgacctgcaccacggcgtgcttgccaatccgcagggaaactccacgcccgccgtggtcacccgcatctacaccccggccacgcgcagctacgagagcgggacacagtatgagcagcgcctgcgcactgatctttcgcgcagcgtgcagcgcatccagcagcacctgggcgtgcgcccgcgcgccatcgtctggccatatgccgcgtacaaccagttgagcaacgacatcgccgagcagctgggcatgccggtttcgttcgacctggaaggccgtagcacgccagtggccagcgacctgcacgggctggcacgattgctggtgagcaacaacccgaccgtggaaggcctggcctacgaactgcgccgagacgtggcgctcgatggcatccgcgccctgcagatcgatctggatgacatgtatgacccggatccagcgcagcaggcacgcaatctcgatgcattgatcgagcgggtcaagcgcatcgcgccgacccatgtctatctgcaggcctttgccgacccggacggcaacaacaccgccgatgcgctgtatttcccgaaccggcacatgccgatgcgggcggacctgttcagccgcgtcgcctggcagctgaaatcccgcgcgggcgtgaaggtctacgcgtggttgccagtgctcggcttcgaactgcccgacccggagcagcgcaaggtgctggcgatccgcaatggggatgccgacggcatgtaccggttggatttcaccaacccgaaggccaggcagatcatgctcgacatctacgaggacctggcggtcaattcctacttcgaaggcctgctgttccatgacgacggctacctgcgcgacaccgagctgcccgccctggcggccggcgaagatggcagcgcacgtacccaggcactgatcgacttcaccctggctctgcgcaacagcgcgcagcgctggcggccgaaactggcaacggtgcgcaacctgtatgccgagccggtactccgcccgcagagcgaagcttggttcgcgcagcgcctggaactgttcaacaaggcctacgaccagacggcgctgatggcgatgccgtggatggaaggcagcaggcaccccgagcgctggctcgaccagttgctggccgcggtacgcgcgcacgacccgcagcttcagcacacgctgttcgagctgcagaccgtcgattggcgcagcgggcagccgattcccgccgggcgcctgcgtgcgcagatccgccagttgcaggcgcagggcgtgcaccacttcgcctggtaccccgatgacttcatcgccgaccagccctccacccgcgatgcccgcgcggcaatgtccgccggcaacttcccgtacccggagaagtga

SEQ ID NO: 494571 - DNA, 2028 bp, Stenotrophomonas maltophilia
atggttgtccaccgccggctggcgctctgcgtcggcctcgcctgcaccgccctggcctgggccagcagcgctgccccgcccgaccgcgaagcagcgttggccgagatcggccgctatcgagaccaggcgcgttggctggacgccctgggcgcgatcgagcgcgccagccaacagcaacccaacgacgacctgctgttcaagctgcgcgtattgacgctgggcgacatcggcaacgcctggcgtgcgtgggagctgtaccagcagcgcccgcaactgttcgacgctgcgcagaaacagcgcctggaaggcgactacctggccaagctggtggtctggagcctggcctacagcagcagcgaggacagccgcctggaagaagccgaatcgaccctggcccgcatgcagcgctacctcggcggcgaaggcaccccgccctcgcaggcaccactgcggatccgcatggaccggctgatcctgctcaaccggctgggccgccatgcacaggtccgcgaggaagcgcgggcactgcaggccgaaggccacaccctgcccgactacgtgctgcccgcagtgggcgattcgttgatgggcaccctgcaccctgaagaagccatcccggtgctgcaggcggccgtcgctggcgacccgacgcgcgacgcctcgcattcggaactggcttacgcctacctggaaagcgagcagcaggaaaaggccatcgacctgctgcaggcatggcgcgacaaggagccggcgtggcgctggagcaacggcaagtcgccgtacgcgaactggtcgcgctacgaggccgatctcaacctggcgatggtgcgcgcctacagcggcgacctgcacaccgcgcagcacgacctggagtcgatggtcgagatcgcacccggcaacggcgggctgcagagtgcgctgggcagcgtctacatgatgcgcggctggccacgccgggcgctgcagcgccagcagatggcacacgcgctcgatccgcgggacatcgaaccgcggctgggcatggaagaggcctatgtcgccctgcagcgcgacgacctggcgcggccgctgcacgatgacctggtcgcacgctaccccacccagccggcagtcgaacgcatggaccaggcctggcgcgcgcatcgcggctggcagctgaaggcatggaccgacatcggccgcagctccgggggcggtggtacttcgcccctgggcaacaacgaccgccactacggcgtggacgtggagacgccggtccttgatgaccgctggcggttgttcgccctcgccgaccgtcgcgtgaccgacttccaggaccagcgcatcgatcccctgtggctgggtgcgggcgtgcgttaccgcttcgggcagctggatgcggaagcggcggtcctgcgcgccaacgatcacatcggcgacaccggcctgcgcgtcggcgtcggctggcagttcaacgattcctggcacgccggcgtggtggtcgcacgcaatgacccggaggcctcgatgcaggcgcgcgcggccggcatcaccgccgacagtgtgagcgcacaggtggactaccggcgcagcgagctcacccactggacgttcggcgcgagccgcttccgctatgacgacggcaaccaccgcgagctgttcggcaccagcgtccaacagcgcctgctgacccgcccacgctggctggtcgatggcctggccagtgcctacaccagtcgcggcagccgcgatgatgcgccctacttcaacccgaagcgcgaccgcatggtcgagatcggcctgcgcatcgaccagcagctgtggcggcactacgagcgccacttccggcaccggctgaccgtctcgctgggcgactactggcaggacggcttcggcagcgcgctggtgccgtcggtgtcctacatgcacgagtggcagctgggccctggccgcgtgttcgagtatggcgtgcggtggtcacgaccggtctacgacggccatcgcgagcgccatatcggcttcgaagccgcattgcgctggggagactga

SEQ ID NO: 494572 - DNA, 1206 bp, Stenotrophomonas maltophilia
atgagttcctccccttccgattcgccgtcgctgctgcacggccgcgtcctcgcattcgccgcgatcctgctggcagcgatcaacctgcgcaccgcggtcacctcgatcaccccgctgctggacgtgctcggccagcagttcggtttcggtaccaccatgaccggcgtgctgggcatgctgccgaccgcgtcgttcgcactgttcggcgtggccacgccggcactggcgcggcgcctcgggctggagcgcaccacgctgctggcgatggtgatggcgatggccggcctgctgctgcgttccagcgccggcaacgtcggcacgctgctgttgggttcggtggtggcactggccggcatgggcatcggcaacgtggtggtgccgccgctggtgaagcgctatttcgccaacaaggtcggcaccatgagcacgctctacatcagcgtgctgcaactgggcacgatgctgccggcactgctggcggtgccggtggccaacgccgcaggctggcgcgtgtcgctgggcatgtgggcgctgctggcgctggctgccgcactgccgtggctggtgctggccacgcgcgcgccgaagccgcagtccgacgcgtccgatccgaccgcgcagccgcatggcaaggtctggcgcacgtcactgggctggagcatgacgctgatgttcggcatgacctcgctgatgacctactcgatgttcacctggctgccgcgcatcgtggtcgaggccggtggcacgcccgcgttcggtggcgtgatggtcgccgtgttctcggcgctgggcctgctgccatcgctggtcattccgtcgatggcggtgcgcatgcagaacccgttcccgctggtgctgatcggctttttctcgttcgtgatcgccttcaccggcctgctgctggcaccgatgaaggcccccctgctgtgggcctgcctgctcggcgtcggcccatccaccttcccgctggcactgaccctgatcaacctgcgcacccgcaccccgaccggctcggcggcgctgtccggcttcatgcagggcgtgggctacagcttcggctgcctgggcccgttcctggtcggctggctgcacacggtcagcgacggctggaccctcccgttcagcttcctgttcggctgcgccgccctgatgctgtgcgcctcgtgggtggcctgcaagccgcgcaagctggaagatctctggtaa

SEQ ID NO: 494573 - DNA, 1152 bp, Stenotrophomonas maltophilia
atggatttcattcttctggactacaccacgctgcgcgtgatctggtggctgctgctcggcatcctgctgatcggtttcgccgtgatggatggtttcgacctgggcgtgggcaccctgctgcccttcgtcgcccgcaacgacgctgagcgccggctggtgatcaataccattggtccggtctgggaaggcaaccaggtgtggctgatcctgggcggcggcgcgatcttcgccgcctggccgccgctctacgcggtcagcttctccgggttctacctggcgatgttcgtgatcctgttcgccctgatcctgcgtccggtcggcttcaagttccgcagcaagatgcccagcgagcgctggcgcaacacctgggactgggcgctgttcatcggtggcttcataccggcgctgatcatgggcgtggcggtgggcaacgtggtgctgggcgtgccgttccacttcgatgacagcatgcgcatcttctacaccggctcgttcttcggcctgctgatgcccttcgcactgctggccggcctgctcagcgtgtcgatgctggtcgcccacggtgccgccatgctggtgctgaagaccgacggcccggtggccgagcgtgcggcccgcttcggcagcatcgccgcgatcatcgctttcgtgctctttgcggtcggcggcgcctgggtggccttcggcctgccgggttaccagatcacctcgcaggtggtcaccgacggcgccaccaatccgctgctgaagaccgccgaactcggcgccgccggtggctggatgcgcaactacagcacgatgccggccacgatcctggccccgctgctcggcctggccggcctgctcgccagtgcggtgctgctgcgtgcccgccgcggcggcctggccttcatcgcctccggtgcggccatcgccggcatcatcctgaccgtcggcttcgccatcttcccgttcctgctgccgtcctcgagccagcccacctccagcctgaccgtgtgggatgcctcgtccagccacctgaccctgtggatcatgctgctggccacggcggtgttcctgccgatcatcctcgcctacaccacctgggtgtaccgcgtgctgaagggcaagaccaccaccgaagagatgggcaacaacccgaacgcgtattga

SEQ ID NO: 494574 - DNA, 1590 bp, Stenotrophomonas maltophilia
atgattgatcagacagtcgtagaactgtcgcggctgcaattcgcgctgaccgcgatgtaccacttcctattcgtaccgctcaccctcggcctgtccttcatggtggccatcatggagagcgtgtacgtgatgaccggcaaggagatctggcgcaggatgaccctgttctggggcgtcctgttcggcatcaacttcgccatgggcgttgccaccggcatcgtcatggaattccagttcggcatgaactggtcctactacagccactacgtgggtgacatcttcggtgcgccactggcgatcgaaggcctgatggcgttcttcctggaagcgaccttcgtcggcctgttcttcttcggctggaaccgcctgagcaaggtcaagcacctgatggtgacctggctgatggcgctggggaccaacctgtcggcgatctggatcctggtggccaatggctggatgcagaacccgaccggtgcggtgttcaacccggaaaccatgcgcatggaagtggtcgacttcatggcggtggtgttcaacccggtggcgcaggccaagttcgtgcacaccgtcagcgccggctacgtgaccggtgcggtgttcgtgatggcgatcagcgccttgttcctgctgcgcaacaagcacaaggacctggcccgtcgttcgtttgcggtggccgcggcgttcggcctgctgtcatcgctgtcggtggtcgtgctgggtgacgagagcggttacgccgccagcgaacaccagaagatgaagctggccgcgatcgaggcgatgtgggagaccgagcgagcgccggccgacttcaccgccttcggcatccccaaccaggagactcaccagaacgactacgcggtgaagatcccctacctgatgggcctgatcgccacccgctcgttgaaccagccgattcccggcatcctggaactggtcgagcgcgccgaacaccgcgtgcgtggcggccagctggcctacggtgcattggaacgcctgcgcgccaacaagaacgacgttgaagcgcgcgagatgttcgaccgccactggcaggacctgggccacggcctgctgctcaagcgctatcgcgatgacatcctcaacgccaccccgcaggagatctcgcaggcggcgatggacacggtgccgcgcgtgatgccgttgttctggaccttccgcgtgatggccggcctgggcttctacctgatcgccttcttcgcgctggccttctactactcgtgccgcaacaacttccaggacaagcgctggttcctcaagctggccctgtggacgctgccggcaccgtggatcgcgatcgagtgcggctggttcgtggccgagtatggtcgccagccgtgggcggtcgatggcgtgctgccgaccttctatgcggcgtcgggcctggccctgcatgaaatcgtgctgaccctggccggcttcactgccatctacaccgcgctgatcgtggtcgagatcaagctgatgctcaaggcgatccgcaagggtccggacgaggtgctgccgtcgctgcagtcgccccagccgcatgcttcccacaatgcctcggcgccggccgccggccaggcctga

SEQ ID NO: 494575 - DNA, 1746 bp, Stenotrophomonas maltophilia
ttgagcgctgccgaaacgacccctgacggcctgtccccggaagctgaaaccgcccgccagcggcgtgtgcgcacggcctggctggccgacctggcacgctccgcccggggccgccagcgcctggccgcgctgtgcatcagcctgtccggcgcgctgttgatcggccaggctgccgccatcgcctggctggtgcagcaggtgctggtggagcgcgtgccgctggcctctggcctgccggtgctggcgggattggcggtgatcctggtgctgcgcaccctgctgggcagcgccacccaggccgccgccggtgacgtggccgacgccgcccggctggcactgcgcgaacgcgtgttcgcgcgcctgctgggccagggcccgctctggctgcggcagcgccgtaccggtgaactgggcgaactgatgctgcatcacggtgatgcgatcgagagctattacagcggcttcctgccggtgcgcaccgaagtggtggtggtgccgctgctgatcctggccgctgtcgcctgggtggactgggtggtggcgctgatcctgctgttcaccgcgccgctggtgccgttcttcatgatgctggtgggctggggcgctgaagccgccgggcgcgcgcagctgggcgaactggcgcgcatgagcggccatttcgccgaccgcatcaagggcctgggcctgctgcgcctgtatggccgcggcgaagccgaactggccggcatcgaggccgccgccgaaggcgtgcgcgtgcgcaccctaaaggtgctgcgcatcgccttcctgtcgtccaccgtgctggaattcttcgcctcggtgagcgtggcgatggtggcgctgtacctgggcctgagctatctgggcatgatgtcgctgcatgcagcggtgccgacgctgggtgcgggcctgttctgcctgctgctggcgccggagttctatgcgccgctgcgacggctggctgcgcactaccatgatcgcgccaatgcactggccgccgccgccgaagtggagcgcctgctgcagtcgctgccggacgagcagggcctgatcgagaacgaggttgcgccgctggcggtggagccggccgaggccgccttgccgccactgcaggcgcaaggactggtactgcgcccgttgggtgcgccgcaggatgtgctgcgggatctggacctgctgctggagccgggccaacgcctggccctggtcggtcccagcgggtccggcaaaagcacgctgctggaggcgctggccggttggttgccgccgcgtgccggcaagctgcagctgcgccccggcgtgcaggtggcctatgccagccagcgaccgtacctgttccatggcagcatcgccgacaatctgcgcctggccgatcccgcagccagcgatgcgcggttgcgcgcggtggccgaggcttcgcaggtcctgcagtttgcccagcgcctgccgcaggggctggacacggtgatcggcgaacgcggcttcggcctgtccggtggtgaagcccgccgcattggcctggcccgcctgctgctgcgcgacccgcaggtgctgctgctggacgaacccaccgcgttcctcgatgccgataccgaggcggcgctgctgcgcagcctggccgcgtatgcgcgcgggcgcagcgtagtggtcgccacccacagcccggcggtgatcgcctgggccgatcgttgcgtgctgttgccggaaggccgcctggtcgagccggcacaggcggtgcgcgcatga

SEQ ID NO: 494576 - DNA, 1680 bp, Stenotrophomonas maltophilia
atgagccgttcgcctgattcgctgcgcgcggtattcctgcgccaccggccgcgcctgttgctgaccctgctgctgctgtggaccacgatgctggccggcacggcgctgctgggcctgtccggtggtttcctcacggcggccgcgctggccggtgcggccggcctcggccagggcttcaacttcttctcaccctcggccggcatccgtggcctgaccatggcgcgcatcgtgtcgcgctacttcgaaaagctggtcggccacgatgccacgctgcgcatcgcccgcgacctgcgcgtgtggttcttccgccgcgcgctgccactggcgccggcacgattgggcgccacgcgcaccggcgagctgctggcgcggctgctgggggacatcggcgaagtggatgggctgctggtgcgtgcgatcgggccgctggtggcgctgggcgcgctgtcgctggtggcggttgcctcggcagcgctgatcctgccctcggcggcggtactgctggcggtgctggcgctgctgatcgccttcggcgtgccgtggctgggcgtgcgtggccatgacgacgaagaggccgatcgtgccgcgcaccgcgcggcgttgcgcaccgctgcattcgaagggctggagggggccggtgacctggctgcgctgcatgccgatgcagcttggcagctgaaggtacgcgtggccgccaagcagctggcctcgcgtgatcgtcgtcggcgttggcgcctgatcgcggcctcgaccctgcacggcctggtggcggggctgggcctggtggcgatgctggcgttggccctgcacgccgccgaacagcagcacatcgcgccggaaatggccgcgggcctcgtcttcctgaccgtggcgctgatcgaactttgggccggcatgggcttggcctggcagtcgctgcagtccgggcgcattgctgctgaccgcctgcaggccatcgtcgaacaaccgccgacggtggaggatccgcagacgccgcagccggtaccccaggtggcgcgcgtgcattgggatgacgtgcacttccagtggccaggtgccgcgcggccggtgttgtccggcctgcagctgaccctggcgccgggagaacgcatcgcgatccgtggcgacagcggcagcggcaagaccacgctgtccagcctgctgctgcggttgtgggatccgcaacaggggcgaatcacctatggcggacgcgacctgcgcgacgtcgcccaggccgagtggcaccgccagctggcctggcttccgcagaacgcaccggtgtttgccggcagcgtggccgagaacctgcggctgggggatcccgacgcccgtgatgccgcgttgtgggcggtccttcgtcgcgtgcgcctgggcgactgggccgagcgcaacggtggcctgcaggcctgggtgggcgagaacggcgcgacgatgtcggccggccaggcacgacgcctggcgctggcgcgcgcgctgctgcgcaatgcgccgatcctgctgctggacgaacccaccgaaggcctggatgtggataccgcacgtgcgctgttgcaggacctttccgggttgctggacgggcgcagcctgctgatgatcacccacgacgacctgcccgaaggcgtggtcgatgcgcagtaccggttgcgcgacggggtgttggagcgcgaagtgcttcggtag

SEQ ID NO: 494577 - DNA, 345 bp, Stenotrophomonas maltophilia
gtggcgtggcggcgtaacctcgcgctggccgccttcggcgcgctgaccgccttgatgatcagcggtgtgctgccgctgtggctgggtggctggtgcctgctggccagtgcggtgtcgttcgggctgtatggccacgacaagcgcgcggcgcagcgaaagcgatggcgcattcccgagcgcaccctgcagctgctggccttcgccggaggctggcccggcgcgctgctgggccaggcgctgttccgccacaagcatcgcaaagccgcattccagtgggtgttctggctgtgcgtgctggccaacgtggcctcgatcgcggtgatgctgcgcgagttctcccattga

SEQ ID NO: 494578 - DNA, 1113 bp, Stenotrophomonas maltophilia
atgaccgaattcatcccgcccggcacccgcttccacgccctgccctcgccgttcccgttcaagcgcggtggcgccctgcatggcgcacgcgtggcttacgagacctggggcacgctggccgccgacgccggcaatgcgatcctgatcgtgaccggcctgtcgccggatgcgcatgcggcggccaacgaggccaatccggcgccgggctggtgggaagcgatggttggccccggcaaacccatcgatacccgccgctggttcgtggtctgcgtgaattcgctgggcagctgcaagggatcgaccggccccgcctcgatcaacccggccagcgctgagccctaccgcctggacttccccgagctgtcgatcgaagacggcgctcgcgccgcgatcgaagtcgtgcgtgcgctgggcatcgcgcagctggcctgcgtggtcggcaattccatgggcgggatgaccgcgctggccgtgctgatgctgcacccgggcatcgcgcgcagccacgtcaacatttccggcagtgcgcaggcgctgccgttctcgatcgcgatccgctcgctgcagcgcgaggcgatccgtctcgacccgcgctggaatggcggccactacgacgatgccgagtaccccgagtccggcatgcgcatggcgcgcaagctgggcgtgatcacctaccgctcggcactggaatgggatggccgcttcggccgcgtgcggctggattcggaccaggccgacgacgatccgttcgggctggaattccaggtggaaagctatctggaaggccacgcacggcgcttcgtgcgtttcttcgatcccaactgctatctgtacctgagccgttcgatggattggttcgacctggccgagtacgccgacggcgatgtgctggccgggctggcgaagatccgggtggagaaggcactggccatcggcgccaacaccgacatcctgttcccggtgcagcagcagcaacaggtcgccgacggcctgcgtgccggcggtgccgatgcgcgcttcatcggcctggaatcgccacagggccatgatgccttcctcgtcgatttcgagcgtttcggcccggccgtgcgcggcttcctcgacgcgctgtaa

SEQ ID NO: 494579 - DNA, 990 bp, Stenotrophomonas maltophilia
atggtgaaccattggctgccgatgctggccgggctggtcgccgcgctgatggcagcgctggtgctgtggccactgcgccagcgcggtcggcgcggtttcgtggtcggcgtgctcgcgctgggcgtggccggtgcctgcctgtatctgctggtcggtgacccaagggcggcacaggtacaaccgaccccgtcggcagccaccctgcgcgatggcgtgcaggcactgcaggacgcactggagcgcgacccgcagcgtgccgacggctgggcattgctcggccgttcgcaggccgaactgggcaacgccgcagccgcggcggatgccttcgcgagggccgccgcattggcaccggaagatccgggcgtgctggtggaagccgcgcaggcgcgcgcgcaggctgatgccggcaagcagttcgatgacaccgcaatggcctggttgcagcaggcgcgcgcacaggctcccgatgccgagcgcgccagctggctgctgggcatcgccctgcgccagcgcggaaagaacgccgaggccgcggatgtgtggagcggcctgctgccacgactggagccgggtgccgcgcaggcgctgcaggcacagatcgccatcgcgcgcgaggccgccggccaggcgcccgatgctgcgcccgcgtcgccaccggcactgctgcaggtgcgtgtgcacctgcctgcgttgaagggcaccgagtggccggccagcacccaggtattcgtgttggcccgcgccgtgggtggaccaccgatgccgttggccgcgcgcaagctgcccctggccggattcccggacacggtcgggctgggcgacggtgacagcccgatgccgaccgcaccgctgtcggcccatcgcgaagtggaagtggtggcacgcatctcgcgcagcggcagcgccaaccgcagcgaggacgacctgcagagcgttccggtgaaggtaagcctgccgcatgaaggcgtggtggaactgcggttcccttga

SEQ ID NO: 494580 - DNA, 450 bp, Stenotrophomonas maltophilia
atgcgctggctgctggcgttgctgcttctgacgctgccgctggccgcgctggcccagcagccgctgcacgatccgcagccgctgcagttccgcgatgacgccgaagaacgccgcttccatgacctggccgcgcagctgcgctgcgtgcagtgccagaaccagtcgctggccgattcgaacgcgcagatcgcccaggacctgcgccgcgaggtgctgcagctgatgcagcaggggcacgacgacgcacagatcaagcagttcctggtcgcgcgctacggtgagttcgtgctctatcaaccaccgttgcagccgggcacctggctgctgtggggtggccccctgctggtgctcggcgccggtgcactggtagtgctgggcatcgtccgccgacgtggacgcaccgtcggcgcggcgccggccggcgaggccgatgaaggagacgaatggtga

SEQ ID NO: 494581 - DNA, 618 bp, Stenotrophomonas maltophilia
atgtccgagtcccccaccccgcgtccctcccgcccgctgccgccggtagccatcgtgatcggcgtgctgttcttcttcggcctgctcgggctgatgatctacggggtgatgaaatcaggcgatccgcagcgcgacgtactgccgtcggcactgatcgacaaaccggcgccggcattcgcgctgccggtgctgcacgacccggaaatgatcgtgcacagcgacgacctgcgcggcgcgccctacctgctgaacgtgtggggcagctggtgcgcggcctgccgcgaagaacacccggtgctgacccgcttcgcggaaagcaagcgtgtgcgcgtgatcggctacaactggaaggacgacccgagcgacgcgctgcactggctggaacagctgggcaacccgttcatggtcgtgctcagcgatgtcgagggccgtaccgcgatcgactggggcgtgaccgccgcaccggaaaccttcctggtcgatggcagcggcatcgtgcgctggaagtacagcggtgcgatgacccagcgcgtggtcgacgagaagctgatcccggcgctgcagaagatcgagaaggcccagggcagtgccggcaacaccctgcatacggcgccctga

SEQ ID NO: 494582 - DNA, 1920 bp, Stenotrophomonas maltophilia
gtgctgcccgaactgggtcagatcctgctgctgtgcgcgttgctggcctcgctgctgcaggccggcctgccgctggtcggtgcgcatcgcaacaacaccgcgtggatggcggtggcacggccggccgcgttcgcacagctgctgttgctcgccggcgcgttcgcggtactgaccgccgcgttcgtgcagcaggatttttcggtgcgctacgtggccgagaactccaattcgctgctgccgatggtctaccgctactcggcggtctggggcgcgcacgagggctcgctgctgatgtgggcgctggtgctggcgctgtggaccggcgcggtggcgctgttctcgcggcacttgcccgcaccggtgcaggcgcgcgtgctggcggtgatgggcgtggtcagcgtcggcttcctcgccttcctgatcttcacctccaacccgttcctgcgcctgaacccggcaccgctggaaggccgcgacctcaatccgctgctgcaggacccggggctgatcatccatccgcccatgctgtacctgggctatgtcggcttcgcggtgccgttcgccttcgcggttgccgcactgctggaaggccgcgtggacgcacgctggctgcgctggacgcggccatggaccaacgtcgcctggggctttttgaccctgggcatcgcgctgggcagctggtgggcctattacgagctgggctggggcggctggtggttctgggacccggtggagaacgccagcttcatgccgtggctggtcggtgcggcattgatccattcgcaggccgtcactgaaaagcgcggcaccttcggcagctggaccctgctgctggcgatcgccgccttcgcgctgtcgctgctgggcacgttcctggtgcgctccggcgtgctgaccagcgtgcattcgttcgccgccgatccctcgcgcggcctgttcatcctggtgttcctgtcggtgctggtcggtggcagcctgctgctgtacgcgctgcgtgccagccagctgagcgtggacgccgaggacccacgccgtggcttcaccgccacctcgcgcgagaccctgctgctggccaacaacctgctgctggccaccgcctgcgcgatggtgctgctcggcacgctgtacccgctgctggccgatgcgctgtcgctgggcaagatctcggtcggcccgccctacttcggcagcctgttcctgctgctgatggcgccgatgatcctgctgctgccgttcggcccgctggtgaaatggcagcgtgaccagccctcgcgcgccttcgcgctgctggcaccgtggctgggcctggcgctgctgctgggcgcgctggcctggtggcaggcgccgcagaacgggtggaaggccggcatcggcgtggccgctgcggcctgggtcgcgctcggcaccgcacgcttcgtctggcagcgcctgcgcggcaatggccgcttcaccgccgaaatgctcggcatgatcgtcgcccacgccggcattgccgtgttcctggccggcgcgctgctggtggaggcgctgaacgtgcagcgcgaagtggcgctggcaccaggccagcagctggtggtcggtcgccacgaagtgcgcttcgaaggcgtggaccatcgcgaaggcccgaacttcatcgccgaccgcggccacctgcgcgtgttccgcgacggccgcgagctggccctgctgcacccggagaagcgccagtacgccagcggcggccaggtgatgaccgaggccggcatcgatgcacgcttcaatggtgatgtctacgtggcattgggcgagccgctgggcaacaatgcatgggcggtccgggtgcacatcaaaccgtacgtgcgctggatctggctgggcgcgctgttgatggccctgggcggattcatcaccgccgccgatcgccgtttccgtcgtccgtag

SEQ ID NO: 494583 - DNA, 462 bp, Stenotrophomonas maltophilia
atgaccccggtacagcgccgccgcctggtgtgggtgttgctggccctgctcgcctccggcctggccaccgcactggtggcgatggcactggagcgcaacatcgcctacctgtacacgccgtcggaagtgctgcgcggcgatgtcgatgcacagtcgcgcttccgcctcggtggcatggtggtgaaaggttccttcaaccgaccggtcggctcgctggaggcacgcttcgaggtgaccgacggcgacgcgcagctggcggtgaccacgtcgcggatcctgccggacatgttcgccgaaggcacggcggtggtcgccagcggccgcctgcaggacggcaccttcgtcgccgacgaggtgctggccaagcacgatgagaagtacgtgccgaaggaagtggccgacaagatgggcgacgcccatcgcaagcacgacgtgccggtgacggcacccgaggtgcgctga

SEQ ID NO: 494584 - DNA, 189 bp, Stenotrophomonas maltophilia
atgacccacctgccctatgtgatcggtgcctacgcggtgttcgtgctggtgctcggcgccgatgccatcggttcgtggctgcgcctgcgcgtggcgcgccggctggcactggcccgccagcagcgccagcagacccgcgccggcaggcaggacgcagcggcgccgttgtcgacggagctggaacgatga

SEQ ID NO: 494585 - DNA, 771 bp, Stenotrophomonas maltophilia
atgaatccgattgtccgctggttccaccaactcggttcgccccccacgttcgaccgtttcgctgcccgctggtcgcgggtgttctacctcgcggcggtgccggtgctgctggtcggcatgtggcaggcgctgctggtggtgccaccggaagccaagcagctggacagcttccgcatcctctacatccacgtacccagtgcctggatgagcctgttcgtcttcgcgctgatggcgctgtatgcggccatcgcactggtctggcggatcaaggtctgcgagatcctggccatggcctgcgcgccgatgggcgccggcttcaccctgatcaccctgttgaccggcagcatctggggcaagggcacctggggcacctggtgggactgggacccgcgcatgaccagcgagctggtgctgctgttcctgtacctgggcgtgatcggcctgtaccacgccatcgaggaccgccgcagcgccgcacgtgcggccggcctgctggccatcgtcggtgtcagcctgctgccggtgatccgctactcggtggactggtggggcggcctgcaccagcgccagtcgatcaacgtattcggtgaatcggcgatcagcagcgcgatgatcgcgccgctgtggtggatggtgatcggcaccaagttctggttcgccggttcggtgctggccaaggcccgcgccgacaatctcgaccgcgaggccggcaaggcctgggtcggcggccgcgtcgacgccggacgcccggcccgggaggcccagccatga

SEQ ID NO: 494586 - DNA, 696 bp, Stenotrophomonas maltophilia
atgatcgcgccgggtaccgaaccgggcctgtggcagaccgcgggcgccctgctcaagcgcgacctgcgcctgctctggcgccgccgcggcgacgcgctgcagccgctgctgttcgcggtgctggtagtagtgctgttcgccctggcccagggccgcgaaccacagctgttggccgccaccgccggtgcagtgctgtggctggccgtgctgctggccggacagctgtcgctggattcgctgttccgttccgacgccgaggatggctcgctggaacaatggctgctggcgccggtgccgctggcctggctggtgctggtgcgcgtgctgctgcattgggccaccactgcgctgccgctgatcgtggtcagcccgctgctggccgaaatgctgcatctgccgcatgaccagctgccgatgttgctggcatcgttgctgctgggcacgccgttgctgagcctgatcggtggcgtggtcgctgcactgaccgttggcatccgacgctctggtattctcgtggcgctgctgtcgttgccgctgtacgtgccggtgctggtattcggcgcaggcagcctggcggcagccggacgcggacaggatccggtcggtgcgctgctgatgctgggcgccggcctgctggtcgcgctggtgctggcgccgctggccactgccgctgcaatacgtatttctctgagttga

SEQ ID NO: 494587 - DNA, 630 bp, Stenotrophomonas maltophilia
ttgaacacccctgcattgctggctgccagcggcctgagcttctcccgcaatgacgagccggtgttcggcccgctggacttccatgtggacgccggcgaagccctgctggtgcagggcggcaatggcgccggcaagaccaccctgctgcgcgtgctggccggcctggcccggcccggtgccggccaggtgcggatcgacggcaagccggccagcaatgccgagcgcgcgcgctatgtcgcctacctcagccacctgccagcgctgaaaccggacctcggcacgctggaaaacctgcatttcctgtgcggcctgcacggacggcgtgcgcggcagatgcccggcaacgcgctggccatcgtcggcctggccggttatgaggacaccctggtacggcatctgtcggccggacagaagcggcggctggcactggcgcgcatctggctgtcgccggcgccgttgtggctgctggacgaaccctatgccaacctcgacctggagggcatcaccctggtcaaccggatgatctcggcgcacctgcgcgccggcggcgctgcgctggtcaccacccatggcgcctatgccgcaccgccggtgcgtacccgccagctcgacctcggcggtgccgcatga

SEQ ID NO: 494588 - DNA, 1149 bp, Stenotrophomonas maltophilia
atgcaacccaccaccaagctgcccaaggtcggtaccacgatcttcaccgtgatgtcccagctcgccgccgaacacggcgcggtcaacctgggccagggtttcccggacttttcggcgccgcagcgcctgatcgacgagaccgccagggcgatggccgccgggctgaaccagtacccgccgatgaccggcgtggcgccgctgcgccaggccatcgcacagaaggtgctggactgctacggcgcgcaggtcgatgcggacagcgagatcaccgtcaccagcggtggcaccgaggccatcttcaacgccatccacgccgtggtgcgtgccggcgaggaagtgatcgtgctggacccggcgtatgactgctacgaaccggcgatcgacctggccggtgccagggccgtacatgtgtcgctggatccgcagacgttcgcggtcgattgggaccgcgtgcgcgcagcgatcaccccgcgcacccgcatgctgatcgtcaacaccccgcacaatccgtccggcgcgatgctgtcggcgcaggacatgcaggcgctggccgaactgctgcgcggcacgcagatctacctgatctccgatgaggtgtacgaacacatcatctacgacggccgtcgccatgaatcggcgctgcgctacccggaactgcgcgagcgcgcgttcgtcatctccagcttcggcaaaacctaccactgcaccggctggaagatcggctatgcgatcgccccgccggcgctgaccgccgagttccgcaaggtgcaccagtacaacaccttcaccagcttcggcccggcgcagcatggcttcgccgcgatgatccgcgacgaacccgaacaccacctggaactgggcgcgttctaccaggccaagcgcgaccgcttccgcgagcagctggccggtacccgcctgaaggcgctgccggtgccgggcggctacttccagctggtcgactattcggcgatcagcgacctgccggaccatgagttcgtgaagtggctgaccatcgagaagggcgtcaccgccattccgctgtcgccgttctatgagactccgccggccggccagcgcctggtgcgcctgtgctttgccaagaacgaagcgaccatggacgcggcgatcgaacgcctgcgcctgctgtga

SEQ ID NO: 494589 - DNA, 807 bp, Stenotrophomonas maltophilia
atgcaggacctgcgcatttccctcgtccagggcgacacccgctggcatgacccggccggcaaccgcgcctactacggtgcgttgctggcaccactggcgggcagcaccgacctggtgatcctgccggagaccttcaccagtggcttctccaacgacgccatcgcccaggccgaaggcatggacgggccgaccgtggcctgggtgcgcgaacaggccaaggtcttgaacgcggcggtgatcggcagcgtgcagctgcgcgcgggcgacggcgtctacaaccgcctgctgttcgctacgcctgatggcgggctgcagtactacgacaagcggcacctgttccgctacggcggcgagcatgagcgctatgccgctggccgtgagcgcctgagcgtggaatggaagggctggcggatcaatccgcaggtctgctacgacctgcgcttcccggtgttctgccgcaaccgctacaacgtcgaacgcccgcagcagctggatttcgacctgcagatcttcgtcgccaactggccgtcggcgcgcgcctatgcatggaagaccctgctgcgtgcgcgggcgatcgagaacctgtgcttcgtggcggcggtgaaccgcgtcggcgtggacggcaaccagctgcactacgccggcgacagcgcggtgatcgacttcctcggccagccgcaggtggagatccgcgaacgcgaacaggtggtgaccaccaccatttcggccgaagcactggctgcacatcgcgcgcgtttcccggcgatgctcgatgctgatgccttccacctggacgagcaggcctga

SEQ ID NO: 494590 - DNA, 435 bp, Stenotrophomonas maltophilia
atgaacaagcccttcgccctgctgctggccctgtccgctgctacgctggccccggccgcgcacgccgccggcaacctcgattgccagctgcgctacaacctgtccggctggtcactgatctacaagaccgcttccggcaacggcacggtcagctgcagcaacggcaccagcctgccggtgcgtatcgaagtgaagggcggcggcctgaccgtgggcaagtcgaagatcaccaatggccgtggcagcttcaccggcgccgtcagcgtcaacgagctgctgggcacctacgcctcggttggcgcgcatgcgggtgccgtgaagtccagcaacgcgcaggtgatgaccaagggcgacatctcgctggccctgtccggcaccggcaagggctgggatctgggcgtggacggcgccgccttcaccatcagccggcgctga

SEQ ID NO: 494591 - DNA, 1131 bp, Stenotrophomonas maltophilia
atgtcgcgtcgcctgttgttgctcaccatcgcgctgctgatgttcccccagttggcgcagaccctgtacagcccggccctggccgacctcgccgggcgcttcgcactgccccccggcgccgccagccaggccatgagcctgtacctgttcggttttgccgccggcgtcctgctgtggggacggctggccgaccatgtcggtcgtcgccctgccctgctctgcggcctggccgtgttcgtactggccgcctgcggcggcctgctggccagcacgttcggccaggtcctgctggcgcaggcactggccgcactgggtgcggcggcggcctcggtggtaacccagaccgtactgcgcgatcacctgaagggtccggcgttggcgcaggcgttctcgtggatcggcatggcgctggccttgagcccggcgatcgggctggcactgggtgtgctgctggtggacagccatggctatgccggcgtgcaggccggcctgctgctgatggtcagcctgctgatgctcggatgcgcaacgggcctgcgcgagagccgccctgcggaagtcgcgcacacccccatgctgccactgttgtggcaactgctgcgtgatcgctggatgtggtcacaggcgctgctggtgatggcgttcaacgtggcgatgtacagctggtacgcgctgggcccgttcgtattcgaacgcctgcactggccgctggcctggttcggtgccagcggcgcgctgctggcgctcggctcggcgctgggtgcatggggcaatgctcgcctgctgcgcgcaggcgttgcctccgccacgcgcatccggctcgccgcagggctggtgctggccggtggcctgttggctgccttgctgcacaatcagccggcactggtcgcggcgatggtaccggtggtggccgggttcggcctggccattcccaatgtgctgggccaggccctccgcggatacccgcactgcctgggcagcgcgggcgccctgttcggcctgctctactacctgttgatcggcgtggcgatggccgtggtcggtgcactgcaactgctggcaccgacactcatcgtgtgcggcctgcttgcattgtggctgcagcggccggcacggctcagcgccggctga

SEQ ID NO: 494592 - DNA, 801 bp, Stenotrophomonas maltophilia
atgaaatcggacatggcgtggctgcaaccggatgcgcacttcgatgcggatgcctggagcgcaccggtgctgggcatcgcgtcgtcgctggccgatcatgattcgggttggcaccagcacgcgcgcgcgcagttgctgtacacccggcggggctgcacgcggctgaccttcggcgaccgcatcagcctgctgccgccctcgcgcgcggcatggattcccggcggcctgcgccatcgcgcacagatgcgccaggccgtggactaccgctcgctgtatttcgatgccacgttgtcggcacggctgccgcagcagccggcgatcatcggcgtcggtcccctgctgcaggcattgctggaaccgatcgcgcaggcgccgttcgaccatgactggcgggcgccacgcgcgcaccatcaattggcgttgtgcgtgctggagatcgccgccgcaccggtggcgccgatggacctgccgctgccacgcgatccacgcatcgcgcgctgcctgccgctggccgagcagttgccgcctgaactgggtgagctcgctgcgcgtgcgggcctgagcgtgcgcacggtcggccggttgatgcaacgcgacaccggcatgggctaccaggcctggcgccagcaatggcgcctgatgcgtgccatggagctgctgctgcttggccatcgcatcgggcacgttgcgcaggacactggtttttccgccgagagtccgttcatcgcctttttccgcagcatgaccggcaccacgcccgccgctttccagcgccacgcaaaaggggacggaggggattaa

SEQ ID NO: 494593 - DNA, 1638 bp, Stenotrophomonas maltophilia
atgagtgacaccccccgtaacaagctctcgctgaagcgcgaagccacctccgaacagttcaagctggaagaacgcctgcacaaggtgctcgcccaggccggcctcggctcgcgccgcgcgctggaacagcgcatcgccgaaggcctggtcaaggtcaacggtgaagtcgcgcagaccggcatgtcggtcaagagcggcgacaagatcgaactggatggccgcggcttcgtcgccacagccctggccgagccgtcgcgcgtgctggtctacaacaagccggaaggcgaagtgaccacccgcgatgatccggaaggccgcccgaccgtgttcgagtcgctgccgccgctgaagggcgcgcgctggatcgccatcggccgcctggacatcaacaccaccggcctgctgctggccaccaccgacggtgagctggccaacgccatgatgcacccgtcgttcgaggtcgagcgcgagtacgtggtgcgcgtgcgtgcgccggaaggcgaggaaaaggtctctgacgccatcgtcgaccgcctcacccgtggcgtcgcgctggaagacggcccggccaagttcgatgagatcgaacgcatcggcggcaccgattcgcacgactggttccgcgtcgtggtgaaggaaggccgcaaccgcgaagtgcgccggctgtgggagtcgcagggctgccaggtcagccgcctgaagcgcacccgctatggcaaggtgagcctgccgcgcgaactggcccgtggccattcggtggaactgggcaccacgcaggttgaagccctgcgcgcccagctgaagctggaagaaggcgcaccgtcggcactgacgctgcagccggtgatcggccagcgccgcgcggccaagaccaccgtgcgcgtgcgcgaaggtggccgtggcaacgcctacgtcaacggccacaacaccgccgacgaaggccgcgagctgcgtcgtttcgacaacgtccgcgaagaccgcggccgtggtcgcggcggcaagggtggcggcttcaagggcggcctgacggtcagcggtgaagcggcagccaagcagtcgcagaagccgttcaagcagcgcgcccagaagaatgatcgttcgctgccggaaggcaatccggccgcgttccgcacctggtacgtgccggatggcgtgagcaccggcccgagcggccatcgcaacgccggcccgggcgcacgcggccccggtgcccgtggtccgggtgcaggcggccagggccgtccgtacggcaagccgaagggcccgggcgcaggcgccggtggcggccagggccgtggcggtttcggcggcgaaggccgtggcggcgcaggcggccagggtcgtccggccggtggcggcaaccgctcgcagggccagggcaacaagcacccgtacggccatccgggcaacgccccgagcttcccgtccgaccacgccaccccgggcttcaacccgtatggcagcccgaagccggcacacggcgcccgtccgggcggtcgcggtccgggcggtggcaaccaccgtggcccgggtggtaaccgtggtcccggtggtccgggtggcaaccgaggcccgggcggccccggtggcaaccgcggtcccggcggcccgcgccgcagcggcccgcgcggcggctga

SEQ ID NO: 494594 - DNA, 876 bp, Stenotrophomonas maltophilia
atggatcaatcgctgatcaaccgcattgtcgagggtgccctgctggcttccagccagccgctcaccctggcccagctgaaggacctgttcccggaagaggaaccggcaccgccgggcagcatcgaacgtgcgctggaacgcctgcgcgaggcctgcgaaggccgcggcgtggaactggtcgaggtcgcctccggcttccgctaccaggtcaccggcgaagtgcatggctggatcagccggctgtggaccgaacgcaagacccgctacacccgtgccaccctggaaaccctggcgctgatcgcctaccggcaaccgatcacccgcggcgagatcgaacaggtgcgcggcgtggcggtcagcagcaacatcatccaggcgctggaagaacgcgagtggatccgcgtggtcggccaccgcgacgtgcccggcaaaccggcgctgttcggcaccaccaagggcttcctggactacttcgggctgaagcggctggacgaactgccgccgctgtcggagctgaaggacctgggcgagctggaaccgcagcttgccctggaccgcgatgcgccggccgtcgccggtgccgagggtccggacatctcggccggcgccgatggcgctgccgcgaacgatgacgccggcctggccggcagtgacacccccgattccgccgatgcagcccctgcgtcggccaccgatgagcaagcaccttcgcccctcgatgatgggcaccccgattccgcgccgggcgagcgcgcggtgccagtgaacgaacgcgaagacaacgccgtcgcgatgacgaccgtggctgttgaccaagccgattccgaaccagaggccgacctcgaaaccgtcggccggagcaaaactgatgagtga

SEQ ID NO: 494595 - DNA, 909 bp, Stenotrophomonas maltophilia
atgacttccgaactcgcgctcgacgcgaacccgccaacccggccgcccgccccccagcagcaggaaatgccgctggccgtggtgcatgggcaaccggtcctgcagattccgcaggacctgtacatcccgccggacgcgctggaagtcatcctggatgcctttgaaggcccgctggacctgctgctgtacctgatccgccgccagaacctggatgtactggacattcccgttgccgagatcacccggcagtacgtggagtacatcaccgtgatgcgcgagctgcgcttcgagctggcggccgaatacctggtgatggccgcgatcctggccgaggtgaagtcgcggatgctgctgccgcgcccggtcagcgaggaaggcgatgaagccgacccgcgcgccgaactggtgcgccggctgcaggagtacgaacgcttcaagcaggccgccgagaacatcgacgccctgccccgccaggaccgcgataccaccgtggcacatgccttcatgcccgaacgtgccacggtgaagctgccgccgccggtggacctgaaggaaatgctgctggccctgcacgacgtgctcaagcgcgccgagctgttcagcggccacgccatcaagcgtgaggcactgagcgtgcggcaacgcatgggcgaagtgctgggacgcctggaagatggcaagttctatcgttttgaagggctgttcaccgccgaagaaggcaagctgggcgtgctggtcacgttcctggcggtgctggagctggccaaggaacagctgctggacatcgtccaggaagaaccgctggcgccgatctacgtgaagtcgctggcggccggcaacaccaatgccccgctgcagttcagcagcgagttcgacgacaacgacgacgacgccaatgcagacgagtga

SEQ ID NO: 494596 - DNA, 300 bp, Stenotrophomonas maltophilia
gtgtggtatgtgatcgaagggtatgacggccaggatgtgctggcgcagcggctgcaggcgcggccggaacacctggcgcggctgcacgcgctgcgcgacgagggacgcctgctgctggccggcccgtgcccggcggtggacagtgaagacccgggcccggccggtttcagcggctcggtggtgatcgcgcagttcgagtcgttgccgcaggcccaggcctgggccgatgccgacccgtacgtggctgccggcgtctacacccgcgtgcaggtacgcccgttccgcaaggtcctgccgtga

SEQ ID NO: 494597 - DNA, 276 bp, Stenotrophomonas maltophilia
gtgaacgcggaacggatcgagcggatccgtgatgcgctgcagcaggcgctggcacccagcgtgctcgagatcgaggatgacagccatcgccatgccggccatgccggcgcgcgcgacgggcgcggccatttcaacgtccatgtggtgagtgaacgcttcgccggactggctccgttggcccggcatcgcgcggtctatgccgcgctggggtcgatgatggacaccgatatccacgcgctgtccatccgcgcacataccccgtcagaacagggctga

SEQ ID NO: 494598 - DNA, 1023 bp, Stenotrophomonas maltophilia
gtgaacaaggcagctatcacaatcaaagacgtcgcacgcgaagcccgggtctccgtggccacggtttcccgcgcgctcaacgggcatgaaaatgtcgccgaaccggtccgccagcttgtgctggaggtggccgcacggctgcgttacaccccgcatgccgccgcccgcagcctgagcagccgccgcaccaatacggtgggcgtggtgctgcctgacctgtacggcgaattcttctccgaactgatgcgcggcatcgacggcgtggcccgcaaccgccgccagcacctgctggtgtccagctaccacggcgaccaggaacagcagggcgccgccctgcgtgccatgcgcggccgcgtcgacggcctgctggtgctctcgccctatgccgagagcccgggcttcctgaccgacaacctgccgcagtcgctgccgacggtgttgatcaacacctatctgcccgggcaggaccatccggtgctcagcatcgacgatcacgccggtgcgatggcgatgacccgccacctgctggacgccggccaccgccgcattgccttcatttctggcccggacctcaacttcgacgcgcgcgagcgcctgcgcggcttccgtgacgcgctggtggcgtttggcagtggcgccgagggcatcgagctgcccggtgatttcgacgaagcttccggccatcgcgccggtcaggagttgctggcagccggagcgctgcccgatgccgtgttcgccgccaacgacatgatggccctgggctgcctgtatgcgttcacgcaggctggtgtccgtgtgccggtcgatgttgccctggcaggtttcgatgacattccactggcgcgtttcgtccacccgtcgctgaccaccatgcaggtcagcatcgccgagctcggcgaccgggccatgacgcgcctgatgcagttgatggacggcacctccacggatgggacaggggacaagcagaccctggttccccgcttgatagttcgcgattccaccactccgccatccggccattga

SEQ ID NO: 494599 - DNA, 3057 bp, Stenotrophomonas maltophilia
atgatgcataccaccttccgcatgccggcgcgccggctgctgagcaccgcactggtcagctgcctgatgctggccgccgcccccaacgtcatggcgcagtcggccaacgccagcctgcgcggccaggttgccggcgcccaggcaggtaccgaagtgaccgccaccaacgtggccaccggtaccgtccgccgtggcaccatccgcgccgacggcagctactcgctgatgggcctggacccgggtacctatgacgtggtcgccaacggccagacccagaaggtcaccgtcaccgtggcctcgaccgcgacgctgaactttgccggtgccgccagcagcacccccggttcgaccgcggccaccaacctggacaccgtcaacgtcgtcgcgccgaccctgctgcaggaagtgcgcacctccgaagtcggcaagaccgtcagcctgcagcagatccagaccaccccgcaggtctcgcgcaacttcctggagttcgccgacgcggtgccgggcctgatcttcacccgcgatgccaagggcaacacctcgctgcgcggcggcgccaccaatgccgacggcaccaacgtgtacatcgacggcgtaggccagaagagctacgtcaagggcggcggcgtggccggccagtccggcagcgccggcaacccgttcccgcagctggccatcggcgaatacaaggtcatcagcggcaactacaaggccgagtacggccaggtgtcgagcgccgccgtgacggctgcgaccaagtccggcaccaatgagttcaagggcgaggcgttctaccgctacaccgatgaagacatgcgtgccaagaccccggcagagcgtcagggtggcaaggaaaagatggtctcggccgagaaggaatacggcttcgccctgggcggcccgatcatccaggacaaggcgcacttcttcgtgacctacgaagccaagcgcttcgacctgccggtcaccatcgcgccggatggcgcggtcaccggcgctgccggcctgctgccgcccgccggtgccgccggcctcggcccggccagccagccgttccagcaggatctgatcttcggcaagatcgacttcgagccgaccgacaacgaccgcatcgagctgaccttccaggaccgcgacgaaacccagtcgcagttcagcggccagacctcgccggaagccggccgtgaagtggtcaacaccgaccgtcgttatgccctgcgctggaaccacagcggtgagcgctactacaacgagttgatggtcacccacgaagattcgttcaacaatccgaccccgctgacgctggccaacggcatcacctacaccgcaccggacggcccggaagaccgcaccatcgtgaagatcggtggcgcctcggcactggattcgcaggtgaagggccagaagggctggtcgatcgaagacaacctgaccctggatggcatccagtgggcgggcgaccacaccatcaagatgggcgtgaagtacaagcagatcgacctgtacgcgtccgatgcggcgcagatcaacccgaccttcacctactcgctgggtgatccggacttccccgattccattccgtacaaggcgcagttcgtcaagccggtgaccggcgtgaccggtgtgtccggcgaagtgcgttcgaagtccaagcagtacggcgtgttcatccaggacgactggcaggtcaatgaccacctgcagctgaacatcggcctgcgctgggactacgaaaagaccccgtcctacctggacttcgtgaccccgcagcaggtggtcgacgccatctattcgcaggatccgcgcgctcccgccggccagacctatgccgattcgctggcactgggcggcctggacatcagcgactacatcagcaacggtcacaaccgcaaggcattcaaggatgcctggcagccgcgcctgggcttctcgtatgacatcaatgccgacgagcagcacgtgatccacggtggtgccggccgttcctacgaccgtgacctgttcgacaacctgcagctggaaaccaccaagctggccctgccgcagccgaccatctacttccgcaacccggccaccggcgcctgcatcaacggccaggccgcctgctatgactggaacccgaacctgctcaacggcatcggcaacctgcaggcactggtcggcgcgaccagcaatgccggcctggaagtggacctgctgaacaacaagctgaaggcgccgtactcggatcagttcagcctgggcatgagcaaccagatcggcgactggctgaccgacgccaccatcgctcgaaccctgagctacgacggcttcgccttcaccctgggcaaccgctacccgaccggccagttcttcgatgatccgcgcctgtgtggtggcacctccccgggcctgagccaggcctggagctgcaacgtgccgggcttcggcagcctgatcatcggccagcagggcatcaagacccgtgccacccaggtcctgctgtcggcacagaagccgttcaccaaggaaagcggttggggcacctcgatcgcctatacctggaccaccgcgcgccacaaccgtgacatcaacgagaagtacgcctttgatcgcggtctgatcggtgattacccgaccatccgttccaacggcgcgccgcgccaccgcctggtggtgaccggttcgtacgcgggcttctggggcatcaccttcggcggcaagatcaccctggccaccccgaccgccgtcaacgactggtacccggtgatgcaggccagcggctacacgctgccgactccgcaggcggccgtgcccaacgcaaccggcaagttcctggtgggcggcaagatcttcggctaccgttcggtcgacctgcaggcgacgaagacgttcaagatgccgggcaacactgagctgtacgcccgcctggacatcatcaacgtgttcaacttcgacaacttctccacctacaactacgtcaagaccaacggcaagctgcaggccagctacaacgagaccggcgacatcatcggtacgccgcgccaggtcaaggccgaagtgggcttccgcttctaa

SEQ ID NO: 494600 - DNA, 1605 bp, Stenotrophomonas maltophilia
atgcaggcacgccatctgttgtccgccgcagcgctgagcctggccgtggccgcctgccagccggcccagcaggaacctgccaaaccgcgcccgccggtgatcctgatcgaggccgatgcaccgcctcggcccatgaagcctgagctgccgccgctgttcgatgacatcgagcgccgcaccttccagttcttctgggataccaccaacgaggtcaacgggctgaccccggaccgctacccgtcgcggccgttcgccagcatcgcctcggtcggcttcgcgctgaccgcctatccgatcggcatcgagaacggctgggtcagccgcaaccaggcgatcgaccgcacgctgaccacgctgaagttcttccgcgacgtgccgatgggcccgcagcgcaccggcaaggccggttacaagggcttctactaccacttcctggacatgcaggaaggccgtcgctacgacagctgggtcgagctgtcatcggtggataccgcgctgctgatgatgggcgtgctgttcgcgcagtcgtactacgacggtgatgatccgcgcgagaaggaaatccgccagatcgccgatacgttgtacaagaaggtcgactggccgtggctgcagcagcgtgcaccgctgatctcgatgggctggttcccggagagcggtttcatcgaccacgactggatgggctacaacgaggcgatgatggtgtacatcctcgccctgggctcgccgacgcacccggtcagcccggacgcgtggacggtgtggacgcgtacctacgacaacgactggggcgtctaccagggccaggaatacctgtccttcggcccgctgttcggccaccagtacagccacgtctggatcgacttccgcgacatccaggacgcttacatgcgcgagcgcggcagcacctatttcctcaacagccggtcggccgcgctggcccagcgcgaatatgccatcgccaacccgatgcagtggaaggagtatggcgagaacgtgtggggcctgaccgccagcgatggtccgcagaacaccacgcaggagtaccgcggcgagcagcgccagttccgccactactcctcgcgcggcgccggcctgcgcgagaacttcgatgacggcaccatcgccccgaccgctgcgatcgcctcggtggtgttcgcccccgagcaggtgatcccggccacgctggagatgcacaagcgctttggcgactacatctattccagctacggcttcctggattcgttcaaccccagcttcaactacgacatcccgatcaagaccggtcgtctggttcccgatcgcggctgggtcgccagcgactacatcgccatcgaccagggcccgatcctgaccatgatcgccaactaccgcgatgacttcgtctgggaagtgatgaagaagaacccgtacatccgcaagggcctggagcgggccgggttcagtggcggctggctggcgccggaagggtcgttccagccgctggaactgcagaaagacgaaaaggccgcggcagcacgcgcggtgggtatcgccgaatcacgcgcggctgccgcgcaggaacagaagaacaatgccaaccgcaccacaggccagggcaagtag

SEQ ID NO: 494601 - DNA, 1341 bp, Stenotrophomonas maltophilia
atgccgaactggatcgaccgcctgcgccgctgggcgctgcctgccatggccgcgttggccgtggccggctgcgcccgtaccgaaccgggcaccaccaccgtgcgcttctgggcgatgggccgcgaagccgaggtggtcagcgagctgatccacgaattcgaggccgaaaaccccggcatcaaggtggatgtgcagaacatcccgtggaccgccgcgcatgagaagctgctgaccgcgttcgccgccgacggcctgccggacgtgtgccagcttggcaacacctgggtgccggagttcgccgaactcgacgcgctgaccccgctgcagccgttcgtgcagcgctccaccgtggtcgacccgaaggactacttccagggcatctgggataccaacgtgatccacggcgggctggtcggcgtgccgtggtacgtcgatacgcgcctgatctactaccgcaaggacctgctggccaaggccggctacgaccacccgccgcgtacgtggcaggaatgggaagagcagatggcggcgatcaagcgcatgcagggcccgagccgctacgcggtgctgatgccgatcaacgagttcgagcagcagctgtcgctggccttgcagcagcccgacccgctgctgcgtgacgacgacacccggggcaatttctccagcccggggttccgccgcacgctgggcttctacgccaacatgttcgagcagggctgggcgccgaagatgtccgagacgcagatctccaatgtctgggacgaattcttccgcggcttcaacgtgttctacatctccggcccctggaacatccgcgagttcaagaagctgcagccgaaggaactggaagggcagtggggcaccgccgcgctgccggggccggacggtccgggcgcgggcatcgccggtggtaccagcctggtgatcttccgcaagtcgcagcagaaggaggcgtcctggaagctgatcgaattcctgtcgcggccggaaatccaggcacgcttccattcgatcattggcgacctgccgccgcgccgcagtgcgtggaacacgccgtcgctggccaatgacccgctggcggccgcgttccgcgatcagctggagcgggtcaggccgacgccgaaggtgctcgaatgggagcgcatcgtgcaggaaatgcgcatcgtcaccgagaaggtggtgcgcggtggcctgccgcaggacaaggccgtggaagagctggaccagcgcgtggacaaggtgctggccaagcgccgctggatgcatgaacaacaacgcctgcaggagcgcgcgccgtcgtcgcaatcgagcagcgccgtggccgccgggagcgcgcaatga

SEQ ID NO: 494602 - DNA, 882 bp, Stenotrophomonas maltophilia
atgaaacgtacttcgctggccggctggatcttcgccggcccctcgctgatcgtgctgggcgtgttcttcggcctgccggtcgcctcggcgcttgcactgagcgtgaccgacttcgacctctatgcactggccgatagcagcaacctgcgcttcgtcggcctgggcaactacatcgacctgctgcagacgccgatgttctggaagtcgctgtggaacaccacctacttcgtgctgatcggcgtgccgttgtcgatcggcgtgtcgctgggcgcggcgatgctgctcaatgcaccggccgcgcgcttcaaggccctgttccgcacggccctgttcgcgccggtggtgaccacgctggtggcggtggcggtgatctggcgctacctgttccataccagctatggcctggtgaactacggcctgggccatctgggcatcagcccgatcgactggctgggtgatcccaactgggcgatgccgaccatcatgctgttcgcggtgtggaagaacttcggctacaacatggtgatcttcctggccggcctgcaggcgatcccgcatgacctgtacgaagcggcgcgcatcgatggtgcctcgcgctggaagcagttcctgcacatcaccctgccgatgctcggcccggtgctgctggtggtcggggtgattaccgtgtccggctacttccagctgttcgccgaaccctacgtgatgacccgcggcgacccactgcagagcaccgtcagcgtgctgtatttcatgttcgaggaaggcttcaagtggtggaacctgggacgcgcctccgccgtggcgttcctgctgttcctgatcatcctggcggtgaccaccgtgatgctgcgtttcggccgcaagaggcagttggtatga

SEQ ID NO: 494603 - DNA, 837 bp, Stenotrophomonas maltophilia
atgagtcgtgaaatcggccagtcgcgctggtacccgtggatgatcaatggtgcgttgctggtgctggccctggtcagcctggcaccgctgctgtggatggtctcggtctcgttcatgccgcagggcgaggccagccatttcccgccgccgctgctgccttcgagcatcaccacgcacaactaccatgaactgttcgcgcgcaccggcatgggcggcaactttgccaacagcctgctggtgtcgctgggcatcacgatcggctcgctgctgctcaacaccatggccggttacgctttcgccaagctcaacttcgtcggccgcgagcgcctgttccaggtactgatggcggcgctggtgattccagcgcaggtggcgatgctgccactgttcctgctgatgaagcagctggggctggtcaacagcttcggcggcgtgatcgtgccggcgctggccagcgtgttcggcatcttcctggtacgccagtacgcacgttcgatcccggacgaactgctggaagcggcgcgcatcgacggggcaggggagctgcgcatcttcttccagatcgtgctgccgatgctcaagccggtgctggtgaccctggcgatcttcaccttcatgggcgcatggaacgatttcatgtggccgctgatcgtgttgaccgaccaggagcactacactttgccggtggcgctggccaccctctcgcgcgaacacatcatggacgtggaaatgatgatggctggcgcggtggtcaccgtggttccggtgctggcgctgttcctggtgctgcagcggtactacatccaaggtctgttgctggggagcgtcaagggatga

SEQ ID NO: 494604 - DNA, 3168 bp, Stenotrophomonas maltophilia
atgaagcgagcgatcgccgttggactgggactgttgtggacctccctggcgatcgccgcaccaccggcactgccggcgccgaaggtgctggacgacttcgacgatatcggcgcctggaaactggtgctgtccgaccaggtcagtggttcgctgcggccggtcagcggcgccggcggcggccgtgccctgtgcctggactatgatttccacaaggtctccggctacgtcggcatccgccgcgcgctgaacatcgactacccggtcaactaccgtttcggcttccagctgcgtggtgattcgccggccaacgacctgcagttcaagctgatcgatgccagcggcgacaacgtctggtgggtcaaccgcccgggctacagcttccccaatgcgtggacaccggtcgaataccggcgtcgccagatcgacaaggcgtgggggccgtcgcccgagaaggagatggcgcgcagcgccgcggtcgagttcacgatctacagcaaggtcggtggccgcggcacggtgtgcttcgacaagctgaccctgcagggcctgccaccgcaggatgattcggcactggtgccatcggtcatcgccgataccgccaccgcgctgcaggaccgcatgatcgatggcaagggcgatacgttctggatcagcggcggggtcaagcagcagaccatcagcctggacctgcacaagagccgcgagatcggcggggcggtgatcgactggctgccgaacctggaagccaatcgttacaccgtgcggacgtccgaagatggccgggactggcgcactgtgcgcgaggtgaccggcggtgcgggtggccgcgactggctggcgctgccggacaccgacgcacgctacgtgcgtttcgatctgctcgatggcccgaactggcgctatggcatccgtgacatcacgctcaagccgctggcgttcgccgccacgccgaacgccttcctgtcctcggtggcggccgacctgccgcgcggttcgctgccgcgtgcgtatgtgggcgaacagccgtactggaccctgctcggcctcgatggcggccaggaacaggcgctgatcagcgaggacggtgcgctggagccggccaagggcagcttcagcatcgagccgttcatccgcctcgacggcaagctgctggactggtcgaaggtggccacgacccagtcgctgcaggaccactatcttccgatcgccaacgtcgactgggtgcacgagaaggccggcctggcggtgaccagcttcgtgcagggcacgccggagcgcgcgcagttgatcggccgctatcggctgagcaatccggacaaggtggcgcacgagtacaccctggcgctggcgatccgcccctggcaggtcaacccgccgacccagttcctcaacaccgtcggcggcttcagccgcatcgatgcgctggacgtgggcgaacagctggtacgcatcaacggcgagccgcgcatctatccactgcaggtgcccgatgcccgtttcgccagcacgttcgatggcaagctcgatgcgatgcatcttgcgtccggaaagtatccggccactacggcagtgaaggacagtaccggcatggcgtccggtgcgctgctgtatacgatcaagctggaacccgggcagagccgcgaagtggcagtggtgctgccgcagaccgggagctgggcgccgcaggcgctggacgtggccaaggcgcaggcgcaggtggccgaacagtggcggcacgcgctgggcgtggtctcgctgcaggtgccggcggcaggccaggccctggtcgacaccctgcgcaccgccgtggcgcacatgctgatctcgcgggtcggcccgcgcctgcagccgggcacgcgctcgtacgcgcgcagctggatccgcgacggcgcgatgatttccgaaggcctgctgcgcatggggcgcagcgatgccgtgcgtgactacatcaactggtatgcgccttaccagttcgagaacggcaaggtgccgtgctgtgtcgatgcgcgcggcagcgacccggtgccggagaacgacagccacggtgagctgatctacagcatcgccgaatatgggcgctataccggcgacagcaccttcgccgagctgatgtggccgcacgtgcagggcgcctacagctacatggagcagctgcgtgccagcgagcgtaccgaagagaaccgtgcgcgcaacccggcgttctacgggatgatgccggcctcgatcagccacgaaggctattcggccaagccgatgcattcgtactgggataatttctgggcgttgcgcggctacaaggacgcagcatcgctggcggcccagctgggcaaggtcgaagcgatgcagatcgccgagtcgcgtgaccagttccgtgatgacctgcaggcgtcactgctgtcggcgatgcagcagcacaacatcgactacctgccgggctcggccgagctgggcgatttcgacgcgacctcgaccaccatcgcgctggcgccgggcggcgagcagggccggctgccgcagcaggcgttggaggcgaccttcgagcgctactggaaggaattcgtggcccgccgcgatggcaagcgcgagtggaaggactacacgccgtacgaatggcgcaacgtggccgccttcgttcgcctgggctggcgcgatcgcgcctggcaggcgaccgagttcttcttcaaggaccgtgcgccgcaggcctggaaccagtgggccgaagtggtctcgcgcacgccgcgcaagccgttcttcgtcggtgacctgccgcatgcctgggtcgcctcggacttcgtgcgctcggccctggacatgttcgcctacagtcgtgacatggacgatgcgctggtgttggccgccggcatcccgacggcctggctgcagggcgagggcatcgccgtgcagggccttcgcacgccgcagggccagctcaattaccgcctgcagcgcagcgacaagcagctggtgctggaggtgcagccgggcctggtgccaccggtcggtggcgtggtgttgccgtggccgtacgccggtgatccgggcgaggcgaccatcaacggcgaagcggccgaatggatcaacaaggaactgcacgtgcaccagctgccggcacgggtcgagatcgatgtaccgggcgcggtgcgccgcgccgagcgcaaggggcagtaa

SEQ ID NO: 494605 - DNA, 888 bp, Stenotrophomonas maltophilia
atgaagcaacaaggggagggagcgcgcgcgacggtgcgcgccctggggctggccattgcattggcattgccagggctgacgctggcggcggtgccgcaggtcgcatcgccagcggtggacatcgccagcgcgccaggcatgagcatggtcaccttcaacctccatcatgaccgcgaagactggccgagccgccgccgtaccatcctggccgaactcaagcgcctgcagcccgatgccatcgcgctgcaggaggtgatccagcgccgcaacgtgcgcaaccaggcgcagtggctggccagccagctcggctacaagtacgtgttcgtgtccaccgatccggtgggcgcgccgaagcgttacggcaatgcgttgctgacccggcggccgatcctcgcccagggggatcatctgctgctgccattggacgactaccgcacggtggcccacctgcgcatcgacgtcgacggcacaccggtgaacgtctacgccacgcatctcaacgagcgcaacgacgagagtggtcagcgcatccgtcgtacccaggtcgaggacctgctgcgcttcatcaccgctacctcggccggcgcgccggtggtgatcgcgggcgacttcaatgcgctggtggacgcaggtgacctgagcgagctgcgcagccattacggcgacagctatggcagcgtgcacgtcaacaccgacctggccggggtcagcaccttgaaccggcactattaccaggcaccttcgcgtatcgaccacatcttcttccagcaggaccggatggtcgcgcgcgaagcgaagctcctgttcgaccagcccgatgacagcggtcgctgggcctcggaccactacggcgtgtggacccggttgcagttcgcgccgacgcgctga

SEQ ID NO: 494606 - DNA, 3273 bp, Stenotrophomonas maltophilia
atgaagcgaatgctgatcaacgccacgcaggctgaagagctgcgtgttgccatcgtggatggccagtcgttgtatgacatcgacatcgaacagccgtcgaaggaacagaagaagtccaacatctacaagggccggatcttccgcatcgagccctcgctggaagccgccttcgtcgagtacggcggtggccgccatggcttcctgccgctgaaggaaatctcccgcgactacttccaggccggtgtcgaccacaacaagaccggcatccgcgagctgctgaaggaaggccaggagatcgtcgtccaggtcgacaaggaagagcgtggcaacaagggcgccgccctgaccacgttcatctcgctggccggccgctacatggtgctgatgccgaactcgcccagcgcaggcggcgtttcccgtcgcatcgagggcgaagaccgggccgcgctgaaggacgccctggacaagctgaacattcccgacgacatgggcgtgatcatccgtaccgccggcgtcggccgcgatgcggaagagctgcagtgggacctggactacctgctcaatgtctggcgcgccatcgccgaagccgcactgagcaagccggctccgttcctgatctaccaggaatcgcgcctgatcgtgcgcgccctgcgtgactacctgcgcgccgacatcggcgagatcctggtggacaccgaggagatgtacgagcacgcccgcgagttcatgcagcaagtgatgccgcagaccctgcgcaagctcaagcattacaaggacgacatcccgctgttcaaccgcttccagatcgagtcgcagatcgagggcgcctacgagcgcaacgtgcgcctgccgtcgggcggctcgatcgtggtcgaccagaccgaagcgctgaccgcggtcgacgtcaattcctcgcgcgccaccaagggcagcgacatcgaggacaccgcgttccagaccaacctggaagcggccgaggaagtggcccgccagctgcgcctgcgcgacctgggcggcctggtggtgatcgacttcatcgacatggcctccaacaagcaccagcgcgaggtcgagaaccgcctggccaacgcgctgaagtacgaccgtgcgcgcgtccaggttggccgcatctcgcgcttcggcctgctggaaatgagccgccagcgcctgcgcccgagcctgggtgaatccagccagatcgtctgcccgcgttgcgacggccacggccgcatgcgcagcgtcgagtcgctgtcgctgtcgatcatccgcgttgccgaagagcatgcgatgaaggaaaacaccgggcaggtgctggtccaggcgccggtggagatcgccaattacctgctgaacgaaaagcgcagtgccctgcgcgagatcgagcagcgccacgaggcgccgatcgtgatcgtcgccgacgagcagctgcacaccccgcactacaccgtcacccgcctgcgcgagaacgagctgggtgaagagagcaacaagcccagttaccagcgcggcaccccgcgcaagctgccggtgcatgccctgaccaagggccagctgaacatcccgccgccggcggtgacccaggtcaagcacacctcccccgccccggtgcgcgaggaagtggagccggccgcagcggcaccggccccggtcgtggcagcgccggttgcagcggccccgagcggcggcgtgatcggttggctcaagcgcgtgttcggtggcgaaccggcgccggcgccggcgccggcggctcctgttgcccgccagcagcaggacggcggccgcaaggaccgcaacaaggatcgcaacaaggaccgcaaggatcgccgcgacgacaaccgtggcaacggcaacgctcagcagcagaaggatggcggcaaccgcaaggagcgcggtgagcagcgcaaggacggccgcaacggcaacaacggcaatgcccagcagcagccgcagcagggcaggcagaaggagcctcagcagaaggacggccagcagccgcatcagcagaacaagccgcgcaacgagcagcagggccagaaccagaaccagcagcagccgaagctgaagcagcccaagcagccgcgccagccgcaggacggtgacaagccggccgagaagccgcagcgcagcaccgccgaggcaccggccgaggccgtgaccgcggctgccgccgtggccgccacggcggtcgccgccaatggggtgaccgctcaggaagccactgcgccggtggcgccggttgcgccggccgcctccgctccggcggaagccactgcaccggcggacaccactgccaacgccggcaacgaggccgaggcgattgccgtgaccggtgaagaggctgctgtcgacgccaacggcgagcaggccggtgaaggcgcgacccgccgccgccgtggccgtcgtggtggccgtcgccgccgtcgtggtggcgccgagaacgctgccggcagcgatggcctgggcgatgatcaggacgacgcggacgacagtgatgacaccgatgccgctgatgtcgccgagcagagcaacgacagcgtcgccgggaccactccggtcgccgctgcgcagccggcccgttcgcaaccggaattcgatttcgatgacgaagtcgaaccgaccgctgccgaatccgaaaagccggtccgtgccgccgccgctgttgtcgccgcgccggtcgcggtggtgagcagcgccttggtcgatgccgctgcaccggtggtggccgaagtacaggcgccgatcgataccgtggccaaggccgaaccggcatcttcgccggtgcagaccagcatgctcgatgccatcgacgcggcgaccccggcccagccggtggtggctgcagcaccggcggtcgaagccaagccggtcgtggttgaggctgccccggccgttgaagccactccggtggtcgaagtgaagccggtcgtggtcgaggctgctccggtcgtggaatcgaagccggaggttgttgcagcgtccccggtggctgaagccgagccgctggccgttgaggccgccccggtggtggaggccgctcccgcggttgaagccaagccggtggtcgagaccgcaccggtcgccgaacagccagtcgctccggtggcagttgaagccgcaccggtggaagctgcggccccggtcgccgatgcggtggtgacgccgtcgatcgatccggtcgccgatggtcacgccgatgccgccgcccaggcggccgaagccaaggccgacgaagaagacgaagacgccgccaagcgcacgccgccggcgaactga

SEQ ID NO: 494607 - DNA, 1134 bp, Stenotrophomonas maltophilia
atggccgggaaggccggtgagccgctaacatggccgccccgcgggcggtggtcgcgcactgtgccggattcgtcggaagctgggcttctggccctgagtaacttccaacgaaatcaatcccttatctcgccccccgagtgtaacagaataaacagcctgatgaccgcccaagaccccaccaaacccgctggcgacaagccttccgtgcgcatgatcaccgttcccgccgaccgcgccggccagcgcctggacaacttcctgctcggccagctgaagggcgccccgcgcagcctggtctacaagctggtgcgcagtggccaggttcgggtgaacggtggccgcgccaaggccgagcgcaagctcgaggccggtgacgaggtgcgcgtgccaccggtccgtctcactgaggagggagacaaggccggtccgccggaggcgttcatgcgccgcctggagcaggccatcgtcttcgaggacgcccgcctgctggccctgaacaagccgaccggcgtggccagccacggcggcagcggcatcagcttcggcgccatcgagaccctgcgcgcgctgcgcccggggcagaccctggagctggtccaccggttggatcgcgacacctcgggcctgctgatcgtggccaagaagcgctcggcgctgagcgaactgcaggccttgctgcgtgaagaccacggcgccggcatccgcaagcgctacctgacgctgctggccgggcgcatgcccgacggcgtgatgacggtcgacgcaccgctgcacgtgggcctgcgccagggcggcgagcgccatgtgcaggtcaatgcgatcggcaaggaatcgatcagccacttccgggtgctggaacgccgcggtggccattcgtactgcgaagtccgcatcgagaccggccgtacccaccagatccgcgtgcacgcccagcatctggggcatccagtggccggtgacgacaaatacggcgatccagcggtcaacaagcggcttcgtgagcagatcgggctgaagcgcctgttcctgcatgcggcctcgctggagttcgcgctggatgacggcaagagcccatacgtattgaacgcgccgctggcggatgagctggtcgaggcgctggaccggctgaagtag

SEQ ID NO: 494608 - DNA, 810 bp, Stenotrophomonas maltophilia
atgctgcagattccccctgaaaacatctggatcgcactggcggtcacgcttgccgcaggcctggccaccgcgatcggcagcctgctggtgctgttctcgcgccgccccagcccgcgcctgctggcgttcggcctggcctttgccggtggcgcgatggtctatgtgtcgctgtcggagatcctcaacaagtccattgcgtcgtttgcactggcgtatggcgagcgcaccggcttcacctacggcaccttggccttcctgctgggcgtgatcgtgatcgtactgatcgaccacttcattcccaatccgcatgacagcctggacaaacaggaccctgcgttccgcgagaacagccgcgagtacctgaagcgggtcgcgctgctgacctcggttgcgatcaccgcacacaatttcccggaagggctggcgaccttctttgccacgctggaaagcccatcggtgggcatgccactggccttcgccatcgccatccacaacattcccgagggcatcgcgatcgcggtgccggtgtacttcgccacccagaacaagttctacgcgttcagtgccagcctgctgtccggcctggccgagcccgtgggcgcggcgcttggctactggcttctgtcaggatcgctgtcgcacgccacgttcggctgggtgttcggcctgatcgccggcgtgatggtgttcctggcgctggatgagctgctgccggcggccaagcgctatgccaagggccacgagacggtttatggactggtggccggcatgggcacgctggcgatcagcctggtgctgttcaagtggtga

SEQ ID NO: 494609 - DNA, 417 bp, Stenotrophomonas maltophilia
atgaacgtacgtttgctgagcctgtccctgatcgctgcgaccggcctggccggctgtggcgcgtccgaaccgccgtcaccgccaccgccgccgccgaccgaagtggccgcggtgaagacgccgccgccgcagtacccgctggaactggcctgcatgggcgtgggtggcaccagcaccttcaaggtgaccatcggcaccgacggcaagccgagcgaggttgcgctgttgaccggggccggcaacccgcagctggacgaactggccaagaccgccgtgcagggctggcagttcaaggccgccacccgtaacggccaaccggtgccggccaccatccaggttcctgtcagcttcaacccgccacagccgaagccggaccagtgcttcgccatcgaagaacgcctgcgccgcggcggctga

SEQ ID NO: 494610 - DNA, 351 bp, Stenotrophomonas maltophilia
atggccgacctgattccactggcccaggcccgttgcgtgccgcgcaaaggcagcgaccacaagctcggcgaggcccgcctggccgaactgctgccgcaggttcccggctgggagctgagcgagggtgaccaggccctgtcgcgtaccttccgcttcaaggattactacgccaccatggccttcgtgaacgcactggcctggatcgcccaccgcgaggaccaccacccggacctgggcgtgcactacgaccgcgcggtcgtgcgcttctccacccacgatgtgggcgggctgagcgagaacgacttcatctgcgcggccaagacttcggccctgacggagcaactgccatga

SEQ ID NO: 494611 - DNA, 600 bp, Stenotrophomonas maltophilia
atgatccagatctccgacactgcccagacccatttccgcaggttgatcgaacgcgagggcgtgcccggcatgggcgtgcgcctgagcgcggtcgaccccggtacgccgcgcgccgacgcccggctggaattcgccgaaccgaccgacctgctcggtgacgagtgggcggtggactgcgatggtttcaccctctatgtcgacgccggcagcgttggctggctcgatggcgccgagatcgacatcgtcgccggcaccgccggtgcccagcagctgaccatcaaggcgccgcgcatcaagggcgaagcgccgggtgatgcggcctcgctggtcgaacgcgtgcactgggtggtggagaacgaagtcaatccgcagctggcctcgcatggcggcaaggtggccgtgcaggaagtctcgtccgacggcgtggtgctgctgcgcttcggtggtggctgccagggctgcggcatggccgatgtgacgctcaagcagggcatcgaaaagaccctgatgggccgcgtgccgggcgtgaccgccgtgcgtgacgcgaccgatcatgacagcggccacgcgccttacattccgcgcggcaacgtcgcctga

SEQ ID NO: 494612 - DNA, 1764 bp, Stenotrophomonas maltophilia
gtgcctctgacccgggccgagcaactcattgatctgctgctggcgcgccagcagccccgcgccgtcctcgagaagtccacgcgcctgccctatggctgggcgctgtggctgcgctcgctggggccactgccgcggccgttccatgcccgcgaggtgatcgcagttttcctgccgcgcccgctgccgggcccgccaggccagtcgccgcggctgtcgccgtggcaggcgctgcgccgattgttctggcaggactgggacgccgcgccgcgcgaccagcgctggatgcgctggacctcggcactggtcagtgcactgctgcacctgctgttcttcgtgctgttgctgtgggtggcggtgatccgtaccagcgcgccggacgaagagggcaccgagggcgagcgcgtgcaggtggagttcgtcggccgcgcatcgcaggaaggcggtggcgatcagccgggcgccgaagcggctgcggctgcggcggcaggtcgggttgcgccgggccaggaggcgggcgctgcctcggcccctgcgccacgtccggtggctgccgaaaccaccgcctcatccccggcatccgcgccgaccgccagcgttccaccaccaccgccggccgacgccgagccggcgccggtggccgcgccgccgccttcgcccgtccaggccaccgaagtggcgcaggccagcacggatttcgtggtgccgccggtcagtgtgccgcgcaccgaagtcagcgtcgtgccgcgtgacagcacacccgccgtgcgcgagcgcagcgtgcagccggtgcaggcgccgccgacaccaagcccggtgcgtaccccggaactggccgtgcgcacgccgcaggtgcgtgacatccaggtgcgcgaacgcgaagtcagtacggtcgacgcgccggtcgctccccagccgctgcgcagcgcggaagtgcaggtgcgcgtgccgcagcaggacgtgcaggtgcgcgaacgtgaagtgcaggccgtggccgatccgcaggtgcggatggcggcggtggccgggcgtgagcccgccgtacgcgcgcccactggccgcgacgtgcaggtgcgggaacgtgaagtggcctcggcaccggtggcagcgccggcatcctccagtggcagtgccacggcgacgcccgcgactgcggcccagggcagcgcgacgcaggcgagcagcagcgcgcgtccgtcagcatccagcagcacacccgcaaacgcgggagcgcgcccggcgcctgatccaggcaactgggcgacgcctgccaagggcgatgactgggggtcttccagccgcaaccgcgacggcagcagcaacggtacccgccaggccagtaccgccggcaagggcagcggcctgttcaatgccgatggcagcgtgcgcgtgcctggccaggagggcgatggccatgccgcgcgcggtgcgcccggcggtgccaacgacggctggagcaaggagcgcattgcgcagtccggcacctggctgaagcgcccgccgtacgactacacgccgacctcgttcgacaaatactgggtgccgcaggaatcgctgctggccgaatgggtgcgcaagggcgtcaaggcgatggagattccattgccgggcaccaacacaaggatctcctgcgtcatttcgatcctgcaggccggtggcggctgtggcctgaccaaccccaacatgcaggaccagccggccgtggcacgaccgccgccggacatcccgttcaagaaggaactgcaggaagacaacgggagccgctag

SEQ ID NO: 494613 - DNA, 414 bp, Stenotrophomonas maltophilia
atgagccacgatgatttcggccttggcctgcatgacatcaacaacgccggcgtctacgccatcgacagcgacgacatcggcgcactggccgcggcgatgcgcgatgccggcctgaaagtgatccgcatcgatctggagggcgtcgcggacaagcgcaccctgctcgcccgtttggccgcacagctggatttcccggccggtttcggcggcaactgggatgcgctgtcggacaacctgcgcgacctgcaatggctgccggccaatggctacgcgctgttcctggccgacgtggacgcgctgcgcgccggtccgcagaaggacttcgacaccctgctggacgtgatggacgagaccagccgtgactgggtcggccgcgacgtaccgttctgggtgttcctgtcgcagagcgcgtaa

SEQ ID NO: 494614 - DNA, 453 bp, Stenotrophomonas maltophilia
atgcgcaacccccggctgctgatcaccgccatcgccctgctgctgctcggcctggtcgccaaccatttcctgcaaaggccgccagcgccgcagttcgcgcccgacctgcagggcatgcctgtcgcgcgcgcgccggccaccgcctcgcccggcaaggacagcggacttcccgcgttcctgcccgccgaagcgcgcgcgaccatcgccctgatccagcgtggcggtccattcccgcaccgccaggacggcagtaccttcagcaaccgcgagcagcagctgccgcagcgcgcgcgcggctactaccgcgaatacaccgtcgacacccctggcgcgcgtacgcgtggcacgcgtcgcatcgtcaccggcggcgatccgccggaagcgtggtactacaccgacgaccattacgcgtcattccgcagcttcaccgtaccggcccagggagcgcagtga

SEQ ID NO: 494615 - DNA, 612 bp, Stenotrophomonas maltophilia
atggcctacaccctgcccaagctgtcctatgcctacgacgcgctggaaccgcatatcgatgcggcgacgatggaaatccatcacaccaagcatcaccagacctacatcaacaacgtcaacgcggcgctggaaggcaccgagtacgctgacctgccggtcgaagagctggtgaagaagctcaagtcgctgccggagaacctgcagggcccggtgcgcaacaacggtggtggccatgccaaccactcgctgttctggaccgtgatggcccccaatgccggcggcaacccggtgggcgacgtggccaaggccatcgacaaggacctgggcggtttcgacaagttcaaggatgccttcaccaaggccgcgctgacccgtttcggcagtggctgggcgtggctgagcgtgaccccggacaagaaggtcgtggtcgagagcaccggcaaccaggacagcccgctgatggaaggcaacacccccatcctcggcctggacgtgtgggaacacgcgtactacctgaagtaccagaaccgccgcccggaatacatcggcgcgttcttcaacgtcatcgactggaatgaagtcgagcgccgttaccaggaagcgatcgcctga

SEQ ID NO: 494616 - DNA, 849 bp, Stenotrophomonas maltophilia
atgagccccctcgcccacgcccgcctcctgctcagctgccttgcgctgttgctggcgttgcaggcgcaggcacgaccacaggcgccggccgccgttgccagcgagagcgatcccaggcagctgacggtcgccgcgctggagctgcccagccgcgatgacgcgcaatggaagcagcgccgcgagcaggtcgcacagctgctgaccgagctgcagccggacgtgatctcggtgcagcaggtgctgcagcagcagggccgcaacccggcctgctggctggccagccggctgcgctacagctgcgacttcgttaccgccgatccgccgagccagccgctgcggcatggcaacgccatgctgacccggctgccggtcagcgaggacggcgtgaccctgctgcatcctcccggcaccttcagcgcggccggcatgatgcggctgaggctgggcgaggcgctggtcaacatctatgtggcgcggctgcgcccggacccggacgaggccagcgcccgccagcaccagaccagcgacctgatgacctggatcggcgccaccgccgaaggcatgccgagcctgattgccggcgatttctcggccagcacggtggaactggtgcgcagcacgccggggttccagccggcccggcgcaatcccggcggccgtgccgaggcgccggcggccagtgggggcggcagcagcggccacggcctggatgtgctgttccaggtcaagcactttggcggcatccgccagcagccgatcctgctgccggccgacggcgacctgcccggcctgcgtctgggtgtgatggcgaccctgcgcctgcagggcgatacggccaccgcggaataa

SEQ ID NO: 494617 - DNA, 1566 bp, Stenotrophomonas maltophilia
atgagccacgacgcagtcgcccccatcgccggccagggaaagatgccgcgccagattccgtacatcatcggcaatgaggcctgcgagcggttcagtttctacgggatgcgcaacatcctggtgcagttcctgatcacctcgctgctgctgcaggaaatcactgccgaaggccgtgccggtgaagccaaggacatcatgcacagcttcatgatcggcgtgtatttcttcccgctgctcggtggctggctggccgaccggttcttcggcaagtaccacaccattctctggttcagcctggtctactgcgccggccacctgtgcctggcgctgttcgagaacagccgcgagggcttcttcctcggcctgggcctgatcgcgctcggtgccggcggcatcaagccgctggtggcctcgttcatgggcgaccagttcgaccagagcaacaagcacctggccaagatcgtcttcgacgccttctactggatcatcaacttcggctcgctgttcgcctcgctgctgatcccgctggtgctgaagaactggggcccgcagtgggcgttcggcatcccgggcatcctgatgttcatcgctaccttcgtgttctggctgggccgcaggcgctacgtgctggtgccgctgccgccgaaggacccgcattcgttcgccaacgtggtgcgtaccgcgctgaccacgcgcgtggctggccagggccgtccgggcctggtgatcgccgtgcttggcctggcgctggcggtggccgcgttcggcctggtcggttcgctgggtatcgtgatctgcctgtgcctggcgctggtggccatccttgccggcatcggtggcggcacctggctgcagctggaccgcgcccgtggccagcatccggccgaagccgtggaaggcgtgcgctcggtactgcgcgtgctggtgatcttcgcgctgaccacgccgttcttctcgctgttcgaccagaaggcctcgacctgggtcctgcagggccagcagatgcagatgccaagctggttcaccgcctcgcagatgcaggcgctgaacccgctgctggtgatgatcctgattccgttcaacaacctggtgctgtacccggccctgcgccgcttcggcttcgaaccgaccgcgctgcgccgcatgaccgccggcatcgccttcagtggcctggcctggatcgtggtgggtggcatccaggtggtgatggacggcggcaacgccatgtcgatcttctggcagatgctgccgtacgcgctgctgaccttcggtgaggtgctggtctcggccaccggcctggagttcgcctacagccaggcaccgcaggcgatgaagggcgtggtgatgagcttctggaacctgaccaccaccatcggcaacctgtgggtgctgctgtccaacgcggcggtgcgcaacgacacggtcacccaccagatcgcgggcacgggcctgagcgaggcggcgttcctgatgttcttcttcgccggcttcgccttcgtcgcggcgttggccttcggttggtacgcgaaacgctatcgtatggttgacaactaccgtagcgcctga

SEQ ID NO: 494618 - DNA, 387 bp, Stenotrophomonas maltophilia
atgacccccgtcaatctgctgttgatcgccatcaccgccatcctgtcgtggatggcgttcaacaaccgcaagctggccgaccgcctgatcctgtggccgccggccatcgaccgtcaccgccagtacgaccggctggtgacctatggcttcatccacgccgactggtcgcacctgatcttcaacatgatcaccctgttcttcttcgggggattcatcgagagcgtgatggtgcagctgaccggcagctacctgacctacccggcgttctacatcggcgcgctgctggtctcgatcctgcccagctacctgaaaaccagaagaacccgaactacctcagcctcggggcgtccggggcggtatcggcggtgctgttcgccttcatcctga

SEQ ID NO: 494619 - DNA, 261 bp, Stenotrophomonas maltophilia
gtgctgttcgccttcatcctgatcaagccgtggtcgatcatcctggtgttcttcatcccggcaccggcgatcatctatgccgcgttctacgtcggctacagcatctggatggacaggcgcggtggcgaccgcatcaaccacagcgcgcacctggcaggtgcggcgtttggcgtgatcttcatgctggccatgcagccgagcatcttcacccacttcctgcgcgaactctccaacccgaccttccgcctcggcggcggttga

SEQ ID NO: 494620 - DNA, 162 bp, Stenotrophomonas maltophilia
atgcacgccagcaattcccattccgataccgaccgcgccctgctggagggcctgctgcaactggcggtggaagggcagaccgaggatcaggatttccagcgcatcggcgaggaagtgttcgcccgcctgctggatacctacggccagcagaccgcagcctga

SEQ ID NO: 494621 - DNA, 303 bp, Stenotrophomonas maltophilia
atggcttcggtcacgccccccggtctggcctatgaggtcgagcacgacctggccaaccaccgcttcaccgcacgtgtgcgcggacagctggcggtgctcgattaccagatcaagcgcaggcgcatggtcatcacccataccgaggtgcccgagccgatcgccggccgtggcatcgccggtgagctgacccgcgtggcactgcgtttcgcgcgcgagcagaaatacaaggtggtgccggcatgttcctacgccgaagccttcctgcagcgccacgaggagtaccacgacctgctcgttggctga

SEQ ID NO: 494622 - DNA, 882 bp, Stenotrophomonas maltophilia
atgtacaaacatgaacaggggatcccgatgaagattggaaacaaccggccattgcacggcagcgtgttggccggcgtggtgggcgtgctgttgctggccggttgccagcgtgaaagcgagccggcaccggcgaccgacgcggcgcccgccgccgaagccaccgccgcaggcgaaacgccggccacggaagcgccgctggacctgcgcgacgtgatcgagaacaacgagcgcgaagtggtaggcatcagctacccggccggtatcgaccgttatccgggcctggcccgcgcgctgcagagctatgcgacgagtgcgcgcagcgacctgcagcaggcgctggacgggctgggcaacgacaagccgaccatgccctacgagctgtcgctgagcttcgagaagctgcttgaaaccccgcagctggtggtggtcagtgccgacggcagccgctacacgggtggcgcccacggcgagccgctggtggcgcgcttcgtgtggctgccgcagcagcagcagatgctcagtgccgacaagctggtggccgatgccaagggctggaaggcgatcagtgatttcgtcgccgaccagctgcgcgaacgcgtggccacccgcctcagtggcgaggacatggacccggcccagctgcaggaatcgctgcgcaacgcatcgcgcatgatcgccgacggaaccggcccgcaggccgacaatttcagccagttccagccactgaccgacgacaaggggcagatcaccgcgctgcgctttgttttcccgccgtaccaggtgggtccatactcggacggcacccagaccgccgatgtaccggcggcggtgctgttgcctcacgtggccaaggactacgtggagctgttcgcacgcggttga

SEQ ID NO: 494623 - DNA, 1116 bp, Stenotrophomonas maltophilia
gtggatacagggttgcaggagcgggtcgccggcctgctccacgaagccggggtccgcatcggcggcacccagccacaggacatccaggtgcatgacccgcgttttttcgcgcgggtcatgggccacggctcgctcggcctgggcgagagctacatggaggggtggtgggatgccaatgtcctggatgaattcctcgtccacctgatgcaggcgcacctggatgaacgggtgcacggctggcgcgaagtggcagacgcgctgaaggcgcgcctgttcaacctgcaggcggggcagggcagttacgaagtcggtcgccgccattacgacctcggcaatgatctctaccaggccatgctcggccagcgcctagtctacagctgtggctattggcgcgacgccgacgacctcgacgccgcacaggaggccaagctcgacctggtctgccgcaagctgggcctgcgcccgggccagcgcgtgctggacattggctgcggttggggcgaagccctgaagttcgccgccgagcgctacggtgtcagcggcgtcggcgtgaccatatcgcaggagcaggccgagttcgcgcggcagttgtgcgctggcctgccgatcgagatccgcctgcaggattaccgtgaactggacgaaccgttcgatgcgatcttctcgatcggcatgttcgagcacgtcggtgacaagaactacgccagtttcttcgaagtggccaagcgctgcctgtcgccgcgcgggttgctgctgttgcataccatcggcaccaacgtctcacggcatcgcaccgatccatggattgcacgctacatcttccccaactcgatgctgccgtcggcggtgcagatcaccaaggcgttcgaaggccgtttcgtgctggaggactggcacaacttcggcaccgactacgacctgaccctgcaggcatggcggcgcaacgtggaagcagcgtggccgcggctggatgcgcactacgacgagcacttccggcgcatgtggcgcttctacctggccgggtcgatggccaccttccgctgccggcacgcgcagctgtggcagctggtgctgtcgccggaaggcgtgccgggtgggtacgtggcgccgcgttga

SEQ ID NO: 494624 - DNA, 2139 bp, Stenotrophomonas maltophilia
atgtccctcggccttgccctgcccgccttctcggccggcgccgccaccccggctgccagcaccaatgcccagcaggccaacccgttcttcgccgaaagcccgctgccgctgcacttcccgcagttcgacaagatcaaggacagcgacttcgcaccggccttcgacgccggcatggcgcagcagctgaaggaagtggaggcgatcgccaacaacaaggccaagccgaccttcgacaacaccatcatcgcgctggaaaagagcggtgacatcctcgaccgtgcgaccaccgtgttcttcagcctggtcggcgccgataccaacgacacccgcaagaagctgcaggccgactactcggcgaagtttgccgcgcacagcgatgcgatcgcgctgaacggcaagctgttcgcccgcatccaggcgctgtacgacacccgcagccagctgggcctggacgccgaaggcgtgcgcctggtcgagaagtactacgacaactacgtgcgcgccggcgccaagctgtccgaggccgacaaggccacgctgaaggacatgaatgccgaactggccaatctgggcaccaagttcagccagaacgtgcagtcggaagtgaacgcttcggcaatcactgtcgacgacgtcaaggagctggctggcctgtccaaggagcagatcgccgccgccgccgaagccgccaaggcgcgtggcctggaaggcaagtacgtgatcaccctgctcaacaccaccggccagccgccgctgaccaacctggccaaccgcgccctgcgccagaagatctacgaagcctcgaccacccgcggcagccgcggcggtgagttcgacaacaccgcgctggtctcgcgcatcatgcagttgcgtgccgacaaggccaagctgatgggcttcccgaacttcgctgcctacaacctgaccaaccagaccgccaagacccccgaagcggtcaacgcgatgctgggcaagctggctccggccgcggtggccaatgccaagcgcgaagccgccgacctgcaggcgatgatcgacaaggagcagaaggccgcgcgcaagccgaccttccagctggaaccgtgggactgggccttctacagcgagaaggtgcgccaggccaagtacaacttcgacgagtcgcagctgaagccgtacttcgaactgaagaacgtgctggagaacggcgtcttctacgccgccggccaggaattcggcctgaccttcaagcagcgcaccgacctgccggtctaccacgatgacgtcaccgtctacgacgtgttcgacgccgatggcagccagctggcgatcttcatcttcgatccgtatgcacgcgcctccaagcgtggcggtgcgtggatgaactcctacgtctcgcagtccaagctgaccggcttcaagccggtggtcgccaatcacctgaacatcccgaagccgccggccggccagccgaccctgctgacctgggatgaggtgaacaccaccttccacgagttcggccacgccctgcacggcatgttctccaacgtgaagtacccctacttctcgggcacctcggtgccgcgcgacttcgtcgagttcccctcgcaggtcaacgagatgtgggccgacaacccggtcatcctgaagaactacgccaagcactaccagaatggttcggcgatgccgcaggccctgctggacaaggtgattgccgcatcgaagttcaaccagggctttgccaccaccgaatacctgggggcggcgatgctggaccagaactggcaccagatcggcccggaccaggtgccggcggccaaggacgtgatggcgttcgagcgcgccgcgctggagaaggacggcatctactacgcgccggttccgccgcgctacaagaccccgtacttcagccacatcatgggcggctactcggccggctactacgcctacatctggtcggaagtgctcgacgccaacacccagaagtggttcaaggacaacggcggcctgagccgcaagaacggcgaccacttccgcgccaccctgctgtccaagggcggcagcgtcgacgcgatgcagctgttccgcgatttcgccggccacgagccgcagatcgaaccgctgctggaaaagcgtggcctgaccggcgccggcaactga

SEQ ID NO: 494625 - DNA, 480 bp, Stenotrophomonas maltophilia
atgaccactgcctacgatttcagcttccgtgacctcgacggccagccgcaggcgctggcccggtaccagggccacccgttgctgctggtgaacgtcgccagccgctgtggcttcaccccgcagtacaccgggctggagcagctgtggcaggactaccgcgagcgcggcctggtggtgatcggcttcccgtgcaaccagtttggcgcgcaggagcccggtgatgccgcgcagatccgccagttctgttcgctggactatccggtcagcttcccgctgtcggaaaagatcgaggtcaacggcgagggggccgacccgctctggaggtggctcgcgcgggagaagcgcggcgtgctcggcagtgcccgcatcaagtggaatttcagcaagttcctggtcgatcgccaggggcgggtggtgtcgcggcatgcgcccaccacccggccggagcagctgagcggcgagattgaagcgctgttgtga

SEQ ID NO: 494626 - DNA, 780 bp, Stenotrophomonas maltophilia
atgtcctccgcttttggcgccgaaacggtgcttgaggtccgtcactggaccgacgcctacttcagtttcaccaccacccgcgacagcggcttccgcttcgagaacggccagttcgtgatgatcggcctggaaaccgaggcacggccgctgctgcgtgcgtactccatcgccagcgccaactgggaagagcatctggagttcttcagcatcaaggtgcaggacggcccgctgacctcgcgcctgcagcacatcaagccgggcgacaaggtgctggtcggcaagaagcccaccggcaccctgctgatcagcgacctgcacccgggcaagaacctgtacctgctgggcacgggtaccggcatggcgccgtggctgtcggtcatcaaggacccggagacctacgagcgcttcgagaaggtgatcctctgccacggcgtgcgctacgaaaaggatctggcctaccgcgattacttcgagagggagctgcgtgagcacgagttcctgggcgagatgatcggcgacaagctgctgtactacccggccgtcacccgcgagccgttcgccaaccagggccgcctgacctcgctgatggaaagcggccagatgcagcgcaccctcggcctgccggagctgagcccggaaaacgaccgcgcgatgatctgcggcagcccgcagatgctggccgacctgcgtgctgtgctcgatgcccgcggtttccaggtttcgccgcgcatcggccagccgggccactacgtgttcgagcgcgcgttcgtcgagaaatga

SEQ ID NO: 494627 - DNA, 1872 bp, Stenotrophomonas maltophilia
atgcctgccatccccaccgctggcgctgccgccgcgaagaaacccagcctgcgccagcgcttcagggcgatgcgcaacctgccgccgttcctgcgcatggtctggcagaccagccccgcgctcaccctggccagcctggggctgcgcctgatccgtgcgctgctgccggtggcgatgctgtacgtcggcaagctgatcatcgacagcgccctgcacctgagccagcacgacgccggtttcccgccgctgggcgaggcgctgtccagcggcatgctcaatccgctgctgggcctgctggcgctggaattcggcctggccatcgcctcggacctgctcggccggctggtcagctatgccgacgcgctgctgtcggaactgttcgccaacgtcaccagcatccggctgatggaacacgcggcgacgctggatctggaggacttcgaggacccggacctgcaggacaagctggaccgtgcgcggcgccagaccatgggccggatgaacctgatgagccagctgttcggccaggtgcaggacgcgatcaccgtggccagcctcgccgtcggcctgctggtctacgcgccgtggctgatcctgctgcttgcgctggcactggtgccggccttcatcggcgaatcgcacttcaacgcggccggttacagcctcaacttccaatggacgcccgagcgccgccagctcgactacctgcgccagctcggtgccagcgtggaaacggccaaggaagtgaagatctacaacctgcaccgcttcctggtcgagcgctatcggcgcctgtcggtggcgctgttccaggccaaccgtgccctggcacggcgccgggcgttctggggcacgctgctggctgcgctgggcacgctgggctactacaccgcctacgcctacatcggctggcgcacggtgcgcggcgatttctcgatcggcgacctgaccttccttgccggcagcttcctgcgcctgcgccaactgctggaaggcctgctgatcggcttctcgcaggtggccagccaggcgctgtacctggacgacctgttctcgttcttccagatcgagccggaaatccactcgcgcgaaggcgccatacgcgtgccgcagccgatccgccagggcttcgtgttcgagaacgtcggcttccgctatcccgatgccgaacagtgggcggtgcgccaccttgatttccagctgcaggccggcgaagtgctggccctggtcggcgagaacggcgccggcaagaccaccctggtgaagctgctggcacgcctgtacgaaccggacgagggccgcatcctgctcgatggccgcgacctgcgcgactacgacctggacgacctgcgcgccaacctcggggtgatcttccaggacttcgtgcgctacaacctcagcgccggcgagaacatcggcgtcggccaggtcgaggccatggacgaccgggcgcgcatcgccgacgccgcgcgccgcggcatggccgaggaagtgatcgaggagctgcccggtggctacgaccagctgatcggccgccgtttcaagcagggcgtggacctgtccggtggccagtggcagaagatcgccattgcccgcgcgtggatgcgcaatgcgcaggtgatgatcctggatgagccaacggcagcactggatgcgcgcagtgaattcgaggtgttccagcggttcagggaactggcggataatcgcaccgccgtattgatttcccaccgtttttcctcggtccgcatggccgatcgcatcctggtgctggccgatggtcggatcgaggccagtggcacccacgcccagctgatggcacagggcggccgctatgccgagctgttcgagctgcaggcggcgggttaccgctga

SEQ ID NO: 494628 - DNA, 453 bp, Stenotrophomonas maltophilia
atgtccgaccacgcctctccccgcgtcccctacacccgcctggccgccgaggccttcaagggcctgctggccaccagccaggccgtgcatgacagctcgatcgatccgaccctgatggaactggtgttcctgcgcgtgtcgcagctcaacggctgcggctactgcatggacatgcacggcaccgcgctgcgcaagggcggcatcgagccgcgcaagctggacaccctgcccgcctggcacgaaagccgcttcttcgatgcccgcgagcgcgcggcactgggctgggccgaggcgctgacccggctgaccgacggcgcgccgtcgcaggccgcgttcgatgccctggcaccgcacttcgatgagaagggcatcagtgacctgagcatgggcatcgcggtgatcaatgcctggaaccgcctcggtgcggggttgctgccgccgctgccggcctga

SEQ ID NO: 494629 - DNA, 897 bp, Stenotrophomonas maltophilia
atgaacgccgaaaccgctttccagacccaccgcccgcgcctgatggcgctggcctaccgcctgctcggcagccgcaccgacgccgaagacgtggtccaggacgcctggctgcgctggtccggcgccgatcctgcggccgtccgcgatgccgaggcctggctggtcaccaccaccacccggctcggcctggaccggctgcgtgcggccaagcgcgagcgcgtccactacgtcggcccatggctggccgaaccgctggcggtcaccctggagccggacccggcgcccggtccggcccagctgcatgcgctggccgacgacgtctcggtcgctttcctgaccctgctcgaacacctcggccccgaggaacgcgccgccttcctgctgaaggaggcgttcgaccacgactaccgtgagatcgccgagctgatcggccacagcgaggccaactgccggcagctggtgcaccgtgcccggcaacgcctgcaggccggacgaccgcgcttcaatgccgatgccagccagcaccggcagctgctggcgcgcttcatggaggcctcgcagcgcggcgacagcgacgcgatccaggccctgctgcacgccaacgcggtgctggtttccgacggcggtggcgtggtcactgcggcggtgcggccgctgctgggcgccgaacgcatcggccgcctgttctgggccatcgcccgccgcggcgcggtgcatcccgcccagctgggctacgtcaacggcgagccggcgatcctgcgcttccagggtgagcgcctgcattcggtcaccaccatcgaagtggtcgatggccgcatcgccaacgtgtacagcgtgttgaatccggaaaagctgccgggtgttgtcacgcgcgatgacggtacggcgtcctggtag

SEQ ID NO: 494630 - DNA, 1518 bp, Stenotrophomonas maltophilia
gtgacatcgatcaagcaggaagacctcatccagtccatcgccgacgcgctgcagtacatctcgtactaccacccggtcgactacatcaagaaccttgccgccgcctacgagcgcgaggagtcgccggccgcgaaggaagcgatggcgcagatcctgatcaattcgcgcatgtgcgccgagggccaccgcccgatctgccaggacaccggcatcgtcaccgttttcctggaaatcggcatggacgtgcgttgggatgacgccaccatgggcgtggaagacatggccaatgaaggcgtgcgccgcgcctacatgcacccggacaacaagctgcgcgcctcggtgctggccgatccggcaggcaagcgcatcaacaccagggacaacaccccgggcgtggtcaacgtcaaggtggtgccgggcaacaaagtcgacgtgatcgtcgccgccaagggcggtggttcggaagcgaagaccaagttcgccatgctcaatccgtccgactcgattgtcgactgggtgctgaagaccgtgccgaccatgggcgccggctggtgcccgccgggcatgctgggcatcggcatcggtggcaccgccgagaaggcgatgctgctggccaaggaagcgctgatggagccgatcgacatcaccgagctgcaggcccgtggtgcgtccaaccgcatcgaggagctgcgcctggagctgtacgagaaggtcaacgcgctgggcatcggtgcgcagggcctgggtggcctgaccaccgtgctcgacatcaagatcaacgactacccaacccacgcggccaacctgccggtggcgatgatcccgaactgcgcggccacccgccatgcgcacttcaccctggatggcagcggcccggtgatgctggacccgccgtcgctggaagactggccgaagctgacctacgacgcatccaagggcacccgggtggacctggatacgattaccccggaagacgtggccagctggaagccgggccagaccctgctgctcaacggcaagctgctcaccggccgcgacgccgcgcacaagcgcatggtcgacatgctcaacaagggcgagcagctgccggtcgatctgaagggccgcttcatctactacgtcggcccggtcgatccggtgcgtgacgaagtggtgggcccggccggcccgaccacggcgacccgcatggacaagttcaccgagcaggtgctggcacagaccggcctgctgggcatggtcggcaaggccgagcgcggcccggccgcgatcgaggcgatcaagaagcacaagtcggcctacctgatggccgtcggtggctcggcctacctggtgtccaaggcgatcaaggcggccaaggtggtcggtttcgctgacctgggcatggaggcgatctacgagttcaccgtgcaggacatgccagtgaccgtggccgtcgactccgccggcgaatcggtgcacaagaccggcccgcgcgagtggcaggcccgcatcggcaagattccggtggtggtggagtaa

SEQ ID NO: 494631 - DNA, 339 bp, Stenotrophomonas maltophilia
atggccctgcatcgcttcatcgtggccggcgtgctgctggccctggccggctgcagcaccccggcgtcgtacgaaggcgcggatttccctgcatcggcgcaatgccgcatgcagtgccaggccggctatcgcagctgcatggcgcagaatgactctctcggcagccgccagagcaattgcgagcagcggatggtgccggcgccggacaagcgctgcaaggacgtggacaacccggacctgcgccgtgcctgcgaactgaagacgcatgactgcacgctgcgcgcgccgatgatgtcctgtggcgagcgccgcgatacctgcatgagcagctgcggctga

SEQ ID NO: 494632 - DNA, 636 bp, Stenotrophomonas maltophilia
atgagcaccacgctgtatggttcgacaagcaccgccgcgctggtggtgcactggctgctgatcgagctcggcatcgagcacgagttggtgctgctggatttcgacgcgcgcgagcacaagtcggcggagtacttggcactgaatccggccggcgtggtgccgacgctgctgatcgatggcctggtactgactgaagcggcggcgatcgccctgtacctggccgaccgccatccggacgccggcttgttgccggcactgggcacgccgcagcgcgccgatgcctaccgctggatgttctggtgtgccaatacgttgcagccggcctatcgcgcctggttctatccgcacgaggtggcgggcgaggcaaacgtggaggccagtcgcgagatggcgcgacagcgcctggaagcggcctggcagcatgtggccacgcacctgctggcgcatgggccctacctgctgggcgccacgccctgcgtggtcgactacatgctggtgatgctgatgcgctggtcgcgcaacatgcccaggcccagtgacacctggccgtcgctcaaggcacatgccacctcgatgaaggcgcgcccggcgttcgccgaggcctaccgccgcgaaggcatcaccgactggcggtaa

SEQ ID NO: 494633 - DNA, 342 bp, Stenotrophomonas maltophilia
atggacgtgacgatctggcacaacccggcctgcagcaactcgcgcggcgcactgaagctgatccgcgatgcgggcttcgacccggtggtgatcgagtacctgggcaccccacccgacgcggccacgctgcgccaggtgctggccgagtcggccctgagcgcgcgcgacctggtgcgcagcaaggagacccagttcgccgaactcgggctggaagatgccgacgatgccgccctgctggctgcgatggccgaacacccgcgcctgatcaaccgccccgtggtgcgcacgcccaagggcacacggctgtgccgcccgccggaaacggtgctggagatcctgtaa

SEQ ID NO: 494634 - DNA, 1155 bp, Stenotrophomonas maltophilia
atgaccctccccacgctgcttccccgtctggcgccgctggcgcttgccctggccagtgcaccgttggctgcgcaggagttcgcgcccagcgccgacacctcgccggccgcctgcgcggcgatcaccaccgacgcggcccgcctggcctgctatgaccgcctcttcgggcataccccggaggccaccgccgccgccgatgccgccgccgaatcggctgcgcaggcgcgccgcgaggaacgacagaccgcgcgcgtgagccagggcgaggaaaagctgcgcgagcgggtcagcgacctgttccgtccggcggcaccggacagcgcgctggccaatgctggccgcggttcgctgctggatagccgctgggagctggccgaggactccaagctggggcccttccagctgcgtgcctacaagccggtgtacctgctgccggcgttctggaccagcgaccgcaacaccacgccgcattcgccgaacccggccaacagcgtgacgaccccgcaggtactcgacagtaccgagctgaagttccagatcagcttcaagaccaagatcgccgagaacctgttcggcgacaacggcgacatctgggctggctacacccagagttcgcgctggcaggcctacaacagcgaggattcgcgcccgttccgcgaaaccaactacgaacccgaagtgatgatggtgttccgcaacggctactcgatcggtggctggcgcgggcgcatgaccggtatcagcctcaaccaccagtccaacggacgggccgatccgctctcgcgcagctggaaccgggtcatgctcaacatcggcctggatcgcgagaactgggcgctggtgctgcgcccgtggtaccgcatcccggaaagccgcagcgaagacaataatccggacatcgaggattacatgggccggggtgacgcgaccctgatctggaaccgcaacgggcatgaagtcgcgctgatggcgcgtcattcgctgcgcaccggcagccgctcccacggtgcactgcagctggattacggctttccgatcagcaatctgctgcgtggccatgtgcaggtcttcgacggctatggcgagagcatgatcgactacaaccacaaggccacctatgtgggcgtgggcgtgtcgctgctggagtggttctga

SEQ ID NO: 494635 - DNA, 486 bp, Stenotrophomonas maltophilia
atgggactctcattcatcttatatctgctagcggtcatttttgtcctgatcggcatcgccggcatcatcctgccggccctcccgggcatcccgctggtgttcatcgggctgctgctggcggcctgggccgacggcttcgcccacgtcggctggcccaccctggtcgcgctgggcgtgctgaccctgctttcactgctggtggacgtgctcgccaccgtagttggcgcgcagcgcgtcggcgccagccgcaaggccctgtggggcaccttcgtcggcagcatcgtcggcctgttcttcatgcccatcggcctgtttgccggaccgctgatcggcgccctgctcggcgagtactggcacgcccgcgaactcggccgctcgaccaaggtgggcctggcgacctggctcggcatcctgctcggcctggcactgaaactggcggtggtgatcgcgatgctgggcctgttcgcgttcgcctggttcttctga

SEQ ID NO: 494636 - DNA, 210 bp, Stenotrophomonas maltophilia
atggctgagcgcgagaccggtaccgtaaagtggttcaatgatgcgaagggcttcggcttcatcagccggcagaatggcgaggacgtgttcgtgcacttccgcgccatcgagacccagggcttcaagagcctcaaggaaggccagactgtgagcttcgaagtcgtgcagggccagaagggcctgcaggctgacaaggtgcagccggtgtaa

SEQ ID NO: 494637 - DNA, 495 bp, Stenotrophomonas maltophilia
atgaagatccagctcatcgccgccagcgccatcgctaccctcgcgctggctggctgtgccacctcgcccggttacagcggcggtggttacaacaacggctacaacaacggcggctacggcaacaatggcggctacaaccagggccgttgcgctgactgtggcatcgtcacccgcatcaacaccgtgccctcgggccgcaccgcgcccagcgcgaccggcgcgatcctcggcggcatcgtcggcgccgtggccggccatgaaatctccgaccacaccggtggcagccgtggcaacaagaacatcgccgccgccgcaggcgcggtcggtggtgccctggccggcaaccagatccagaagaacgtcaccagcgatacctatgacatcagcgtgcgcatggatgatggccgcaccatcgtggtcaaccagcgcgatctcggcggcatccgcgagaacacctacgtgcgcgtcgtcaatggcaaggtcatcctgcgctga

SEQ ID NO: 494638 - DNA, 435 bp, Stenotrophomonas maltophilia
atgaatgccagcccgccccgccgcctgtccagcgcccatcgctacctgttcgtgctctgcctgggcctgctgatcggcctgatcgccacggtaatggtcggccgcgccctgcaggcgcgtcgcgatccgttcccgggcagcctgatgcaggtgatgcagcggcagtcacagctgctgcagcaggcccagctgcagaaccgctgcagcctggctgacagcgtgccgcggctgcaggtgctgcgcctgctgtccaatgacctggaccaggcgtttcccgggctgaaggacagtgcgcagttccaccagcacgccagccagctgcgcggcaacctcaacacggcgctggcctcaccccccggcgactgcagggccctcgcccagctggtggaaacactgcaggcggactgccgcgcctgccaccaggatttccgctga

SEQ ID NO: 494639 - DNA, 825 bp, Stenotrophomonas maltophilia
atgaacgaacaggtcaaacaacgcttcgccggcatcgaacggctgtacggcgtgggtgcactcgagcgcctgcagggcagccgcgtggcggtggtcggcatgggcggcgtcggctcgtgggtggtggaggcgctggcccgttcggccgtcggccacctgaccctgatcgatgccgacgatatctgcgtgtccaacaccaaccggcagctgccggcgatggaaggcaactacggccgcaacaaggccgaggcgatggccgagcgttgccgtgcgatcaatccggacatcggggtcgacgcggtgcaggcattcctgaccgtgtccaacatggccgagctgctggaccgggggttcgatctggtgatcgatgcctgcgacagcttccgggtcaaggtcgagacgatcgcatggtgccgccgccgcaagctgccgttgctgaccgttggtgccgccggtggccgtaccgatccgaccctggtgcgcatccgcgatgtctctcgcaccgagcacgacgccatgctggcgctgatccgcaagaagctgcgcagcgaattcaacttcccgaagaacgccaagcgctatttcggcgtaccggcggtgtattcgctggagaatgtgaagtacccgcaggccgatggcagcgtctgcggcatccgtccgaacctgggcgccgatgcggcgttgaagctggactgtggtgccggcctgggcgcggcaacccacatcaccggcgcgttcgccttcgcggcggttggcaaggcgctggagatgctgctggagccgaagaaggtgaaggtggatgcggtagaggccagcgaggtgtga

SEQ ID NO: 494640 - DNA, 774 bp, Stenotrophomonas maltophilia
ttgagcatcctggttgacagccactgccatctggatgccagcgggttcgaccgtgaccgcgctgcggtgatcgagcgtgcgcaggccgcgggggtgcgccagcaggtggtaccggcggtgaccgcggccagctggccgaagctgcgtgaggtctgccagcaggcgccggggctgtacccggcctacggcctgcatccgatgttcctggccgatcaccagcccgggcacctgccactgctgcgcgagtggatcgagcgcgaacgcccctgcgcgatcggcgaatgcggcctggacttctttgtcgaagggctggacgccgacgcccagcaggcgtatttcatcggccagctggaactggcccgcgaattcgagttgccggtgatcgtgcacgcgcgacgcgcggtggatgcggtgatcgccgccatccgccgcgtcggcggcctgcgcggcgtggtgcacagcttttccggcagcccggaacaggccgcgcaactgcacaggcagggcttcctgctcggcctcggtggcccactgacctacgatcgcgcgcaacggctgcagcggctggtgcgcgagatgccgctggaacagttgctgctggaaaccgacgcgcccgaccagcccgacgccggcatccgcggccagcgcaacgagccagcgcggctggcgaccattgcccggcacgtggccgcactgcgcgggatggagctggaagccgtggcccaggccacgacggagaatgcgcggcgattgttcgcgctgccggcaatgtaa

SEQ ID NO: 494641 - DNA, 216 bp, Stenotrophomonas maltophilia
atggccaacccgatgctgctgccggtactgcaatgggcccgccggctgcgctaccccaccctgttcaagctcaccgccggcctgttcgtgctgaccttgttcatcccggacccgatcccgttcgtcgatgagctggtgctgggcttcggcacgctgctgctggccaactggaagagccgcaacgccgcaacacctccgccgctggaacagcgttga

SEQ ID NO: 494642 - DNA, 846 bp, Stenotrophomonas maltophilia
atgaaaagcacaactacaactgtcctggtcgcagcgggcgcgctgctggtcggtggcatcgccaccgccgccttcatgaagagtggtgacaagtcgcccgattccatcagcgccggaacccccaatggtgaatcgcgccttgttgaaggtaacgcttctgacgacggcgcacgtggtgacaagctggacccgtccgcgccgcgcgggcttgaatatgccgatgtgctgaaggttgacccgatcaccgagaaacagaaggcctacgccaccgtgatcggcaccgatgcggtgcgcgaaacgtccacgacccagactcctcatgaagtctgccaggacgtgacggtgcaggagcgcctgccggaacgtgatggcaacgttggcggtaccgtggttggcgctgtggtcggtggcctgctcggcaaccaggtcggtggcggcaacggcaagaaggccgcgactgccgccggtgccgtggccggcggcttcatcggcaaccagatcgacaagcgccatgtgggtggccgcgtggtcaaccgcaccgagcgccagtgccacaccgagaccgccacctccgagtcgagccgcgtcaccggctacaacgtgacctaccgcaatgaggacggcaccaccggcaccatgcgcatggccagcaagccgggcaaccgcattgccatgggtaccaacgacgtggtgaagggttacaacgtgacctaccgttatgacggcgcggagaagaccgtgcgcatggacaacaagccggccagcgatcgcctgccggtggtcgatggccagctggtcacacagaccgcggccgccggtgccactgccgcagccacgcgccagtaa

SEQ ID NO: 494643 - DNA, 543 bp, Stenotrophomonas maltophilia
atgagcatcttcgacctgcgcatcgaaaccgagcggctgatcctgcgcccgctgcttcgcgaggactacgagccgtacctggcgttctgcgccgacgaggccacgatgcgtaccctgggcggcgtgcagccaccctcggtggcctggcgcggtttctgcagcctggccggcgcctggcagctgttcggcttctcgatgttcagcgtgatcgagaaatccagcggcgactggatcgggcggatgggaccgtggcagccgcaggactggccgggtaccgaggtcggttggggcatccgccatgccagctggggccggggctatgcgccggaggcggcggtcgcggcgatcgactgggcgttcgatacgctgggctgggctgaggtgatccataccatcgccgaggacaacgacaactcgcgggccgtggcacgcaagctcggcagcaccctgctgcgcatgggggagttgccggcgccatacaacggcaagcccatgcagatctggggccagtcgcgcgaacagtggcggcaacgcgcgcgctga

SEQ ID NO: 494644 - DNA, 657 bp, Stenotrophomonas maltophilia
atggtggaagagcgcgtcccgttgacggtgcacggcatgtcggtgtcaggcaattgccacaaggtccgcctgctgctggagcagctcggcagccgctaccgctgggtggaagtggacagtgcccacggccagacccacacccccgagttcctcgcgctcaatcccaatgccaaggtgccgttgatcgtccgcgacgatggccgcgtgctgaccgagtccaatgcgatccttttctggctggccgaaggcacgccctacctgcccaccgatggctgggagcgcgcgcaggcactgagctggatgttcttcgagcagtacacgcacgagccgtgcgtagcggtcgcgcgcttcatccgcggctggaccccgcctgggtcgccgcgccgcgccgaactgccacgcctgcacgagcgcgccgccgctgcactggcggtgatggagcagcacctgcgtgatgcgcaatggttcaccggcagtgggtacggcatcgccgacatcgcgctgttcgcctacaccgacgtcgcaggcgagggtggaatcagcctgcagccgttcccggaagttcgcgcctggttgcagcgcgtgcgcgggcagccgcgcttcctgccgatgccggcggtgaccgccgaggtgcgcgcccgcttcgaggccgcatga

SEQ ID NO: 494645 - DNA, 2280 bp, Stenotrophomonas maltophilia
atgttcgctgtggttccagatccgattcccgcacgcatgcgcgtgctcaaccgcgccgacgtgtgcgacgccaatttcctcgacgcggtgcgtggctggcgcggtaccccgcgcccgcgcccggcgccggatgcgccgatcctgccgggcagcacgcttaccgccgccgcgtttggcgagctgttcgattcgcagctggccagccgccagctggacctgatggcgcgcgtgctgcgcgtgcagaacaaggtcttctacaccatcggttcatccggccacgaaggcaatgcgctgctggcgcgggcctgccggcatacggatcctgcattcctgcactatcgctccggtgccttcatggccgagcgctcacgccaggtgccggggatcgacccgctgcgcgatgccgcgctgtcctttgctgccagcgccgatgacccggccagcggggggcggcacaaggtgtggggcagcaaaccgttgtgggtgctgccgcagacctcgaccatcgcctcgcatcttccgaaagcgctgggcaccgcgctggccctcgaaagcggcaagcggctgggccacgaactgcccattccggccgacagcatcgtactgtgctcgttcggcgacgcctcggccaaccatgccaccgcgcagaccgcgttcaacaccgcgatgtggtcggcctaccagaagctgccggcaccggtcctgttcgtctgcgaggacaatggcctgggcatctcggtgaaaacgcctgaaggctggatcgccgaacgcttcagcggtcagcccgggctggactatttctacgccgatggcctcgacctggtcaccggccatgcgcaggtgcaggcggcggtggagcactgccggcgtacgcggcggccgaccttcctgcatctgcgcaccacgcgcctgatggggcacgccggcaccgacttcgaggtggaatggcgcgcgttgccggagctgtgcgcggccgaggcgcaggatccgctgctgcgctcggcacagatcgcgatggaatcgggctggatggatgcggccgccatcgaggtggcctacgagacgatgcgcgcgcgctgcatggccgccgccgccgatgccgaaggacggccgaagctgcagtcgctgcgggaagtgatggagccgcttgcgccctatacgccggctgcggtgcaggccgaagcacggcgcgaggtgcccgccggaacgcgtcaagccctgtatggcggtgtggaggcgttgcccgaacggcaggcgccacgccacctcgcgatccagatcaaccatgccctgcaggaactgctggcgaagtatccgcagagcctgctgttcggtgaggacgtcgcacagaagggcggtgtctacaccgtcaccaaggatctgctgcgccgcttcggcccacgccgggtgttcaacaccctgctggacgagaccatgatcctgggcatggctcagggcctggccaacctgggcatgctgccgattccggagatccagtacctggcctatctgcacaacgccatcgaccaggtgcgcggcgaagcgtgttcgctgcagttcttctccaacgaccagtaccgcaacccgatgctggtgcgggtggccgggctggggtaccagaagggcttcggtggccacttccacaacgacaactcgatcaccgcgttgcgcgacatcccggggctggtggtgggctgcccgtcgcgtggcgacgatgcggtgatgatgctgcgcacgctggccgcactggcgcgggtggatgggcgggtggcagtgttcctggagccgatcgcgttgtacatgagcaaggacctgcacgaagccggcgatggccagtggctgttcgacttccccgcacagggccagtcgctggtgccgggggagggccgggtctatgcgccggaggccggcgatctggtgatctatacctatggcaacggcgtgccgatggcattgcgcgcatcgcgggcgatcgagcagcagctgggctggcaggtgcgggtggtcgacctgcgctggctggtaccgctggacgccggtttcatcgctgcccaggccgccagcgcacggcgggtgctggtgctggatgaaggccgccacagcggcggggtgggcgagggcgtggtcaccgcgctggtcgaggccgggttcggccatctgccgttgcgccgggtctgtggtgccgacacctacacgccactggcgggggcagcaatgttcgggcttccaagcgacaatgcggtgattggcgccgccctcgacctggcgcaggaaccctga

SEQ ID NO: 494646 - DNA, 1944 bp, Stenotrophomonas maltophilia
atgtgtggattggcgggaatgttgttgccggcgccgctggcgtcggccgaggcgctgcaggcgcaggccctggccatgggccaggcgctgcaccaccgcgggcccgatgatggcggcagctgggtcgatgccgaggcgggcatcgcgctggcgcatcgccgcctgagcatcctcgacctgtccccgctgggccaccagccgatggcctcggccgacggccgctacgtgatggcctacaacggcgaggtctacaacttcgcggccctgcgcgaggaactggagccgctggggcatgccttccgcggccattccgacaccgaagtactgctggcggcgatcctgcaatggggcgtggaagacaccctgcagcgctgcaacggcatgttcgccatcgcgctgtgggaccgccaggagcgttgcctgtggctggcccgcgatcgcgtcggcaagaagccgctgtactacggctgggccggcgacacgctggtgttcggttcggaactgaaggcgctctggcagcacccggcgttcgacaacgacatcgaccgcgatgcgctcaccttgctgctgcggctggattacatcccggcgccgcacagcatccaccagcgctgctacaagctgatgccgggccgggtgttgcgcctggacgcggcggccgtcgctgccggcgcatccgcgcatcgtccggaacaggcacagcggccgtactgggatgcgcgcgcgcgcatgcaggcggcgctggccgcacccttccagggccgcatcgaggacgccgaggaacagctggacacgctgctgcgcgacgcggtggcgctacgcatggtggccgacgtgccggtcggcgtattcctgtctggtggcaccgattcctcactggtggcgtcgctgatgcaggcccagagcgggcagccggtgcacagcttcagcatcggcttcaccgattcgggacatgacgaggcgccgctggcccgggagctggcggcccacctgggctgtgaccataccgagttgtacgtcagcggcgccgacgcgctggcggtggtgccgcagttgccggcgatgttcgatgagccttttgccgacgcgtcgcaggtgccgaccgcgctggtcgcccggctggcgcggcagggcgtgaccgtggcgctgtctggtgacggtggcgatgagctgttcttcggctatacccggtatgtacgcgcgctgcgcaactggcagatgctcggccgcgtgccggggccgctgcggcgctggatgggcgcgcgtgcgcagcagcagggcgaagcctcgcgcaccggcggcctggccgcgctgctggccgagaccggtgcgcgtggcatcggcgacgtctaccgcaaccgcatctcgcgctggcgcgacccggccgcggcggtgaccggcgcgcgggccgccggcagcttctacgacctggccgatccgctgcacggcgcgggtacgccggccgacgcgatgatgctggccgatttcgtgacctacctgccggacgatctgttgtgcaaggtcgaccgcacctcgatggcggtcagcctggaggcgcgcgcaccgctgctggactggcgggtggccgagttcgcctggtcgctgccgttgggcttcaagcgcagcgagaccaccagcaaggtgctgctcaagcgcgtgctgggccgttacgtgccgcattcgatggtgcaccgtcccaagcgcggtttcggcgcgccggtcagtgactggctgaaaggcgacctgcggccctgggccgaggacctgctgcagccggcgcggctggagcgtgagggcgtgctgtcggcggcggcggtgcagccgctgtggcagcagttcctgggagggcagcgcaagtggcatacccatctgtggaacgtgctgatgttccaggcctggcaggcgcattggcggcaggtgcgcgcaggcattgtgggcggctga

SEQ ID NO: 494647 - DNA, 561 bp, Stenotrophomonas maltophilia
atgtccgtccccaccatcgccgtgttcgtcggcagcctgcgcaaggactcgtgcaaccgcaagctggcccatgcgctggagaagatcgccggtgatcgcgcacgcttccagtacgtgcagatcggcgacctgccgttgtatgaccaggacttcgacgcgcagtacccggcgcagggtacccggctgaaggaccaggtgcgcgccgccgacgcggtgctgttcgtcacccccgaatacaaccggtcggtgccgggcgtgctcaagaacgccatcgatatcggctcgcgtccctacggtgacagtgcgtttgccggcaagccggcggcggtgatcggcgcctccatcgggcagatcggtaccgccgtggcccagcagcacctgcgcaacaccctggccttcctggacatgcatgtgcttgggcagcccgaggcgttcatccacttcaaggagggcctgatcgatgccgacggcacgatccacaacgagggcacgcagaagttcctgcagggctacgtggaccgcttcctggcgctgatcgcggtgcacgtcaagggcgattga

SEQ ID NO: 494648 - DNA, 1431 bp, Stenotrophomonas maltophilia
atgtccgctcgtcccggcttccgttccaaccgcagagagcgcggtgatggcttcgatcgcgatcgcgacgagtcgcgcatcgaccagttgcgggtaccgccgcattcggtggaagccgagcaggcggtgctgggggggctgatgctggcgcccgaagcgtatgaccgggtcaatgaccagctgaccgaaggcgacttctaccgtcgcgaccaccagatgatctatcgggcgatccgcgagctctccgagcgcgagcgtccgttcgatgcggtgaccctgggcgagtggttcgagtcgcagggcaagatggaattggtgggcgacggtgcctatctgatcgaactggccagtaccacgccgtcggctgccaacatcgtggcctacgccgagatcgtgcgtgacaaggcagtgttgcgccagctgatccaggtgggcaccgacatcgtcaacgacggtttccagcccgaaggccgcgacagcagcgagctgctggcctcggcggaaaagagcgtgttcgccattgccgaacagggcgcacgtggtcgcaccgatttcgtggccatgcccggtgcgctgaaggatgcattcgaggagctgcgcaaccgcttcgagaacggcggcaacatcaccggcctgccgaccgggtacaccgatttcgatgcgatgaccgccggcctgcagccgaccgatctgatcatcctcgcggcgcgcccggccatgggcaagaccaccttcgcgctgaacatcgccgagtacgcggcgatcaagtcgaagaagggcgtggcggtgttctcgatggaaatgtcggcatcgcagctggcgatgcgcctgatttcctccaatggccgcatcaacgcgcagcgcctgcgtaccggccagctggaagacgaggactggagccgcgtcaccagcgcgatcaagatgctgaaggaaaccaagatcttcatcgacgatacgccgggcgtgtcgccggaagtgctgcgctccaagtgccgccgcctcaagcgcgagcatgacctcggcctgatcgtgatcgactacctgcagctgatgagcgtgcccggcaacagcgaaaaccgcgcgaccgaaatctcggagatctcgcgttcgttgaagggcctggccaaggaattgaatgtgccggtgatcgcgctgtcacagctcaaccgctcgctggaaacgcgtaccgacaagcgcccggtgatggccgaccttcgcgagtcgggcgcaatcgagcaggacgcggacatgatcgtgttcatctaccgcgacgactactacaacaaggaaaactcgccggacaagggcctggccgagatcatcatcggcaagcaccgtggtggcccgaccggctcgtgcaagctgaagttcttcggcgagtacacccgcttcgacaacctggcccacgattcggtcggctcgttcgaataa

SEQ ID NO: 494649 - DNA, 2244 bp, Stenotrophomonas maltophilia
atgtcgtcccacgcttcgcatcgccgcaatctgctggccctgctggtctgtgcttcgctgccgtcgctcgctgccgctgaacccgcccccgcccccgacgcgccgtcggcgaccaccctcgattcgatctcggtgatcggccgcggcgaagcccgccaggtgcagcgcgtgaccgccgaggacatgaagatcctgccgcccggtgcgaaccccctgaagctgctggccagcaagccgggcgttcacttcgagtcggccgatgccaccggcgcgtacgaatggtccaccaccatcagcttgcgtggcttcaaccagagccgcctgggctacacgctcgatggcatcccgctgggcaacatggcctatggcaacagcaacggcctgcatatcagccgtgccgtgaccagcgagaacctgggcggagccgaagtgtccaccggcatcggcgcgctgggtacgccgtccaccagcaacctcggcggcgtgttccagttctattcgatcgatccgtccaccgagtacggcgtggtgctggcgcagggcttcggcagcgacagcgcgcggcgcagctatgcgcgcctggagaccggtgagcaccagggctttgcggcctatctgtccggcgtgtactccgaaggcgacaagtggaagggcaagggctcgcaggagctgaaacagttcaacggcaaggccacctacaatttcggaacggacagcaggatcaccgcgctgttcaacgcctcgcgccgcgtcgaggcggactaccaggacctgtcgctggagatgatcgatcgccttggctgggactgggacaactacgcgccggactgggatcgtgccgtcgccgccgcgcgcggcaggttcacgggcggcgtcaacagcccctgggatgcgtactactccggccacggcctgcgcaacgatgacctgtccagcatcgccggcgatttcggcctgaacgagtcgatgcggctgaaggtcaacgtctacaaccacagcaaccgtggccagggccactggttcagcccgtccaatccgtccaacccgggcaccggtcgcgagattccgatctcgatccgcaccaccgagtacgcgatcgaccgtaccggcgtgacctcggcgttcacctggaacgtcggcggccacgacctggaagccggcctctggtacgaggacaacggccacagcgtgcagcgcaacttctactacatcgacggcccggtcaccgacgacttcttcctgcgcaacccggaccagcgcgtgtggcaccagcgctacaccaccattacccgccagttctacgtgcaggaccgcttccgcctgttcgatgaccgcctgaccatcgacatcggtgcgaagtcgccgcacacccgcacccgcgtgcgcacgccactgggcagctatgccaacaacagcagcctgacttcgaagaagggcctgctgcctcaggcgggattcaacttcaagctcaacgaaggcaacgagatcttcggttcgttcgccaggaacatcgccgcctacgcgttgggcgtgggcagcccgttcaacgtgccgcaggcggcgttcgatgccagcgcgcaggacctgaagccggaacagtcacgcaccctggaactgggctggcgcggctacgggaagggctatgaagcctcggttgcggcgtacgacgtcaagttcgacaaccgcctgctggcgatcgcccagtgcgtgggcatcctcggctgcccggcgctgttctccaacgtcggttcggtgaccagccgcggcgccgaggcgacactgcagctgaagccgatgcaggacctggcctggtccaacgcgctgtcctggaatgacagcacctacgacaacgactacgtgaacaatggcgtggtgccgacccgcggcaagaagaccgtcgacacccccgaatggatgttcgccagcaccctggcctggaccccgggcccctgggacatgcgcctgtcggccaaccacgtcggcaagcgctacgtgacctataccaacgacgagtcggtgccgagctactggctggtcaatgcctccgtggcctatgacttcggcgcgctgggcccggcgcagaacctgaccgtggcgctgaacctgaccaacctgacggacaagcgctacctgtcctcgatcaacaccaacggcacctacgccgccgacccgacccgcagcctggcgaccatgcaggtcggcgcgccgcggcaggtgatggccaccgccaccgtgcgcttctga

SEQ ID NO: 494650 - DNA, 1593 bp, Stenotrophomonas maltophilia
atgcgcgggcctgtggatccggaacgccgtcgtcgcctgctgcgcatggcgtggcggggcacgggggcggcgatcgcgctggcggcgatgccggggctggccacggccggcccacggccgcggctggggcgtgatccgttcacccttggtgtcgccgccggtgatccggatccacagggggccgtgttgtggacgcggctggcgccggacccgctcaacggcggcggcatgccgtcgcgggcggtgccggtgcgctggttcgtggccgaagacgccggcatgcgccggctggtacagcggggcgtcgctgctgcggtgccggagctggcccattcggtgcacgtggaggtcaatggcctgcgcccgggccgcgactactactaccgcttcgcctgcgatggcgatgaggaaagcgcggtcggccacttccgcaccgcgtcgctaccggacacgcagctgcagcagctgcggctggccctgtgcacctgccaggcctggaacagtggctactatccggtgctgcgcgatatcgcacagagcgatgtcgacctcgtgctgcatgccggcgactacctgtacgagtacagcccgctgcagaacgcgcgtggcagcaagctggacgcggcgcgtttcagtggcgagacggtgagcctggagcgctaccgtgaccagtacgcgctgtacaagctcgacccggatctgcaggcggcccatgccgcacacgccttcgcggtgatctgggacgatcacgaggtgcagaacgactactcgggcatccatccggagaagcccggcgtgtcgatcgaggacttcatcgttcgccgcgcggcggcctaccgcgcgttctacgaacatctgccgatgcgcagcaagcctgcgggcaatagcggcctgcgcgtgcaccggcgcctgcgttacggcgatctggcacagctgaccctgctcgactgccgccagttccgcccggccaatccctgcggtgtgggcgagtcaccgcgctgcgaagcggcgctggatccacgcatgagcatgctcggcacggggcaggaagcgtggttcacgcagtcgatggccgccgcgcagggcacgcgctggaacgtggtggtgcagcagctgctgatggcgcagctgcggctggacggcggcacgccacgcgagcgcttctggaacgacgcgtgggatggctatcccgccgcacgcaggcgtctgctgcaggcgatgcaggcgggcgggcagggcaatgccatcgtgctgggcggcgactggcattccaccttcgtcaacgacctaaagctggatttcgacgcggccagcgcgccggtcgtggccaccgaattcatcgccccggcgatcagcagtggcggcgacgacacgccgtacgggccgtactacgggccatcgattccgcagaacccgcatatccgctatttcgacggcgaccgccgcggctggtggaagctgcagctgaaccggcagaccgtggacgccgagctccgcttcgccgacagcgtgctgcgcccggatgccgcagtgcgtaccgcggcgcgattccaggtggtccatggccgctcgggcgcggtgcagctcctgtag

SEQ ID NO: 494651 - DNA, 213 bp, Stenotrophomonas maltophilia
atgaagaccctgttcgcgctcggtgtgtggtgcctgctgttcgtgctgtgctggccgctggcgatcctcgccctgatcgcgtggccgctcgtgtggctgctgagcctgccgttccgcctggtcggcatcaccttctcggcgttgttcgccttcctgcgagcgctgttcatgctgccggcgcggttgcttggcggccgggcggttcccgcatga

SEQ ID NO: 494652 - DNA, 249 bp, Stenotrophomonas maltophilia
atgaggagggtgctgctggccggtctggtcctgttgccaggcccggtgctggccgcacccccggcacccccgtcggcgtggctggagcgcgagcagagcgctgcggctgacgaagccaatgcagcggcggtccctgcgccgaaagccgaggcgcgctgccgggtggtcaagcaatggaaggccggcgatacggtggtacagcacagggtctgtgaggatccaccgaagaagccggctggaaaggtgtag

SEQ ID NO: 494653 - DNA, 1437 bp, Stenotrophomonas maltophilia
atggctgaacaattcgacgtcgtcgtcatcggtgccggcccggccggttaccacgctgccatccgcgcggcccagctgggcctgaagaccgcctgcatcgatgcagcgctgggcaaggacggcaagccggccctcggcggcacctgcctgcgcgtgggctgcatcccgtccaaggcgctgctggattcctcgcgccagttctggaacatgggccacatctttggcgaccacggcatcagcttcaaggatgccaagatcgacgtcgaggcgatggttggccgcaaggacaagatcgtcaagcagttcaccggcggcatcggcatgctgttcaaggccaacaaggtcgccgcctactacggcttcggtgaactgcagccgggcaacgtggtcaaggtcacccagcatgacggttccatcgtcgagctgaagggcaccaacgtcatcatcgcggccggttcggattcgatcgaactgccgttcgccaagttcgacggcgagaccatcgtcgacaacgttggcggcctggacttcaccgaagtgccgaaccgcctggccgtgatcggcgccggcgtgatcggcctggaactgggcagcgtgtggaagcgcctgggcgctgaagtcaccatcctggaagccatgccggagttcctggcggctgccgatgcggaagtggccaaggcggctgccaaggaattcaagaagcagggcctggacatcaagctcaatgccaaggtctccaagaccgagatcaccggcaagggcaagaagaaggaagtcatcgtcacctacaccgacgcggaaggcgaaaagaccctgaccgtggacaagctgctggtggccgttggccgtcgcgccgccaccaagggcctgctggccgaaggcaccggcgtcaagatcaacgagcgcggccagatcgaagtcgatgcgcactgccacaccggcgtcaacggtgtgtgggcagtcggcgactgcgtgcgcggcccgatgctggcgcacaagggcttcgaggaaggcatcgcggtggctgagctgatcgccggcctgccgggccacgtcaacttcgacaccatcccgtgggtcatctacaccgaaccggaactggcctgggtcggcaagaccgaagcgcagctgaaggccgaaggcattccgtacaaggccggcagcttcccgttcgccgccaacggccgtgccgtggcgatgatcgagccggcaggcttcgtgaagatcctggcccatgccgaaaccgatcgcatcctcggcatgcacctggtcggcgccaacgtctccgagctggtgcacgaaggcgtgctgaccatggagttcagcggttcggccgatgacctggcccgcatctgccacgcccacccgtcgctgtcggaagtggtccacgacgcggcgatggcggtcagcaagcgcgccatccacaaggcgaactga

SEQ ID NO: 494654 - DNA, 1203 bp, Stenotrophomonas maltophilia
atggccaccgaagtcaaagccccggtactgcccgaatccgtcgccgacggcaccatcgccacctggcacaagaaggtgggcgacgccgtcaagcgcgacgaaaacctgcttgacctggaaaccgacaaggtcgtcctggaagtgccgtcgccggtcgacggcgtgctgaaggaaatcaagttcgccgaaggctcgaccgtgacctccagccaggtcgtggcgatcatcgaggaaggcgccgttgcagctgctccggcaccgaccgccgaggccgctccggccgctgctccggccgccgccgctccggctccggccgctgccgctgcgccggccccggccgccaagtcggccgccgatgcgctgccgccgggcgcccgcttcaccgccatcactgaaggcgtgaacccggccgatgtcgacggcaccggccgtcgcggcgcggtcaccaaggaagacatcgtcaacttcgcccgcaacggcggcgccggcaaggccggtggcgcacgtccggaagagcgcgtgccgatgacccgcatccgcaagcgcatcgccgagcgcctgatggagtcgaagaactccaccgcgatgctgaccaccttcaacgaagtcgacctgtccaaggtgtcggcggcgcgcaaggaactgcaggacgagttcgtcaaggcacacggcatcaagctgggcttcatgagcttcttcgtgaaggccgccgccaacgcgctgcagcgcttcccgctggtcaacgcctcgatcgacggcgacgacatcatctatcacggctactcggacatctcgatcgccgtctcgaccgagaagggcctggtcacgccagtgctgcgcaacgtcgagcgcatgtcgttcgccgacatcgagaagaccatcgccgactacgccaagaaggcccgtgacggcaagctgggcctggaagaactgcagggcggcaccttcaccgtgaccaacggcggcaccttcggttcgctgctgtcgaccccgatcatcaacccgccgcagagcgccatcctgggcatgcacgccatcaaggagcgtccgatcgcccagaacggccaggtcgtgatcgcgccgatgatgtacctggcgctgtcctacgaccaccgcatcatcgacggcaaggactcggtgcagttcctggtggacatcaagaaccagctggaaaacccgggccgcatgctgttcggcctgtaa

SEQ ID NO: 494655 - DNA, 2832 bp, Stenotrophomonas maltophilia
gtggacaatcaactgaagcagtttgcgcaatcttcgcaactcgccggcggcaacgcctcctatgtcgaggacctgtacgagcagtacctggtctccccggatagtgtcgatcccaaatggaaaacctacttcgacggcttcaagggccgcgaagcaggtgacattccgcactcggccgtcatctcccacattgcggacgcggccaaggatgcgctgaaggccggtaccggtaacggtgcaggcgacgagcgcgagcgcaatgtcggtcgtctgatcaccgcctaccgttcgcgcggccacctggacgcccgcctcgatccgctgggcctggccgcaccggtcaacaccccggatctgggcctgccgttccacagcctgtccgatgccgacctcaacagcgagttcagcactggcggcgtcggcggccagccgcgcatgaagctgcgcgacctgctggcacgcctgaaggcgacctacaccggctcgatcggtgcggagttcatgcacatctccgaggtcgagcagcgccagtggatctacaagaagctggaagccgccggtggcaactaccagctggacgctgacacccagcgccgcaccctggagcgcctgactgcggccgaaggcctggagcgctacctgcacaccaagtacgtcggccagaagcggttctcgctggaaggcggcgattcgctgatcccgatgatggacaccatcatccgcaacgccggcaaggatggcgtcaaggacgtggtgatcggcatggcccaccgtggccgcctgaacgtgctggtcaacaccctgggcaagaacccgcgcaagctgttcgacgagttcgaaggcaagttcgagcacgacgagcacgcttcggccggcgacgtgaagtaccacatgggcttctccgccgacgtcgccaccgatggcggcccggtgcacctggcgctggcgttcaacccgtcgcacctggaaatcgccgacccggtcgtggccggttccgtgcgttcgcgccaggagcgccgcaaggacaccgcacgcaagcaggtcatgccgatcctgatccacggcgacgcggccttctccggccagggcgtggtcatggaactgttccagatgtcgcaggcccgcggcttcgccgtcggcggcaccgtgcacatcgtggtcaacaaccaggtcggcttcaccacctccaacccgctggatacgcgttccacgcgctatgccaccgacgtggcgaagatgattgccgccccggtgctgcacgtgaacggcgatgacccggaagcagtggtgttcgccgcacagctggccttcgaattccgccagacgttcgccaaggacgtggtcatcgacctgatgtgctaccgccgctggggccacaacgaggccgacgaaccggcgatcacccagccgctgatgtaccaggtgatccgcaagcacccgaccacccgcgagatgtacgccgagcagctggaaaaggcgggcgtgatcgccgccggcgccggcaaggcgatggtcgatgcctaccgcgagaagctggacgccggtgaagtgaccaccgagctggccaaggtcgagaagaccccgccgagcagcccgctgttcgtcgattggccgaagctgctggaaggcaagctgtccgacccggtctcgaccaaggtcgagaagaacaagctggtcgagctggccaagctgatcaacaccattcccgatgaagtgcagctgcactcgcgcgtggccaaggtctacgacgaccgccgcaagatggccgccggcgagatcccgggcgactggggctttgccgagaacctggcctacgccaccctgctcgacgaaggccatgcactgcgcctggtcggccaggacgtgggccgcggtacgttcacgcatcgccacgcgatcctgcacgaccagaagaccgacaactactacatgccgctgcggcagctggtggattcgccggagaaggccaccgtcatcgattcgctgctgagcgaagaagcggtgatggcctacgagtacggcttctccaccaccgatccgaacacgctgtgcatctgggaaggccagttcggcgacttcgccaacggtgcccaggtggtgatcgaccagttcatcgccgccggtgaagccaagtggggccgcatttccggcctgaccctgctgctgccgcatggctatgaagggcaaggcccggaacacagctcggcgcgcctggagcgcttcctgcagctgtgtgcgctggagaacatgctggtggtcgtgccgtcgaccccggcccaggccttccacatgctgcgtcgccagctgcacatgaccacccgcaagccgctggtggtgatgtcgccgaagtcgctgctgcgccacaagctggccgtgtcgaccctggacgagctggccaacggcgagttccagcacctgatcggcgacgccaacgcagacgccaaaaaggtcaagcgcgtggtgctgtgctcgggcaaggtctattacgacctgctggaggaccagatcaagcgtggccaggacgacgtggcgatcatccgcgtggagcagctgtatccgttcccgcgtgcgctgctggcggccgaactgaagaagtacggcaaggccaccgacgtggtgtggacgcaggaagaaccgcagaaccagggcgcgtggtaccagatccgccaccacctgcagttctgcctggccgatggccagaacctgcactacgccggtcgcgcacgttcggcctcgccggctgccggtcacatggctgaccacgtccgcgagcagcagcagctgatcgccgacgcactggtcaacccgttcaacgacacgttcgctgaataa

SEQ ID NO: 494656 - DNA, 897 bp, Stenotrophomonas maltophilia
atgatccgggtccagcaggtcagccacgccgacgcccacgttgccatccacgacgtgcgccaacgcgtgttcgtgcaggaacagggcatcgccgccgagctggaacgcgatgcgctggacccggtcagtgcccatgtgctggcgctggacagtgacggccagccggtcggcaccggcaggctggctccggacggccgcatcggccgcatggccgtgctggccacccatcgcagcaacggggtcggcgaggccctgctggcggccctggtcgaagccgggcgccggctcggcctggccgaactgcacctgcacgcccagctgcccgcgcgcgatttctatgcacgccagggcttcctgcccgagggcgaggtgttcgaggaagccggcatcggacaccagcagatgcgccgccggctgggcgtggccagcgccatcgacagccgcgccgaggcggtggcgatcaccacggccatcatccaccgcgcccgtcgccagctgtggctgcacagccgccaactggacccggggctgctcgacgcgcccccggtacagtccgccctgcgccgcttcgtcaccgcccgccacgacaagcagctgcgggtgatcgtgcacgacgccgccgcgatcgcgtctgccgggtcgccgctgctggcgctggcccagcgcctgcccagcgtgatccagttccgcgaggtcagcgatccggtcgaccgcgcgctggcctcggcctgcctgctcaacgatgcgggcgacttctactttcgtctgatcggccatcgcctcgacggcgaggccggcatcgcgctgccagcacgttcgcagccgttcgagcagcaattgcagcgtgtctgggaccgttcgcgcgtctgcagcgaactgcgtgcgctcggcatctga

SEQ ID NO: 494657 - DNA, 1413 bp, Stenotrophomonas maltophilia
atggccgcccgcaagtcctccgcccccctgatcgaagtcaccgcccgccctggccagccgctcggcatggcgccggccaccttcctgcgcgacttctggcagaagcgcccgctgctgatccgcaatgcctttccggatttccagaccccggtacagccggaagacctggccgggctggcctgcgaggaaggtgtgctggcgcgcctgatcgagcacgacaaggcccaggacggctggcgcgtgcgcaccggcccgttccaggaagacgtgttccccgccctgcccgaccacgactggaccctgctggtgcaggacgtggacaagtgggacccggacgtgcgcgccctgatccaacacttcagcttcctgccgcgctggcgcatggatgacgtgatgatcagcttcgccgccaccggcggctcggtcggcgcccatgtcgaccagtacgacgtgttcctgctgcaggcccacggccaccgccgctggcagatcgatgccagcgaatcgatcaagggcaggcagccgccgctgggcttccgcccggacgtggagctgaaactgctgaaggtgttcaagcccacccacgactgggtgctggcgccgggcgacatgctgtacctgccgccgaacgtgccgcaccacggcgtcgccgaagacccctgcctgaccttctcgttcggcatgcgtgcgccgtcttctgccgagctgatcagcgactatctggacaccctgatcgccgatgccgatgagaacatccgctaccaggatgccgacctgaaggtgccggccgacccgaacgaaatcgacacggtggcgatggcgcgggtgatcaccgccctcaacgccatccgcatgaatgacccggacaagctgggtgactggttcggccgcttcatcaccacctaccgcgccgccggcgaagtaatggcccaccaggccgcgccggccgcggagcaagtggtcgaagcgctggcctcgggcatgctgctgcagcgccacccgtgggcccgcctggcctggcgccgggccaagcgtggcgccagcctgtatgtcagcggccaggacttcgcgctgccggtaaaggacgcgcagcgcctggccggcgccgagcagctcgacgccgccgcctatcgcggcctgtccgacaagggacgtgccgtggtccagcagctgctggtcggtggtgtgttccagctgatcgacccgaatgaggtgtacgaggccgaagacgaggaagacagcgaggatgccgtggtgctcggcgaggtcgtcgaaggccgcgaccgcgtcgaggcgatcgacgccgacgcggtgtccgacgatgtccactccgtgaccgtgcacgacgacggtatcgaggtcatcgtcaacttcgaggacgacgacgaagacgacagcaccggccgggcctga

SEQ ID NO: 494658 - DNA, 768 bp, Stenotrophomonas maltophilia
atgaagatcacttccattgcgctggacaaagccgtgtcggacggccccatcgatgccttcagccatgcgttgctgggcgattcacccacgctggatgaggtgctggaatacctggcctcgcggcacgcggctgatccccggtatcgctacctgtgcacgctcgatgatgccggccagtgccgctacaccagcatgcacgcgtcagacgacgcgcgcatcgcgctctacgaggacgaagacccggcaacccccgacgatgcgttggcggcacgcgggcggttgctggcgcatgtggtcgcgcagctcgagcattcctttcatcggctggaatggagcgcgctggcgggcacgctgatgtgcaatgacgcagacatcgaggcattggtcgcggccaatgccgcaccggaccccatcgtcgacgaggtggtctgcgtgcaacaggtgcccgtggatcgtgacgacctgctgatcgccgccctgcccaacggctacttcagcgcggactggaacatcttccagaaccacgccctgatccggcacctgcaagagcattacgactaccgcctgttcgggcttggcgcatcgtggctgggcttccagcgtgacagcgcgccgtcgcctgcggaagcggacgctctggtcgcggacctgcagcgcgtctacgctgccggaacgcacgacacctggtcacaactggctgcaacgctgtcctcccgcaccacgcttctattgggatacaccgaaggcttcagcgaacagctgccctga

SEQ ID NO: 494659 - DNA, 939 bp, Stenotrophomonas maltophilia
atgcgcatcctgatcctcggcgccggcggtaccggcggttacttcggtggtcgcctggcccaggccggtgtggacgtgaccttcctcgtgcgccccgcgcgcgccgcccagctggatcgcgacggcctggtcatccgcagcccgctcggcgatgccagcttccccgtgcagcatgtcaccgctgatgcactgcccgcattggccgcgcagaagccgttcgacctggtcatcctcagctgcaaggcctacgacctggacagctcgatcgacgccattgccccggccgtgggcgcaggcaccaccgtgctgccgatcctcaacggcctgcatcactacaacgcactggacgcgcgcttcggccgcgacgccgtgcttggcggcctgtgcttcatcagcgccaccaaggcccccgacggtgcggtgctgcacctgggcaaaccggccaagctcaccttcggcgagcgcgacggcggcctggcttcgacgcgcgtgcgcgccttcgctgcggtctgcgcgcaggcccatcttgatcacctggccagcgaacacatcggccaggaacaatggatcaagtacaccttccttaccgcgctggcggcggcgacctgcctgctgcgcgccgacatcggcaccatcgttgccaccgatgatggcgaggcgatcgtgcgcggcctgtacgacgaatgcctggccgtggccgaagccgccggtgaaccggttcccgaggccgcgcaggacaccgcgcgcggcaccctgacccaggccggctcggcactgaaggcatcgatgctgcgtgacctggaagccggccaacaggtggaggccgaacagatcgtcggcgacatgctggcccgcgcgcgcaaggccgaccaggaagccctgctgctgcaggtcgcctacagcagcctgcaggcctaccaggcactgcgcggcgcgtga

SEQ ID NO: 494660 - DNA, 885 bp, Stenotrophomonas maltophilia
gtgagcatcatctccgccgccagtgcatcgccctcgcgggtgctgatcctcgggctgggctggagtggctgtgcgctggcccgacatctgcaggcattgggcgcacacgtcgccggcacggtacgcgatcccgcatcggcaccacgcgatggtctgcgtcgccatccgctgggtgccgatgccacgccatcgcccgccctgctcgatgagatcgcgcaggccgaggccgtactgtgcagcgtgccacccgatgccgatggcgatcctgcactgcgcctgctgttgtccgcgctgcgggccagcccggcattgcgctgggtgggctatctgtcgtccacctcggtgtatgccgaccgcgccggcggctgggtcgacgagcgcagcgcagccgatgccactgaagcagccggcgtgcagcgcctgcgggccgaagcgcaatggcgtgcgcttgcaggagaacgcggcatcgcatcggcagtgttccgcctgcccggcctgtacgggccggggcgcaatgcgctgctgcagctggcgcagggacgtgcccgccacgtagtgcgtcccgggctgctattcaaccggctgcacgtggatgacctggtgacggtcgttatcgcgtcgatgcagcggccgtgcgtggatggcctgtatctgccggccgatgacgagccggcaccgccgcaggaggtactggccttcgccgcgcagctgggcgggtttgcgatgccacctgccgtggcatgggacgaccctgcactcagcccgaccctgcgacgcttctaccagagcaacaagcgcatcgacagccgtggcacgcgtgaagcactggcgtgggcgccgcggttccccagctaccgtgagggcctgcgcgacctgctccggtag

SEQ ID NO: 494661 - DNA, 828 bp, Stenotrophomonas maltophilia
atgcgcgggcacttttcccccgcgatgaccatgcacctgatcgatatcggcgccaacctgacccacgactccttcgaccgcgaccgcgatgccgtgctggaccgcgcgcgccaggccggcgtggtgcagatggtcatcaccggtgccagccgcgagcactcgccactggccctgcagttggcccagcagcaccccggcttcctgtacgccaccgccggcgtgcacccgcaccacgcggtggaatacaccgaggaatgcgatgccgaaatgcgcgcgctgcatgcccacccggaagtagtggcggtgggggagtgcgggctggactacttccgcgatttctcgccgcgcccggcccagcaccgcgcgttcgagcgccagctgcagctggccgcggacaatggcaagcccctgttcctgcaccagcgcgatgcgcatgccgatttcatggcacagatgaagaacgtcgaaggccgcatcggcccggcggtggtgcattgcttcaccggtgagcgtgacgagctgttcgactacctggaccaggactggtacatcggcatcaccggctggctgtgcgacgagcgccgtggcgcgcacctgcgcgaactggtgaagaacatcccggccaaccgcctgatgatcgagaccgacgcaccgtacctgctgccgcgcacgctgaagccgatgccgaaggaccgccgcaacgaaccgatgttcctgtcgcacatcgtggaagaactggcgcgtgaccgtggcgaggacgtggcagtgaccgccgcgaatgcaacggccgcgacgcgtacgttcttccgcctgcccggcgcaggttga

SEQ ID NO: 494662 - DNA, 2505 bp, Stenotrophomonas maltophilia
atgaacgccccgctcttcccgatttccccgctgctgccgcagatccagcagcagctggccgtgcaaccacggctggtgctggaggccccgcccggtgccggcaagaccacccaggtgccgctggcgctgctcgacgcgccgtggctgcagggccgcaagatcatcctgctggaaccacgccgggtcgccgcgcgcagcgcggcgctgttcatggcacggcagctgggtgaggaggtcggcggcacggtcggctaccgcatccgcttcgagaacaaggtatccgcgcgcacccgcatcgaggtggtcaccgagggcatcctgacccggatgctgcaggacgatccgatgctggaaaccgtcggcgcgatcctgttcgatgaattccacgagcgccatctcagtggggatctgggcctggcgctggcgctggacgtgcaggcgcagctgcgcgacgacctgcgcctggtggtgatgtcggccacgctggacggcgagcggctggcacgcttcctcgatgcgccgcggctgagcagcgagggccgcagttatccggtggcgatcagccacttcccggcgcgccgcgatgaagccctggaactgcaggtgcgccgcgcggtgcagcaggcgctggccgagcaccccggtgacctgctggtgttcctgcccggccagcgcgagatcgcgcgcgtccaggccggcctgcaggagtcactcgatggcaacgtcgaggtgctggcgctgcatggcgagctgccggtcgaacaacaggcgcgcgtgttgcaggccgccagcgatggccgccgtcgcgtggtgctggcgaccaacgtggccgagtcgtcggtgaccctgcccggcgtgcgcgtggtgatcgacagcggccaggcgcgcgagccgcgctacgaccccaacagcggcttcacccggctggacgtggtggccatcgcgcaggcgtcggccgaccagcgcgcgggccgtgccggtcgcgtggccgagggcgtggcctggcggctgtggccgcagtcgcagcggctggagccgcagcgccgcgcggagatcgaccaggtggaactggccggactggcgctggaactggccgcgtggggcagcagcgacctgcgcttcctcgacccgccaccggccggcccgatgggtgcggcgcgcgaactgctgcaacgcctgggtgcactgtcggactcgggcgcgatcaccgcactcgggcgccgtgtactggcgctgggtacgcacccgcggatggcggcgatgctgctggcagcgcccgatgcccgcgcgcaggcgctggccgccgatctggccgccctgctggaagcgcgcgacccgctgcgccagggcggtgacgcgctggcggcccgctggcgcgcactggccgcgttccgcactggccgcgcgccgggcgatgccaaccgcagcgggctggccgccattgatgccgccgccaagcagtggcgtcgccgcctgcgctgcgaggctacgccgccggccagcatcgaggcgcacgaactgggcgatctgcttgcacacgcctttcccgaccggatcggtttccagcatcccggcgatccgctgcgctacctgctggccaatggccgcagcgcgcgcctgcacgaactgagtgacctgcgcggtgagccgtggctggtggccagcgaactgcgcttcgaggcgcgcgatgcgctgctgctgcgtgccgcaccggtggacgaaggccagctgcgcaaggcatggccggagcgcttcgtcaccgaagacgtggtgcgctgggacagcgagcgacgcgccctggtggcgctgcgcgagacccgtttcgaccggatcgtgctggacagccgctcggccggccgggtcgatccgcagcacgccgcgcaggcgctgaccgatgcggtggccgagctcggcctgcaggcgctgccgtggaccgagggcctgcgccagtggcaggcacgggtggaatcgctgcggcgctggatgcccgagctcggcctgcccgactgcagcgacgatgccctgctggccacgcgcgcacaatggctgcagcccgcgttcgccggcaggacgcgactggatgcgctggatgaatccagcttcggcgaggcgctgaaatcgccactggagtggtcacaacggcagttggtcgagcgtcatgcgccgacccgcatcaccgtgccgtccggactggagcggccgatcacctatgcgctggacagcgagagcggcgattcgctgccgccggtgctggcggtgaagctgcaggaactgttcggcctggccgacacgccgcgcatcgccgatggccgcgtgccgctgaccctgcacctgctctcccccggcggccgcccgctgcaggtcacccaggatctgcgcaacttctgggaaagcacctacgccgaagtgaaaaaggagatgaagggccgttacccgcgccacccatggccggatgatccgtggacggcgacggccacgcaccgggccaagccgcgcggaacctga

SEQ ID NO: 494663 - DNA, 375 bp, Stenotrophomonas maltophilia
atgagcaagctgaccgtaatcaccgaccgcgctctggagcgcgccctggagctggcccacaccgccggcgatggcctgaagagcgccggtggcagcctgcgcaacgcggactggatcaagaccggcgccgccctcggcgcagtgaagaccggcggcaaggtcgccaccaagttcgcccgccgcaacccggccgtgaccattgccgcggctgccgtcggcgtcggcctgctgggctatgcgctgtaccgcaagcagcagaagaagaaggctgccaatggccacgtggtgaatgggcaggcgcagcgcatcaacgcacgcgaccgccgcaacgacaccgtggtggacgagcacagcgatatcggcagcgacgcgtga

SEQ ID NO: 494664 - DNA, 540 bp, Stenotrophomonas maltophilia
atgctgatcgccttcaacaagcccttcaacgtgctctgccagttcaccgaccgcagcgtaccgccgcggccgacgctggccgggttcggcctgccgccgcgcgtgtatgccgccggtcgcctggaccatgacagcgaaggcctgctgctgctgacggataacggcacgctggcgcacacgttgaccgacccgaagcacaaggccgacaagacctactgggtgcaggtggaaggcacgcccagcgatgagcagctgcaacggttgcgcgatggggtggagctgaatgacgggccgaccttgccggcgaagatcgagcgcctcgatccggcgccgtcgctgtggacacgcgatccgccggtgcgcttccgcaagaccgtgcccgatgcctggctggcgatcacgatccgcgagggccgcaaccgccaggtgcggcggatgaccgcggcagtgaacctgccaacgctgcggctggtgcgggtggcgatggggccctaccggctggacgacctgcagccggggcagtggcggcagatcggttga

SEQ ID NO: 494665 - DNA, 858 bp, Stenotrophomonas maltophilia
atgatgcctgcttcgtccctgcgtggttgccgcctgctgcttgcttcggccctgcttgccgctgttcccgcgtttgccgcaccggccacggtcgcgccggcgaagatccaggtgtcgccggccatcgacgcggcggtgaaggcgcccacccgcgatgccaacaacgtcaagcgcgacggtttccgccacccggcgcagacgctgtcgttcttcaaggtgacgccggaaaagaccgtcatcgagatcacccccggcaacggctggtactcggagatcctggcgccgctgctgcacgacaagggccactacgttgctgcggtggtcgatccgatggcggtgcccgaaggccgcggccgtgactaccagcagcgcagccgcgacagcctggaaaagaagtacgccgctgcaccggcacagttcggcaagactgccgtggtggcctacgatccggccaagccggtgttcggcccggccggttcagccgatgtggtgctgaccttccgcaacgtgcacaactggcgcaaggccggccaggcgcagggcatgttccagggcttcttcaacgtgctcaagccgggcggcgtgctgggcgtggtcgagcaccgcgccaaggccgacgtggccgacgacgatgacaccggctatgtcggccagcagcaggtgatcgcgatggccgaggccgccggcttcaggttggacgcgcgcagcgaggtcaacgccaacccgcgcgacaccaaggaccacccgaacggcgtgtggacgctgccgccgaccaaccagcacgacaaggccgatgatgcgaagtaccagacgatcggcgaaagcgaccgcatgaccctgcgcttcatcaagccgtaa

SEQ ID NO: 494666 - DNA, 957 bp, Stenotrophomonas maltophilia
atgacggcaacccgcgaactgggccgttccggcctgcatgtacgtccgctcgccttcggtggcaacgtgttcggctggagcgccgatgagaaggccagcttcgccctgctcgatgccttcgtcgacgccggcttcaacctggtcgacaccgccgatgtgtattcggcctgggtgccgggcaacaccggcggcgaatcggaaacgctgatcggcaaatggttcgcgcgcagcggaaagcgcgacaaggtggtgctggcgaccaaggtggccaaatgggccgaacgccccggcctgaccccggacaacatcaatgcggcggtcgaggattcgctgcgccgcctgcagaccgacgtgatcgatctgtaccaggcccacgaggatgatgagtcgacgccactggaagcgaccctggccgcgttcggccgcctgatcgaagccggcaaggtgcgcgccatcggtgcctccaactacagcgccacgcgcctggccgatgcgctgaaggtgtccaccgactacaagctgccgcgttacgaaaccctgcagccggagtacaacctgtacgaccgtgccggctacgagaaggagctggaaccgctggtgcagcgcgaacagatcggcgtgatcggctactacgccctggccagtggcttcctcagcggcaagtaccgcacaccggccgatgcggccaagagcccggcacgtggcgaaacggtggtgaagcgctatctgaacccgcgcggcctgcgcatcctgcaggcgctggatgacgtggccagcaagcacaacgccagcgccgcacagatcgcactggcatggcagatcgcgcggccgtcgatcaccgcgccgatcgtcagcgccaccagcgtcgaacaactgcacgatctgctggcggcggccaacgtgtcgctgagcgtgcacgatgtcgcgcagctggatgccgccagcgcggaagcgtga

SEQ ID NO: 494667 - DNA, 1125 bp, Stenotrophomonas maltophilia
atgttctggaccatcaaggtcgtgatcggcgacggcgagcgcggcctggtgtatcgcaaccgtcgtttccagcagatcctgctgccgggcgtgcaccgcctgtcgccgttcggcggccgcccgcacgtggacatccacaccgcatcgaagggcgcggcctacaccggcagcgaccaggacagcctgatcgaagcgctgggcgcacagctggacacgcacttcgtgctggccaacgtcggcgccagcgaggtcggcctgttgctgcgcaacggccgcatcgatgaagtgctgccgccgggcagccgccgtctgtactggcgcggttcggtcgatacccaggtgcaggtaatggcgttgggtgacgagccgcgcattccggccgacgtgcagcagcggctgggtcaattgggcgtgctgccgcgtgtggcggtgatcagcacggtgccgagcgagtcggtcggcctgctgttcatcgatggcacgctgcggcagacgctggacgccggcctgcacgcgttctggaacttcaacggcaacgtgtcggtggagcgtgtggaactgcgcgcacgttcactggacgtgtccggccaggaactgctcagccgcgacaaggtgaccctgcgggtgaacctggccgcgaccgtgcaggtggtcgacccggtgcgtgcgcaccgcacgctcagcaatgccgatgagttcgtctaccggcagctgcagttcggcctgcgccaggcaattgccgcgcgcagcctggacgagctgctgggtgacaaggcggcactggacggcgagatcgctgcgcatgtgcaggcggcgatcgaaggccacggcgtgcggttgctcggcgtcggcatcaaggacgtgatcctgccgggcgagatgaaggagatcctcaacggcgtggtgctggccgaaaagcaggcccaggccagcgtgatccgtcgccgcgaggaggccaacgccacgcgttcgcagctcaacaccgcaaagctgatcgaggacaacccggtgctgatgcgcttgaaggagctggaggcactggagaaggtcaccgagaagatcgacacgctcaccgtgttcggcggcctggatggcgtgctgaagcagctggtgacgatcaggtag

SEQ ID NO: 494668 - DNA, 1221 bp, Stenotrophomonas maltophilia
atggacactcaacagaactatcaatggctgcatgccgagggcaccacgccgatcaagggctgggtcaacggtgtgccgctggaagcgcaggcgcatgagcagctgcgcaacatcgctgcgatcccgttcgtcgggccgtgggtggccgtgatgccggacgtgcacctgggcaagggcgcgaccgtcggctcggtgatcccgacccgcggggcgatcatcccggccgcggtcggcgtcgacatcggctgcggcatggcggcggtgcgtaccacgctgcgcgccgatgacctgcccgatgacctgcggcagctgcgcaacagcatcgagcgcagcattccggtgggcaacgggcgcggcggcgagcatcaccgcatgcccgacagcatccacacccggctggtgcagtccgggctggccgccggcctggagaagatcaaggacaagcaccgccgcatccgcaccgacaagctggaccgccagctgggtacgctgggcggcggcaatcacttcatcgaactgtgcctggacgagacggacacggtgtgggtgatgctgcacagcggatcgcgcggcaccggcaacctgatcggcacctacttcatcgagaaggcgcgcgaggaactggcccggcgcgtgctcggcttccacctgccggacaaggacctggcgttcttcatggaaggcgagccgctgttcgatgaatacgtcgaagccgtgtcgtgggcgcaggactacgcccggcagaaccgcgaggcgatgatgtcgcgcgtgctggccgagatgcgccaccgcttgccgaagttccagctggcagcgatggcggtgaactgccaccacaactacgtgcagaaggagacgcaccacggccaggaactgctggtgacccggaagggggcggtgagtgcgcgcgaaggcgagctgggcatcattcccggcagcatgggcacgcgcagctacatcgtgcgcggcaagggcaacgccgacagcttccacagctgcagccacggtgccggccgggtgatgagccgtggcacggcgcgccagcagatcacgctggcccagcaccgcgaggccaccgcgcacgtggaatgccgcaaggacagcggcgtgctggacgagtcaccggccgcgtacaagtcgatcgacgatgtgatggcagcgcagctggacctggtcgaggtggtgcacaccctgcgccaggtgctgtgcgtgaaggggtaa

SEQ ID NO: 494669 - DNA, 906 bp, Stenotrophomonas maltophilia
atgaatcctgatgtgctcatcgtcggcggcagctacgccggcattgccgccggcctgatcctggcccgtgcccggcggccggtcaccgtcatcgatgccggttcaccacgcaaccgcttcgccagccattcgcacggggtgccagggctggatggcatcagtggtgccgagctgctgaagaccgcgcgccagcagctgctggactaccccacggtgcgctgggtgcatgccgaggccgtgcaggccaacaccagcgcagagggcgtggaagtacgtaccgccgatggccaggtgctggccgcgcgcaagctgctgctggccagcggtatcgccgaccagctgccggaactgcccgggctggccgagcgctggggcagcaccgtgctgcactgcccctactgccatggttacgaagtgggtggcggcgccatcggcctgcttggcggccatccgatgtccgccggcaaggcgccgctgtttgccgactggggcaatgtcaccttcttcagcatgggacgggacatcactgatgaggaacgcgctgccatgcagcagcgcggcgtgcagatcgagacctcgccggtgctgggcgtgcagggcgaccagccgacctggctggaggtggagctggccgacggccgccacatcgcccagcgtgcgctgttcgtaccggccacccaggcgatggccacgccattggtgcagcagcttggctgcgccttggtcgagagcccgctgggggtgctgatcgaggtcgacatgatgaagcagacctcggtgcccaacgtgtacgccgcaggcgatgcgacgacggtcggcaacatcaccctggccatggccgaaggcgtgcgcgcgggcatcggcgtgcatcatgcgctggtggccgaagacagcgtgccgcgctga

SEQ ID NO: 494670 - DNA, 510 bp, Stenotrophomonas maltophilia
atggaacaaatacggaccctggacaggggatataaatgtaactactgtggttacatgaaatccgcgaacccgctctctgacgccctgcacgtgatggcgcatctggtcggccaggatggcccgcgcacctccgggcagctggcgtcctgcctgccgacccatccggtggtgatccgccgtctgctggcgcagctgcacaaggccggcctggtacgcagcacccgcggtcatggcggtggcagccagctggcccgcgacgctgcaacgatcaccctgcatgacatctatctggccgtgggcgcaccgccgctggtgcaggtcggcgcccgcgacgccggcggcggctgcccgatccagcagctggtcaacagcgcgctgctggagggggcacgcgaggcacagcggttgctggaggcgcgcctgcgggcgaccacgctggaccagctcggcgccgacttcgcacgccatctcgcccatcaccgttccctggaaggtcaccatgaatcctga

SEQ ID NO: 494671 - DNA, 2121 bp, Stenotrophomonas maltophilia
atgaatgcgtctgtccgtgctccgcgcctgcagtccaagctgctcggcgcggtttctgttggcttggccgtggtcctgctgtgcgcgctggcaggcctggtctccgcctggttgaagttgtccaccgaggtcccgcccgaagtcgcgcacagccgcgatgccgaacgcctgcagcgtgagttccgtggccaggtgcaggaatggaagaacgtgctgctgcgcgggcacgacgatgcgctgcgccaacgccacctggatggcttcgacagcgaaggccgcctggtcgggcagctggccaagggtctggccaccagcccggacccgcgcacgcgtgagctggcgcaggcgttcgttggcctgcacgcgcagctgcagcaggactatcacgcggcgctgcaggcatttgccgcggccggctacgatcccgcggccggcgacaacctggtgcgcggcaaggatcgcccggtggcgatggctctggatgcgctgagcacgcacgccacgcaggtggctgaagcggcggtggcgtcccgttcgcagcaggcgcggcagaccctgctgctgtgcgcggtgctgaccgtgctggccgccgtgctgctgctgatcggtctggcctggtggctgcggcgtgcggtggtgcagccggtgctggcagtggaagcagcggcgcgcgcggtggccgccggtgacctgcagcacgcagtacaggtgcgcagccgcgacgagatcggtcgcctcgcgcaggccatgcaggcggtgcaatccacgctgcgcagcgtgctggatgcacaggccgcgatggcgcaggcgcacgaagccggcaccatcagccatcgcatggacgccgctgccttccccggcgcgttcggcaccatggtggccgactgcaacgcactggtcgatgcgcacatccgggtgaagatgcgcgcgatctcgatcatgggccgctacgcggtcggcgacctcagccaggacatggaacgcctgcccggcgagaaggccgtgatcaccgaagcactggacatggccaagcacaacctcggcaggatcaatggcgagatccgccgcctggccgaagctgccggcgcgggagacttcagccagcgtggcgacagcgcgcgcttcgagcatgacttccgcgcgatggtcgatggcctgaaccgcctgatgcagaccaccgaactgaacctcggcgaagtctcgacgatgctgcgcgccatcgccgatggccgtctcggcgcgcgcatgcacggtgatttccagggggtgttcgcccgtatcgccggcgatgccaacaccaccgccacgcagctggcgaccatcgtcaccgacatcaagcacgcctccggcaacatccacaccgccgccgcggagatcgccgccggcaacaatgacctgtcgcgccgcaccgagcagcaggcggccaacctggaggagacggcggcatcgatggaggaactgacctccaccgtgcgccagaacgccgaacatgcgcgccaggccaaccagctggcgatcggcgcccatacggtcgcctcgcacggtggcagcgtggtcggccaggtggtggcgacgatgggcgcgatcgagacctcgtcgcggcagatcgccgagatcatcagcgtcatcgatggcatcgcgttccagaccaacatcctggcgctgaatgccgcggtggaagcggcacgcgccggcgaacagggccgcggcttcgcggtggtcgccagcgaagtgcgtacgctggcgcagcgctcggcggcagccgcgaaggagatcaagtcactgatcgaagcctcggtggaacaggttggccatggcgcacagcgcgtgcgcgaggcaggcgacaccatggccgagatcgttgcatcggtgcagcgcgtgaccgacatcatggccgagatctccgcggcctcgcaggagcagagcgcgggcatcgaacaggtcagccagaccgtgatccagatggacggcacgacccagcagaacgccgcgctggtggaagaagccagcgccgccgcgcgcagcctggagcagcaggccaaccgcctgatcgatgcggtggatgtgttcgacctgtcgaccacggcggcggcgaagggcgggctggcacgcgcggcttga

SEQ ID NO: 494672 - DNA, 810 bp, Stenotrophomonas maltophilia
atgactgtccccgccttcggtctcggcaccttccgcctgaaagaccagaccgtgatcgactccgtgcgcaacgcgctggcggtcggctaccgcgccatcgataccgcgcagatctacggcaacgaagccgaggtcggccaggccatcgccgattccggcgtgccgcgcgacgacatctacctgaccaccaaggtctggatcaccgcgttcaagcgcgatgcgctgctggccagcctgcgcaccagcctggaaaagctgcgaaccgagtacgtcgacctggcgctgatccactggccatcgccgaacgacaaggtcgacgtgccgatggaggagtacctggccgcactggctgaagccaaggcgcagggcctggcccgcgagatcggcatctccaacttcaccatcgcgcagacccgcaaggcgatcggcatcctcggcgccggtgccattgccaccaaccagatcgaaatccacccctacctgcagaatcgcctgctggtgaagttcctgcaggacaacggcatccacatcaccgcctacatgagcctggcctacggcgaggtgatcaaggacccggtgatccaggccattgccggacgccaccaggccacgccggcgcaggtcgcgctggcctgggcgctgcagcagggtttctcggtcattccgtcctcgaccaagcgcgagaacctggcgagcaacctggaagcagcagcgatccgcctgaccgacgaagacatggcacagatcgccaagctcgaccgcggccatcgcctggccaacccggaaggcatcgccccggcctgggattga

SEQ ID NO: 494673 - DNA, 1734 bp, Stenotrophomonas maltophilia
gtgcaccagccccgtgtgtgctcgcaggcttccgcaccggcagcattgctgcaggcagcccgtgcgctggagatgcaccgcctggcctggcttctgtcgtgccttcaggagccacgcgccagcgggttccgggtcctgctgcaggtactggtggtgctgtggtgctggcagtgggtggatggcccgcagccggttctggccaatgaggcggcccgcgtgctgccggtggccgttgcactgctcgcggtatccgggacatgggcacttgttgcaaggctctgcatggagcgctgccaccgctggtgcgatggggtaggccttctgctcagcctggcaatggttgcgatccaggtggacgcggcgttcatcctgctgatgacgctcaatgcagccctgcctttcctcgtgatctccgcgaccgcggtgtatggccgcagggcaattgctcccgcgattgcatcgactgcgctggcattgctgtgggccgcgcctgaaggctactgggtctctcggcccgcctacctcgcctacgcgctggcattgacgatcctgttgccgctggtagcggcgttgctggtagccgcgatgcgtgacatagcgctgcgtgccattgcttcgcgtgaggcgcagggccgattcgtcagtacgatgagccacgagctgcggacgccgctgaacgccatcatcagtgggatccagctgctggaagtggggacggcaagtacggcccaacggcatgcactggcgacggtcgcaacgcaggcgcaggcgctcaggcaccgcatcgatgatgtactggacgcagccagcatcgatggtggccggctgcagttgcggcttcatccttgttcgctgcggtcgatcattgaaagcgtgcaggcgacctgcatgccggctgccgccgacaagggcgtacttctgcagctggatgggagtgagcccgatgtctggatgctggcagacggcggacgtatcgaacaggtggtgaccaatcttgtctgcaatgccatcaagttcaccccgatggcgggcgaggtgtcggtatccatcgttgcggtccgatcgggtgacgactggcaggttcagatcgaggtctgcgattccggcacggggatcgaagccgcggacctggagatgatcttctcgccgttcgtacagctcagccaaggtgaggcacgctgcgagcagggtgtcgggctggggctgtacatcgtgcggctgatttccgatgccatgggtgggacgatcagcgtgagccgcaatgaagcaggcggtgcctcattcgcgtggcgcttcacggtggcctcaaccacggaggtggaccctcttccttcccttgaagaacttcttcagtcacacgcagcgtcggtgcgaccgctgcactgcctgctgttcgaggacgtggaaaccaaccgtgacgtggtagagcgcctgctgcagagcgccggtcatcgcctcagctcccgccacgatggtcacgacgcgcgcgcagtaatcgcggcagtcgagcctgatgtggtgctgctggatctgcacatgcccggctgcagcggatgggaggtgctggagtcgctagccagggaccccggcgcgccaccggttcttgtaatgagcgcggatacgcgggtacaggtgattgaaagagcccgcgcgctgggagctgccggttttctatgcaagccactggacatccacgacgtgctggatatgttgcgcggtgttgccgagcgctga

SEQ ID NO: 494674 - DNA, 405 bp, Stenotrophomonas maltophilia
atgcaaagcttgaagtcccggtttgggctgaacgcaggtccacacgccatggaccggcctgagcttggggaacgctcgatgctaggtctcattgcggcaacgtcgccccaccagctgccttcattcaccgcagcgttggacgcggcgatatcgcagtggatgagcaaggcgaaggacgaatccttcggtggcttggagcaggagctggcgcgtctgcatgccttgaagagcgtgacctcggcgttgggcagcgccgaggtaacgctggcctgcgacgcattgagtgactgtctccgctcgggtacagaagcgtacgctgtgcggcggcgggcatgcgcgttggcactgtccgcgcagcgtcttctgcatcgtgcgacgacgtatttccggatggaaggaggctga

SEQ ID NO: 494675 - DNA, 780 bp, Stenotrophomonas maltophilia
atgctgacactgacacttctcctgctgctttcatgcagcgtgctggtctggaaacgccgtctgcgcagtgctgcgtttctggcgacgcttccgctggccatggcagccagtgccagcgccccggtcacgcaatggttgctggatcgcgcgcagggcaccccttttgtcactgatcacggtgcacttcatccgcgcactgtgatcgtggtactgggtgccggcatcgaccacgatgcccggggctccaggcccgggctggccggttacagccgcctgatgagggcagcacagcgttaccacgaatgcgatcgcacgcgggaggtctgtacggtgcttgccagcggaggcgtcactgccaagggcgatgtcgctgaggccgatgtctacgcacgcgaactgattgcgctgggcgtgcccaccgagaggattgtccgcgagcgtgccagcaggaacacctggcagaacgcccgaaacagcagtgcgatcatcgggcgcaacagcccgcgggtggtgctggtgacctcgggcctgcatctcacgcggagcctgatctacttccgacacttcggcgtcgtggccgagggcctgcccagcgaccgcctccgtgccaccccggggtggctgccctccacattcaatctattgctggtcgaagtgatgttgcatgagcgtatcggcgttctgcgctaccacctctacaaccggatgggctggaacgacgcccccatcgagccggtcagtgtcgcgcctgcagcaaccacccacgcatcgccgcactga

SEQ ID NO: 494676 - DNA, 708 bp, Stenotrophomonas maltophilia
atgaccgaccgtattcccctgctgctgctgcccggcctgctcaacgatgccgagctgtggcgcgcgcagctggccgacctggccgacatcgccgactgcacagtaggcgaccagacccgtggcgagaccctgcaggcggtggccgaggacgtgctcgcacaggcaccggagcgctttgcgctggccggtttctcattgggcggcttcgtcgcccagcagatcctgcgcattgcgccggagcgcgtgctgcagctggcgctgatcgatacctcgatccacgccgattcaccggaacgtgccgagcagcgccgcagccaacgcgccagcgtgcgcctgccggggaagttccacggcttcggcgatgtgctgatgcgcagctacatcgatgcgtcgcggctggatgactacgtgctggtgcagcgcgtgcgcgacatgaccgcccgcctgggcgcggacgtgttcctgcgccagagcgcgctggaacgccgcgatggccatgatgtgctggccggttaccgcgatccgctgctgatcgtgtgcggcgcgaacgatcgcatcacgccgctggcggtgagcgaggaaatgcacgcgatggtgccgcactcgcagctggtggtggtgcctgactgcgggcacctggcaccgatggagaaaccggacgaggtcagtgcggcgatgcgtgggtggttgctgcaggcgcgacactga

SEQ ID NO: 494677 - DNA, 381 bp, Stenotrophomonas maltophilia
atggcagacccctacaacagcggcacccccaccccacccgcgctccgcttcgatgatgcgctggtcaccaccgccttcgagctgcctgggcaccgcgtcgtgcgcaacctcggtgtggtgcgcggcatcaccgtgcgctcgcgctcgatcgtcggcaacttcctcggcggtatccagacgctcttcggtggcaacatcaccatctataccgaactgtgcgaacaggcccgcgaggaaacctaccgcgacatggtcaagcatgcgcggcagctgggtgccaacgcgatcatcggcatgcgctacgacgccaccgatgtgatgaccgggctgaccgaagtgctgtgctatggcacggcggtggtggtggagccgatgcgttga

SEQ ID NO: 494678 - DNA, 2727 bp, Stenotrophomonas maltophilia
atgagtacctaccacctgcagtccgtgttccgtccgcagtcggtcgcggtgatcggcggcagcccgcgcgagcgttcggccgggcgcgcggtgatgcgcaacctgcgtggcaccggcttccccggcaaggtggcgtggatcaatccgcggcatgccgagatcgatggcatccgcacggtcaagcggctgaaggacctggactgggtgccggacctggtggtgatcaccgcaccagcggcgatcgtgccgcaggtggtgcgcactgccgccgaacgtggcgtgcaggcggcgatcatcctcaccgcgcacctgggcgaaggccccggttcgttgtctgcacaggtagaggcggtggcgcgcaagcatggcctgcgcatcctcgggccgcattgcctgggcgtgatcgcgccgcacgcgcggctcaatgccagcatcgccgcacattttccgcaggcgggcgacctcgcgctggtctccgaatcctcggccattgccgccgcgctggtggaatggggcgtggcgcgctcggtcgggttctccgccgtggtctcgctgggcgatacgatggacgtcgacttcggcgacctgctcgactacttcgccaccgactaccgtacccgcgccatcctgctctacgtcgagcagatcaaggacgcgcgcaagttcatgtcggccgcgcgtgccgccgcccgcgccaagccggtggtggtggtgaagtccggccgcgccgagcgcgtgcagccgggcagccgcgatacccatgtgcaggccctggcccgcgccgatgatgtgtacggtgcggccttcaaccgcgccggcctgctgcgcgtcggtgcgctggacgagctgttcaccgccgccgaatcactggggcgcctgggcaccttccctggccgccgcctggccattctcagcaatggtggcggcgtcggccgccttgccgtggaccagctgatcgcgctgcgtggcacgctggccaccctgtccgacagcacggtgcagaagctcgatgcggcattgccacagggctggtcgcgcagcaatccggtcgacatcgtggtcgacgccgatggtgaccgctatgccgcggccatcgaagcgctgctggccgacaacgagaatgacgcggtgatggtggtcaacgtgccgaccgcgttcacctcatcggcggacgccgcgcaggcactcacccgcacgctcggcctgcgcccgcgccaccaccgcgacaagccggtgttcgcggtgtggctgggcaacgacgaccaggccaccgccacgctcaacgcggcgcgggtgccgacctatccgaccgaggccgaagccgtacgtggcttccagcatctggtgcgctaccgcgaagcgcagaacgcgttgatggaaacgccgcccagcctgccgcaggacttcagcgtcgacacggccgccgcgcgcgcactggtcgatgccgcgctggccaacggccagcagtggctggacccgctggctacgcatgaactgctcaaggcctacggcattccctccgcgccggtgatgcatgcgcgtgatgcgcacgaggcgatggacctggcgcagccgctgctggaacgcggtgccacggtcgcgctgaagattctctcgccggatattccgcacaagtcggaagtggatggtgtgcgcctgaacctgtccacgctgccggcggtgcagagcgcggccaacgcgatcctgtcgcgcgcacgccagctgcggccggatgcgcgtgtcgatggcctgctggtgcagccgaccatcgtgcgtccgaaggcgcgcgagttgattgtcggcatcgccgatgacgcgacgttcggcccggtgatcgtggtcggtcgcggcggcactgccgtcgaagtgatcaacgacaaggcactggcgctgccgccgctggacctgcgcctggcccacgagctgattggccagacccgcgcctcgcgcatcctcaaggcctacggtgacgtgccggcggctgacgagcgcgcactggcgctggcgctggtgaagcttgcacaactggccgccgacattcccgaagtgcgtacgctggacatcaacccgttgctggtcgacggcaagggcatcctcgccctcgacgcccgcgtggcggtggcgccgtcgcgcatcctgcacaagggccgcggccatccacgtttctcggtgttcccgtacccgaaggagtgggagcgcaccatcgaactgtccgatggcggccgcgccttcgtgcgcccggtgcggccggaggacgacgcgctgttccgtgcgttcttcgcccgcgtcagcgacgaggacctgcgcctgcgcttcttccagtcggtgaagcacttcagccacgagttcatcgcgcgcctgacccagctcgactacgcgcgctcgattgcgctggtggcgatcgaaccgcgcagcggcgagatgctgggcgcggtgcgcctgcatgccgatgcggattaccaccgtggcgagtacggcatcctgatccgctcggacctgaagggccacggcatcggctggcggctgatggcgatcatgatcgagtacgccaagtggctgggcctggacgtggtcgaaggccaggtgctgcgcgagaacagcaccatgctggcgatgtgccagagcctgggcttcaagacgaagctggacccggacgacccgacggtgatgatggtgaccctgccggtgcagcaggtcgaggtgcccgacgtcccgccggtggcctga

SEQ ID NO: 494679 - DNA, 1371 bp, Stenotrophomonas maltophilia
atgaaccagaagcaattgctgcgcccggtggccgatgccgccgcactggccgcaccgctggcgaactacaacaccgccgacgcggtggaattcctcaacacgctggacctgacccgcgccgcggaaacgctggctgcgctgccgttgccgcgtgcagtgaagatgctcgaagcgccagagctgcaccgcagcggtgagctggtggccgcactgccacccgcgcgggctgcggcgctgctgggcctgatggccgacgaccgcgccaccgacatcgtccacgagctggatgaggaagagcgcgcgcggttgatcccgctgctgggcaccgacgcccgccaggtcatccagaagctgctcagctacccgccgaacaccgccggcgcgctgatgaccaccgagtacgtggcggtgcccgccagctggaccgtggcgcagaccctgcagcacatccgccaggtcgagcgcacccgcgagacggtgtacgcgatctacgtgctggagccggccagccagcagctgcagcaggtggtgaccatgcgccggctgatcaccggcctgcccgaggaatcgatcctggacgtggcccaggtcaatccgccggtaacagtggatgcgctgatggaccaggaagaggtggcacggctgatccgccgccacgacctgctggcgattccggtggtcgacgcgcagcagcagatgctcggcatcgtcaccgtggacgacgtgctcgatgcgctgatcgaggaatccaccgaggacgcgcacaagttcggcggcatggaagcgctggacaagccgtacatgcagatcggcttcttcgagatgctgcgcaagcgcgccggctggctgagcgtgctgttcctgggcgagatgctgacggccagcgcgatgcagcactacgaggacgaactggcgcgcgcagtggtgctgaccctgttcatcccattgatcatgagttcgggtggcaattccggctcgcaggccacctcgctgctgatccgcagcctggcactgcgcgaactgcgcctgcgcgactggtggaaggtggccctgcgcgaagtgccgaccggcatggtgctgggcgccatcctcggctgcctggccatcgtgcgcatcgtgatctggcagctgggcggcctgcacgactacggcgagcactggatcctgctggcgatcaccatcggcgccgcgctggtgggcatcgtcaccttcggttcgctgtccggctcgatgctgcccttcatcctgaagcggctcggcttcgacccggccagcgcctcggccccgttcgtggccaccctggtggatgtgaccggcctggtgatctacttcagcatcgccgcgatgatcctgcacggcacgctgctgtaa

SEQ ID NO: 494680 - DNA, 1779 bp, Stenotrophomonas maltophilia
atgcatagcggtggtctggaactggccctggtactgctgctggcggcggtcatcgccgtgccggtgttcaagaagttcggcttcggcgcggtactgggctacctggcggccggcgtggtgctgggcccggacgggctgggcttcgtgcaggacgccgaccgcatcctcggtgccgccgagatcggtgtggtgatgctgctgttcgtgatcggcctggagctgtcaccggcacgcctgaaggtgatgcggcgctcggtgttcggcgccggcgcggcgcaggtggcgttgtccgggctggtgctgggcggcctgctgctgctcgatcacttccagtggaagagcgcgctggtggtcggcgtggcgctggcgctgtcatccaccgcggtcggcctgcagctgctgtccgagcacaaggcgatcaacagcgaccatggccggctcgggttcgccatcctgctgttccaggacctgatcgcgatcccgctgctggcggccatccccctgctgggcggagtgaagaacgagaccctgcgctgggaagatgcggccgtggcgctgggtgcgctggcggtggtgatcctgtgcggacgaccggtgctgcgcaaggtgttcagcatcattgcgcgcacccgcagcccggaagtattcactgccaccgccctgctggtggtgctgggcaccgcctggttcatgcaggaagccggcctcagccccagcctcggcgcgttcctggccggcgtgctgctgtccgattcggagttccggcatgagctggaagcgcagatcgaaccgttcaaggggctgctgctgggcctgttcttcatcgcagtgggcatgggcatcgacctggaccgcatcgccgccgagccgtggctgatcgccgcgggtgtcggcatcctgctggtggtcaagttcagcctgctctacgcggttggacgtgtcgcccggctcagctcgcggcaatcgctgctgctgggcagcgtgctgtggctgggcggcgagtttgccttcgtggtattcaacgaggcacagcgcgcgcacctgctgggcaacgccaaccacgaccggctggtggcgatcgtcggcctgtcgatggcgatcacgccgctgctgatgatcgcgctgctcaagctgctcggccaggaaaaagccgcaccacgcgcggcggccgaggccgacaaggtggcgccggacaaccggcccaaggtgctgatcgccggcatgggacgcttcggccaggtgatcgcgcgcctgctgaccgcgcagaaggtgccgttcgtggcgctggaagcgaacccggacaccgttgccgacctgcgccgcttcggcaaccagctgtactacggcgatccgacccggccggagatgctgcgtgcggcggggggcgagcacatcgatgtgttcgtgatcaccgtggatgacccggagaccaacctgcgcgcggtacgcatggtgcgccggctgtacccggacgcgacggtgctggcgcgtgcacgcaaccgccagcatgcgtggcgcctgatggacatgtcggccgagccgttccgcgaagtgttcggcaccagccttgagatgagcggacgcgtgctgaccgcgctgggcgtggcgccggacgtggccgaacgccatgtgcagcgcttccgcgagcacgatgagcagctgctgcgcgaccagtatctggtgtacgacgacgaggcagcggtgatccagacctcgcgcgacgcacgcaacgacctgatgcatctgttcgaggccgacgcggaaagcgacggcaagtag

SEQ ID NO: 494681 - DNA, 3339 bp, Stenotrophomonas maltophilia
atgactgacacctcccgtccgcgtgccctgtcgatcgccttcgccgtgggtgccatgctggcgttgggcgccgcggtgggcggtgtgccgggtgccatccttgccgcactggcgcagccggcgttcgcgctgggcgtgtcgtggtggcgtcgcagccgtgcgctgctgccgctgaaggtggtcgcacgccaggacctgcccgcactgctggcgctgtgggctgccgcgccattgctgctggcgctgctgctggcctggccgctggcggccctgcgtgacagcggcagcctggcggcggtgctgggcctgagcgtgctggtcagtgccggcctgctggcggcttggcgcacctggccgctgtggaacgatgtcgaacgcctggatggcagcctggcccagcactggcaggcgctggccggccgcgacctgaccgcctggcgtggtcttggcgtggccgcgctggtgatcgccttggccgcactggtggtgctgccggcctggccgggcctgttgccggacggcgcacgctggcccgccgcactggcggtcgtgctgctgtcgccggcgctgcacctgctgctgcagcgggttgcgcccgcgccgctggtgtcgctgcgccccagcccgttcgccgctgccagcagcgaacaggaaccgatgttccccgctgcggccgaaaccgcgccgctggaggcgatggcgccgcaggaactgacaccggccctgtatgaggccgcgcgccagggccgcgtcgaccgcggcctgcagctgctgcaggccggtgctgatccgtatgcgctgccggacccgaactggcgtgaccagcgcagcctggcggtgctggcggcggtgctgccggacctgcgcctgctgcgcgagctgattgcccgcggcgtagatgtgaacgcgccgcaccggggcatgaccccgctgctggccgccacccgcgacagctggcatggccgccccgaagcggtgatgaccctgctcgccaacggcgccgattcacgtgccaccgacagcgatggcaacaccccgctgcaccatgccgcacgcagttccgacccgggcgttgccgcgctgctgcgcgatgccgctgccgaagtcgatgcgctgaaccgcgagggctggtcgccgctggcggtggcctgccaggtcggcaactggcgcctggcccgcttcctgctcgagcgcggtgcacgcagcgaaccggccgatggcaccccggtgctgctggccgccgccgccaccgaggacgacgatccggccggcgtgcagctgctgctcaagcacaaggcacgcgccgacgcgcgtgatcgccagcgccgcagcgcgctgcacgaggcagcgctggccggccacgtggagatcatcggcgtgctgctgggcgccggcgccaacctggaagcgcgcgatgcactgggccgcacgccgtggctggaagccgcccgtgccggccgtgccgccgtggtcgagcacctgctgccgcacaagccggacctggtcgcggtggacggcgaaggccgcaatgcggtgcagctggcagtgatggccgaggatgtctcgccgctgctgatcaagcgcctggtggaactgggcatcgccgccgacgccaccgacccggttggccgccgcgcggtggactatgcggccgaagcgggccgctgggcgatcgtggccctgctggacccgtcctatccgctgccggcagccgtcagtgatggcctggccgagcgcggtgaagcggccagcgccagcggcctgttgccggaccgtccgccgctgaccctgctgcgcgaagcgctgggcttcggcaacaccgatggcatggccgcgctggccaggctgtgccagccggaagaactgggcggcctgctgctcgatccggagctggccctggagccgcgcgcggtcgattggctgctggcccacggtgccgatccctatgtgcgcgacgcctgcgccgatacgccgatgttcgcgctgctgtcgcgcggcatcgacgcggtgccggcgctgcaggtcatgctgcagcgcggcctgtcgccggccgggcgcggtgggctggcacgcttcctggccgcctgcgcacagcacgaccaggccgcccgcggcctcgaacaactggcgctggaactgctggagcgtggcgccgatccgttcgccgcttcgccggccggtgacccaccgctgtcgctggcggtacgcctgggctggctgcgcctgcagcaggccctgctcaaggccggtgtcgatcgcgaagcgcgcgacagccatggcatgaccgcactgcatctggccaccgccctggcccgcgaaggcgcgctgaagctgctggtgcagcacggtgcctcgccggaagcacgtgccgccgacggtcagacgccactgggcgtggcgctgtcgatcggtcgccgtgacctggccgactggctggactggcgggtgtggccgctgccgcgccgtaccctgcgcgaggccgatctgccggccgctgcgatggccggtgatgtagacgccgtgcgtcgcctgatcgatctgggatttgccgtcgacgcggtcgacgcacagggctgcaccgcgctgctgcgtgcggccggtggtggccacctggccgtgaccgacctgctgctggcgcgcggtgccgatccgcagcacgccgctgcaagcggtgcgacgccgctgtcggcggcggtcagcatgcgccaggtcgacatcgtttcggccctgctcgatgccggcgccaagctggaacatcgcctgccgggcggggtgaccgtgctgatgctggcctcggcgctgggcctgccggacatcgtcgcgcgcctgctcactgccggtgccgacgtgcatgccggtgacgcgcagcagctgggcccgctgcactgtgccgcgctgtacggtttcagtgcccgcgaccgctcgcgcctgctggccctgctcgacaccctgctgttggcgggcgccgagccggaccaggccgccgccggttcggtcacgccgctgctgctgctgctgggcgcacgcgccgagccgggtaccgcctgcgacgagcaggtggtgatggcggcggtggagcgcctgctggatgaggacgtcagcctggacgtgcgcgatccgcgcggcttcggcccgctgcatctggccgccctgcatggactgccgctgctggtgcagcgcctgttgcgcgccggtgccgatccggaagtgcgcgacagcctcaaccgcagcccgcgcgagatcgcggtgatgcgcggcttcatcgacgtcgctggagagttcgaaccgcgcgtgccgggcgtttcgtcgatggcgcggttcctgcgcgacaacggttga

SEQ ID NO: 494682 - DNA, 261 bp, Stenotrophomonas maltophilia
atgcacgcctacgtctataaaagccaactcaagccggacacctacgtctacgttccccgacgcgatgatttcagcgcgctgcccgcgccgctgctcacctcgctggggacgctcaccttcgtcctggaggtggccctggatgtccagcgccgcctggcccaggccgatcctgaaaaggtccgcagcgaaatgagcgaacgcgggttctacctgcaggtgccgccgtcggtggccagcctgatgccgcgacactatgactga

SEQ ID NO: 494683 - DNA, 441 bp, Stenotrophomonas maltophilia
atgcgccgcactctcatgatcgccactgccaccgcgctgctggccctgacctccaccgcctctgcccgcgatacccgcgtcgagcagtccctgcaggagctggtcagctcgcaggctgccaaggacgccggcatcgacggcagcgtgcgcttctacctggccggccagccggtcagcgtgcagcagcgcctgggtgaagacgtgaccaacaagaagaccaacgccgccaacaagagcgatgccgaggcctgccgctgggtcgcgctgtcggcgctgcgcgcgctgcaggacggcgccaggtcgcgcggcgccaacgccgtggtcgacatcgtcagctactacaagaagaacgagttcaagagcagcaccaattacgagtgctatgccggcaccatcctcgccggtgtcgcgctgaagggcacctacgccaaggtcaagtaa

SEQ ID NO: 494684 - DNA, 1239 bp, Stenotrophomonas maltophilia
atggccgccgatcgtcgcgtggtggtcaccggtgccgccgccatcagtccgctcggccacgactggccgaccatcgaggcacacctgcgcagctgccgcaatgcggtgcgtgcgatgcccgagtgggatgtctatgccgggctgaacaccaagctggccgcgccggcgcaggatttcgagctgccgccgaactacaaccgcaagaccacccgctcgatgggcaaggtcgcgatcatgtcggtgcgcgccactgaggtggcactgcgtgaagccggcctgcacgagcatccggtgctgcgcagcggccgtaccggcgtggcctacggctcgtcctcgggcagccacgaggccaccggtgaattcgggcgcatgctcaacgagttcaccaccgatggcatcagtgccaccacctacctgaagatgatgagccacaccgcgccggtcaacatcggcgtgttcttcggcctgtccgggcgcgtgtacaccacgtccagtgcctgcacctccggcagccagggcgtgggtgcggcctatgaagcgatccgcagtggcaagcagacggtgatggtggccggcggtgccgagcagctcgatgccaccgcagcggcggtgttcgacaccctgttcgccaccagcgttcgcaacgatgcgccgcagaccaccccgcgcccgttcgatgccggccgtgatggcctggtgctgggcgagggcgcctgcacgctgatcctggaagacctggagcacgcgcaggcgcgcggcgccaccatccttgccgaggtggtcggctacggcaccaacagcgatggccagcacgtcacccagcccagcgccgacaccatggcccaggccatgcgcctggcgctggaggatgccggcctggacgcggcgcagatcgactacgtcaacgcccacggcaccgccaccgaccacggtgacatcgccgaaacccaggcgaccgcgcaggtgttcggcaaccgcgtgccgatcagctcgctgaagagctatgtcggccacatgctgggtgcctgtggcgcgttcgaggcctggctgagcatccagatgatgcgcgccggctggttcgcgccgaccctgaacctggccgaggtcgacccgcgctgtggccagctcgacttcatcaccgggcagggccgcgaactgcaggccgagtacgtgatgagcaacaacttcgccttcggcggcatcaacacctcactggtgttccgccgctggagcgagtga

SEQ ID NO: 494685 - DNA, 732 bp, Stenotrophomonas maltophilia
atgacagggaatcgaagcgtgctggtgaccggcgccagccggggcatcggccgggccatcgcgctgcgcatcgcgcgtgacggcttcgacgtggtggtgcattgccgcagccgcctggatgaggcacaggccgtgatggccgagatccacgcgttgggccggcaggcccgcgtactgatgttcgacgtggctgatcgcgaggccgcacgcgctgtgctggaggccgatgtcgaagcgcacggcgcgtactacggcgtggtctgcaacgccggcatcgcccgtgacggtgccttcccggcactgtcagcggaggattgggaccaggtcatccacaccaacctggacggtttctacaacgtactgcatccgctgatcatgccgatggtgcgccggcgcaagcctggccgcatcatcaccctgtcgtcggtgtccggactggccggcaaccgcgggcaggtcaattacagtgccgccaaggccggcatcatcggtgccaccaaggccctggcgctggaactggccagccgccagatcaccgtcaactgcgtggccccgggcctgatcgagaccgaaatgctcaacgatgaagtggttgaacacgcgctcaagctgattcccgccggccgcgtcggtcgtcccgacgaagtggcggccacggtggcgttcctgctgtccgagccggccggctacatcacccgccaggtgatctcggtgaacggaggcatgatctga

SEQ ID NO: 494686 - DNA, 456 bp, Stenotrophomonas maltophilia
atgaacacgctgtacgcgatcgaagaggtggtgccgcaccgccaggacatgtgcctgctggagcgcatcacgcactgggaccaggacaccatcgaggccgaactggtggtgcccgacgccggcctgttcgtcgaggagggccgggtgccggcgtgggtcggcatcgaatacatggcgcaggccatcgcggcctgggccggttgccgtgcgcgtgcggcgggcaagccgccgcagttgggcttcctgcttggcagccgccgctacagcagcccgcgcagcagctttcccagcggatcgcggctgcgcgtacaggcgcgctgcgagctgttgggtgacaatggattggggatgttcgcctgccgcatcctggcaggcgaggacgaatgggcgacagccaacgtgtcggtgttcgaaccggccgatgcgatggcctatctggagagtggacaggcatga

SEQ ID NO: 494687 - DNA, 1185 bp, Stenotrophomonas maltophilia
atgagtgcaccgatctacctgaacgatctgggcgtggtctgcgcgctcggcgatggccgcgacgcggtggcttcggcgatgttcgccagcgtgccgggcgggctcagcgacaacgataccctgctgccggggcacaccctggcgctggggcaggtgcgtacaccgctgccgacgctggaagaactgccggccgccctgcgcgggcgcaacaacgccctgctggacgtggcactggcgcagatcgcaccggcggtggccgccgcgatcgcccgccacggcgccgaacgcgtggcggtcgtgctgggcaccagtacctcgggcatcggtgaatccgagcaggccctgcgcacccatggcgaacagggccaatggccgcccgggttcgattacgcccagcaggaaatgggtactgccgcgcagttcgtgcgccagcgcagcggcgctcaggggccggcgtggaccctgtccaccgcctgctcgtccagtgccaaggcactgatgtcggctgcacgcatgctgcgggccggtatcgtcgacgccgtgatcgcaggtggcgcggactcgctgtgccgcttcaccgtggccggcttcagcgcgctggaatcggtgtcggccctgcgctgcaatccattctcgcagcaccgtgccggcatcaacatcggcgagggtgccgcgctgttcctgctcacccgcgaacccggcccggtatgcctggccggctggggcgaatcggccgacgcgcaccatatgtccgcccccgatccgcagggcctgggtgccatcgatgccctgcagcaggcgctgcagcgcgccggctgggcggccgatgaagtggactacgtgaacctgcatggcaccgccaccggccacaacgatgcgatggaaagcctggcggtgtcgcaggtgctgggcaaccaggtgccggccagttcgaccaagccgctgaccggccatacgctgggtgcttcaggcgcgatcgaagctgcactgtgctggatcgtgctggccgggaacccgcagcagcagctgccaccgcactggtgggacggcgtggcagaccccgcgctgccggcactgccgctggtcgcaccggccacccgcctggcacaggcaccgcggcgggtgctgagcaattcgttcgccttcggcggcagcaatgccgtgctggcgctggagcgtcgatga

SEQ ID NO: 494688 - DNA, 558 bp, Stenotrophomonas maltophilia
gtgcggcgcctgatcgcccctgcgacagcactgctgctgagcctgctgctggtggcctgcgccggccgcatgccgaagccgttggtggaactgccgccgctgcgcctgtcgccggccagcctgccggcgccgctggcgctgcagcagcagttgcatttccggttcggcacgcatgagcgcgacctggatgcactgctggaagccgatgcgcagcaggtgcagctggcggtgcaggcgatgggccagaccggcgtgcgcctgcagtgggacggccggcagctgacccagcagcgcgcgccatggctgccgccgcaggtgcgcgccgagcgcgtgctggatgacctgcagttcgcgctgtggccgaccgcagccatcgcggccgcgctgccagccggctggcaggtccgtgacgatggccatcagcgcagcctgtcgcgcgacggcacggtgtggctgcagctgcagcgcctggacgatggcagcgtgcagctggacaaccgcgccgaaggctatgcgctgcgcatcgaatcgatcgacatggccgggccggatcgatga

SEQ ID NO: 494689 - DNA, 1251 bp, Stenotrophomonas maltophilia
atgaatactgctgtggatgctgtcgaacgtactgaaatcctgatcatcggtgccggcccggccggctccgtggctgcggcgatgctgcgccagcagggccgccaggtgctgatgctggagcgccagcagttcccgcgcttctccatcggcgaaagcctgctgccgcagagcatggagtacatcgaggccgccggcctgctgcaggacgtggtcgaagccggcttccagcacaagaacggcgcggccttcgtgcacggcgaagcgcgtaccgcattcgacttcaggaagaagttctcgccgggctggggcaccacctaccaggtgcagcgcgccgacttcgacaacgtgctggcgcgcggtgccgagcgcatgggggccacgctgcgtttcggtgatgaagtgctgtcggtcgaagccggcgagcagccggcggtgacggtgcgccgcccggacggcagcgagtaccgcatcgaggccgatttcatcctcgacgcctcgggcttcgcacgcctgctgccgcgcctgctgcagctggaatccccgtccaacttcccggtgcgcggggcgatcttctgccacgtgcgcgacaacattccggccgaagcggacttcgaccgcaacaagatcctgatcaccacccatcccgagcacgtcgacgtctggtactggacaatcccgttctccaacggctgctgctcgctgggcgtggtcgccgaaccgtcgttcttcgagcgctacgagggcgacgacctgcagaaactgcaggccatcgtcggcgaggacccgaacctgacccggctgctggccaatgccgaatgggcggtgctgccggtgcgccgcatcaccggctactcggccaatgtcagttcgttgtgggggccgggctatgccctgctgggcaatgccggcgagttcctcgacccggtgttctcgtccggcgtgaccatcgccttcaagtccgcgcagctggccagtgcatgcctggcgcgccgctatgccggcgaagccgtggactgggaagcggagttctcggtcccgctgcgggcgggcgtgaagaccttccgccgctttgtcgaaagctggtacgaaggcggtttccagaagatcatctaccacccgcagcagcagcccgaagtgcgcgacatgatcagctccatcctggccggttacgcctgggacaccaacaacccgtacgtggccgatgacagtggccgccgcatgcgcgtgctggagcagctgtgcggcgcctga

SEQ ID NO: 494690 - DNA, 2355 bp, Stenotrophomonas maltophilia
ttgagtgaggccgtcgcatcgaacgcaccggagcggctgcggcgctggtggcactggctgggcatcgcctggctgttgctgctgctggtactgggcgcgcagcagtggcacctgtggagccagcaatcgcggatcgacaccgacatcctcgcgctgctgccgcaggatgcgcatgaccgcctgttgagcgacgtcacccggcgcatcgccgacggcagctcgcggcaggtggtggtgctgctgggcagcagggacggcgccgccgccaagcgtgcgcaggcggcctttgccgcggccatggccaaggacactgaccgagccctgctggtgcccagtggttcgatcgaaggctggttcgatgaggcgcgcgcgttctacgcgccgtaccgcgaccgcctgctgacgccggcccagcgcgagcagctgcagggcagcgaaccgggcgcgttggccgagcaggcgttggccgcgctgtacggcccgatgggcgctccgcgcctgaccgactggcggcaagacccgttgtcgttgtggccgcaatggtggcagcagcaggcgcagggttcggggttgcggctgggcgatgacggcctgctcgaagccgagggcaggcactgggccgtgctgcagttcgatacaccgggttcggcgttccagctcgacggtgagcgtcatctcgacggcctgctggaacgtgccgggcgggctgccagggcggcagcgccggagctggaaatcctgcatgccggcgtgccgctgcacgccgaggcggccgcggtgcaggccaaccaggagatcaacacgatcggctggggctcgctggccgcggtgctgctgctggtgtggctggcgttccgttcgctgcggccgatcctgctggtcgccgcgtcgttgctgatcggttgtggcgtggcgctggcggtgaccgtgctggtgttcggcaaggtgcacgtgctcaccctggtgttcggtgcgtcgctggtgggcgtggccgaggattacggcatccactggtttgcctcgcgccaggccgagccggccgatcgccgctggaagctgctgcggcacctgttgccgggcctgtggctggccttgctgaccagcgcgctggcctacctggccctgggcctggccccgttcccgggcctgcgccagatggcgctgttctcggtggtcggtctggccgccgccttcctcacggtgatcttctggttcccgtggctggatggcggcgagatccgccagacccgtttctcgcagtggctgggcaacacgctggagcgcttcccgcggttgcatggccgccggccggtgacggtgttcgtggtgatcacgctggcgctgtctgccatcggcatcgcccgcctgcacagcaatgacgacctgcgcagcctgcagtcctcaccgccggcactgatggcccagcagatccgcttgagccagctgctgggcatgcccagcccggcgcagttctatctggtgcagggcagtgacgctgcacagctgctgcagcgcgaagaagcactgaccgaacgcctgcgtgtactggccaacgacaagcgcatcggcggttaccgcgcgatcagtgactggctgccgtcgccggcacgccagcaggccgatgcggcgctgaccgccaaggtggaaccgggcgtgctgcaggccgtgtccgatgcggtcggagaacccttgccgcgccccgacttcgccaccacgccgctgaccgcggaggcgttcctggcctcgccggcctcgcagccgttccgccacctgtgggtgggtgaggtcggtgggcagatgatcagcgtggtgatggtcgatgacctgtcgcgcgccgatgcgctggcgacgctgcgcggggcggcccaaggcctgccgggtgtgcgctgggtggaccgcaccgccgacttctcgcagctgctgggccactaccgcaagctgatgggggggctgctgctggtcggcatcgtgctggtgttcggtgcgctgtggctgcgctaccgccgccaggcctggcgcgtgttcgcgccgaccctgattgccggcgcgttgaccctgggcctgctgggcctgttcggccagccactgcagctgttcaacgtgctggcactgatgctgctgctgggcatgggcatcgactacggcatcttcctgatcgagcaccgcggcgatgccagtgcctggctggcggtgtgcgtgggcgcggccagcacctggctgtcgttcggcctgctgggactgtcgcagaccccggcgctgcgcgcgttcggcctgaccctgctgttcggcatcggcctggtctggctgatctcgccgctgttccggccgccgccgcatgatctgccgcgggcctga

SEQ ID NO: 494691 - DNA, 630 bp, Stenotrophomonas maltophilia
gtgaacccccttgtccgtctttcgagcgtgctgctgtgcgcgctgatcttcgttgccgcaccgcaggtgcaggcggccgaccccgccatcgatgcgatcacccaggcggtggcgcggccggatgtgctgcgtggccagttcagccaggaaaagcaggtcagcggcttcaggaacccgctgcgctcgcagggccagttcgtggtcgcgcgccagcacggcgtgatctggaccacgctcaagccgttcccttccgaagtggtggtcaccgccgaccgcatcctgagccgccagcgcgatggcagcacccgtgtcgagctcgatgcacggcagcagccggcgatgcgttcggtgaacgcgatcatgttcgcgctgatgagtggcgacgtgcaggcgctgtccagccagttcaacgtggcggccagccgtgaagggcagggctggcggctgcggctgacgccgaagtcggcgatgctggccaaggcgttccagtcgctgaccctgcagggtgaccgctacgtgcgccaggtcgagatcgtcgaggccaacaaggaccgcacgcagatccagttcagtgcattgagcgaggcgccggccacgctcaccgccgacgaggcacgccgctttgagtga

SEQ ID NO: 494692 - DNA, 432 bp, Stenotrophomonas maltophilia
atgccggtgaatgaggccatcgaacgggttggcgaaattgcgttgacccctgccttccatgactgcgatccgatgaacgtggtctggcatggcaactatttcaagtacttcgagatcgcgcgctgcgcgctgctcgggcgctacgactacgactacccgcagatgctcgaatcgggctacctgtggccggtggtcgatgcgcgggtgaagtacgtgcggccgctgctgttcaaccaggcgctgcgcgtggtcgcgcgcatcgtggaatgggagaaccggctgaagatcgagtatgaaatcctcgatgcgcagagcggccaggtgctgacccgcgcgatgaccatccaggtcgcggtggacgcggccagcaaggaaatgctgtaccagtgcccgccggtactgtgggaacgcctgggagtgcctgcgccgtga

SEQ ID NO: 494693 - DNA, 1551 bp, Stenotrophomonas maltophilia
atgacgactgacgccgtacccgtgtgccgctttggcgatgcaccgttgaccatcgaagacgtggttgccctggcccagcgccagtgcgaggccgcactgagcgacgcgccggcgttccgcgcgcacatccagcgcggtgccgacttcctcgaccgcctgctgcgcgaggacggcgtgatctacggcgtgaccaccggctacggcgactcgtgcacggtgaacatcccgccggcgctggtggcggaactgccgcaccacctgtacacctaccacggctgcggcctgggccgttacctggacccggtcgagacccgcgcggtgctggccgcgcgcctggcgtcgctggtgcgcggcatgtccggcgtcagtgtgccgctgctggaaggcctggccacgctgctgcagcacgacgtgctgccgatgatcccggccgaaggctcggtcggtgccagcggcgacctgaccccgctgtcgtacgtggcggcggtgctgtgcggcgagcgcgaggtgctgcatgacggccgcgtgcagccggcggccgaagtgctggcgaagatcggcatgaccccgctgaagctgcggccgaaggaaggcttggcgatcatgaacggcaccgcggtgatgaccggcctggcctgcctggcctggcagcgcgccgattacctggcgcgcatggccacgcggttgaccgcgttcaacgtgctggccagcgacggcaacgcgcaccacttcgacgaaaccctgtttgccgccaagccgcacccgggccagggccgcatcgctgcgcgcctgcgcagcgacctgcacagcgaacgcccgccgcgcaacgaacagcgcctgcaggaccgctactcattgcgctgcgcgccgcacgtcatcggcgtgctggaagacagcctgccgttcctgcgccagctgatcgaaaccgaactgaacagtgccaacgacaacccgctgatcgacgccaacggcgagcgcatcctgcatggcggccacttctacggcggccacatcgcactggcgatggacaccctgaaaaacaccgtggccaacgttgccgacctgctcgaccggcagctggcgctggtggtggatgcccgctacaaccacggcctgccggccaacctgtcggcggccaccggcccgcgcgcggccatcaaccatggcctgaaggcgctgcagatcagcgtgtcggcctggactgccgaagcgctgaagcagaccatgccggccagcgtgttctcgcgttccaccgagtgccacaaccaggacaaggtcagcatgggcaccatcgccgcgcgcgactgcctgcgcgtgatcgagctgaccgaacaggtggtggcggcaatgctgatcgccgcgcgccagggcctggcgctgcgtgagcgggttggcctgaatgcgcagctgcatggcagtctggccgacatgtacgccgacctggggcagcgcatcgccctggtcgaggaagaccgcgcgctggatcgcgaactgcgggaactgctggtggagatccgcgcgcaacgttgggagctgtatgccggtgaatga

SEQ ID NO: 494694 - DNA, 942 bp, Stenotrophomonas maltophilia
atggcggccgcgcagggtgccccgcactgggccgacatcggcgaatcgacgtcggtggccggcgtgctgttcctgtgctgggtgcaccgctggttcgggcgctggccgttccgcctgtgcgtgtggccggtggtggcctgccattggctgggcaaccgtatagggcgccaggcttcgatgcagtacctgcagcggctgcaggcgcacagcggcgtgctcggccgcgcgccgacacggcgtgacagcctgcgccacttcttcgccttcgccgatacgatgctggacaagatcctcggcctgggcgggcgctacccggccgagcgcatccacctgcatcgtgacctggtgctgcagaagatcgcgcgccgcgagggcgggctgatcctcaccgcgcacatcggctgcctggagctgtgccaggtgctggccgaacaggtgccggggttccgcatcaccgtgctggtgcacaccgcgcatgcgcagcgcttcaaccgcctgctgcagcggctggacccgctggcggcggtggaactggtgcaggtgaccgaaatggggccggccaccgcggtgatgctggccgagcgcgtggcggcggggggcttcgttgccatcgtcggcgaccgcacgccggtacagggtggccgcagcgtcactgccgatttcctgggccaccgcgcgccgttcccgatcggcgcctatgtgctcgccgcggcgctgggctgcccggtgtacaccatggcctgcctgcacgagggcgacggctatcgggtggcattcgaacagttcgccgaacgcatcgtgctgccgcgtggctcgcgcgacgccgcgctggccgaacaggcacagcgcttcgcgcgctggctggaactccaggtcatccagtccccgttggactggttcaatttcttccccttctgggatcaggctccgcatgacgactga

SEQ ID NO: 494695 - DNA, 771 bp, Stenotrophomonas maltophilia
atgcggactgacccggccgttgccggtgccgcattcgcgccactggtggtgatccccgtctacgaccacgagcacgccatcgcggcggtggtcgatggcgtgcaggccgcgggactgccctgcctgctggtcgacgatggttcgcacgatgggtgcgcggcggtgctgcgcgcgctggcacagcgccagggcgtcgacctgctgcgcctggacgtcaaccagggcaagggcggggcgatgctggccggctttgccgaggccggcgcgcgtggctacagccacgtgctgcagatcgatgccgacggccagcacgataccgctgacctgccacgcttcatcgaagccgcgcgcgcccatcccgaggcggtgatctgcggcattccggcttacgacgccagtgttcccaaggcgcgcctgtatggccgctacgccacccacatctgggtctggatcaacacgctgtcgctgcacctgcgcgacaccatgtgtggcttccgcgtgtatccgctgccgccggtactgcgcctgatcggtgaagagaccatcggccggcgcatggatttcgataccgaagtgatggtgcggctgtactggcggcaattgccggtcgagcacctggccacgcgcgtgacctatccgtccgatggcgtgtcgcacttcgatgtgtggcgcgacaacgtgcgcatcagccgcatgcatacccgcctgttcttcggcatgctctggcgtgcgccgcggctgctgtggcgccgcctgcaggggcagcgctga

SEQ ID NO: 494696 - DNA, 1686 bp, Stenotrophomonas maltophilia
atggctgagtggattgccctggaccagctgctgctggaggcacggccgcagcgcagcgtcggcctgtgcgacggcgaggtgatcgaccatgccggcttccgccagcgcgtactggcctggcgcgccgcctttgcggccgccgaaggccgcgactgggccctgtacttcgatgatgccgtggcctttgccgccgcgctgttcggtgcctggcatgccggcaagcgggtgttcctggccgccgacaacctgccagccacgctgcaggcgctgcagccgcaggtgagcggcttcgcaggcgacgtgtccgccgactaccgcccgctggtggcgctggacgccgcgctggacgatgagctgcaggcgctggacgagcgcgcctgcgagctgtgcgtgttcacctccggcagcaccggccagcccagtgcgatcggcaagcgcctggaccagctggcgcgcgaggtggaggcgctgcaggccgcgttcggtgcgcagatggagggtgtgcaggtccatggcacggtgtcccaccagcacatctacgggctgctgttccgcgtgctgtggccgctggccgccggccgcctgattcatccgcgccggttcttccacgaagacctggtgggtgcgctggccggtaccgatacggtgctggtggcgacgccggcccacctcaagcgcctgcccgggcagctcgactgggccagcctgcatggccgcctgcgcgcggtgttctcctccggtggtccgctgccggaagacgcagcgcggcaggtgcggcagtggctgggcgtggccccgaccgaggtctatggcagcagcgagaccggcggcatcgcctggcgccgctgggacatcgacctgccgccgtggcagccgctgccgggcgtgcagtggcgcatcgacgatggctgcctggcggtggcctcggcgcacctggacacccccggttggtggcgcacccaggaccgtgtcgaagccctggccgacggccgcttccgcctgctgggccgggccgaccgcatcgtcaagatcgaggaacgccgggtgtcgctggatgcgctggaacgcgcgctgcgcgaagacgccgaggcggatgacgcgcgcgtgctggtgctgcccgggcagcgcgagcagctggccgccgtggtggtgccggccgatccggcgctgctggagggcggcgacgccgcgcgccgtgcgctgggccagcgccttggcgcccgcctggcgcatgcgcatgacgcagtgacccggccgcgtcgctggcgcctggtgcaggcgctgccgatcaatgcgcagggcaaggtgacccaggccgcgctggcggcgctgttccagccgttgatgccggtgccggcgtgggatcaccgcgatgccgccagcgccaccctgcgcatgaccctggacccggcgctgcggccgttccagggccacttcccgcaggcggcaatcctgcccggcgtggcgcagctggactgggcggtgcgcttcgcccgccaggcgtttgtgatgcggggcgcgttcgtgcgcatggatgcggtgaaattccagcacgtggcccgccccggtgacgagttgaccctgcagctggactgggatgccgcacgcaacgtgctggccttccgctacacctccagccacggtgtgcatgccagcggcagggtggttttcgctgatgcggactga

SEQ ID NO: 494697 - DNA, 615 bp, Stenotrophomonas maltophilia
atgtcgtgcatggactgctgccggaccaggcagccgcctgaccgcagcgccggcggcttcgccatggctcgcgcacgtaccgtcgtggtggcagcgatttcgcttgcctacccgctgctggtgtacctggcgatgggccgtttcgagccgcgctggctgtcgctgctgctgttcaccctggccctgctgcgtgcactgagcacgcgacagccgctgtggtgggccgccgccgctggcaccggcctgctggcggtgctggccaccgtgctcaaccaggccctgccgctgaagctgtacccggcgctggtcaacgtggtgatgctggcggtgttcggcaccagcctgcgcttcgggccgccgctggtggagcgcctggcgcggctgcaggagccggacctgccgccgttcgcggtggcctatacccgccgcgtcacccaggtgtggtgcggcttcttcgttctcaacggcagcctggccctgctgaccgcgctgtacgcgtcggaccgggtctggatgctctacaacggattgttggcgtacgtgatgatgggcgtgttgttcgcaggggagtggctggtgcggcggcaggtgaaggcggcgcacgcgcatggctga

SEQ ID NO: 494698 - DNA, 258 bp, Stenotrophomonas maltophilia
atgaccaagaatgaactgttcgaacgcatcgtcagcatcctgaccgacagcttcgagatcgaaaccgcccggatcacccccgaggcccgcctgtacgacgacctggacatcgacagcatcgatgcggtcgacctgatcgtgcagctcaagccgctgctcggccgcaatctgcagccggaagcgttcaaggccgtgcgcaccgtgcaggacatcgtcgatgtcgtgcatggactgctgccggaccaggcagccgcctga

SEQ ID NO: 494699 - DNA, 258 bp, Stenotrophomonas maltophilia
gtgcaagcacttgagcacgagatcaaggaattgatcatttcctccctttcgctggaggacatcacgccggaggacatcgatccgaccgcgccgctgttcgtcgagggcctcggcctggattcgatcgacgcgctggaactgggcttggcgctgcagaagaagtacggtgtcagcctctcggccgattcggaagaaacccgtcgccatttctccagcgtgcgcgcgctcggcgagttcgtcgccgcccgccagtcgtaa

SEQ ID NO: 494700 - DNA, 798 bp, Stenotrophomonas maltophilia
gtggctgaggcgctgcgccgcctcgatcatgcctggcgggtgttcggcaccggcctgagcttcgccgcatttggcgtgggcggcctgctgctgggcgtgctggtgatgccggtgctgctgctgatgcgcgacccggtgatccgccgccgccgggcccgccgcgtggtccaggtcgcctttgccagccacctgcgcctgatgcgtgcgctgggggtgatgacctaccagatcgagggcggggaacgcctgcagcgcgacggtttgctggttctggccaatcacccgaccctgatcgacgtggtctgcctgatttcgctgctgcccaacgccgattgcgtggtgaagcgggccgtggcctgcaacccgttcatgcgcggcccggtgcgggcggccggctacatcgccaacgatgacggggccggcctggtcgacgactgcgtagcggcggtgcatgccggcggtaccctggtgatcttcccggagggcacccgcagcgtgccgggccaaccgccgcggctgcagcgcggggccgccaacatcgccgtccgcggccggctggacatcaccccggtacggatcacctgcaccccgcccacgttgaccaagggacagaagtggtatcgtgccccctcacgtcgctttcacgttcggctgcagatcggcgaagatatcccgatcgcgcccttcctggccgatgacgactcgccaaggggggatgccttggcagcacgccgcgtcaccgagcacctttctcgttatttcgacctgtctggagatccgccccgtgcaagcacttga

SEQ ID NO: 494701 - DNA, 744 bp, Stenotrophomonas maltophilia
atgatcgaattctccatcgtcgactgggccgcttgggcgcccggcctgagcgagcgtagccagtggctgggctgggccgatgcgccgtatccgccgcagggcgaagacacgccggcgttggccgagatcccggcgatgcagcgccgccgcatcgagcggctgggccggatggcgatccaggctgcctgctggtgcgaggacgggcagggcgctgacagccaggtgccgctggtgttcgccagccgccacggcgacgtggcccgttcgatggacctgctgggggcgctggccagcgatcagcccctgtcccccaccgggttcggcctgtcggtgcacaacgcgatcgcggcgctgtactcgatcgcccgcggccaccgcggcaactacctggcgctggccgccggccaggccacggtcgagaccgcctgcctggaggccgccgggctgctggccgatggtgcccgcgaagtgcgggtggtggtctatgagtcgccgcttcctgaaatttacgcgacgtttgccgacgaacccgacccgttctttgcctggtgctggcgtttgaccgcgccgacagcgggccagccgacgctctcgctgcaatgggaggcggcgccggaggccaccgccaccgccccgggcacgctgccgcacgcgctggacctgcaccgcttcctgctgtctggcgcgccggcgctggagcacgtggcccagggccagcgctggcgctggggacgccgtggctga

SEQ ID NO: 494702 - DNA, 1014 bp, Stenotrophomonas maltophilia
atggacctgatgacctggctgccggtggcgtggttcgcggtgatcggcttcggcgtgctgatgtacgtggtgctggacggcttcgtgctcggcatcggcatcctggccccgttcgccgaggacgaggagcagctggacctgatgatgaacaccgccgcgccgatctgggacggcaacgagacctggctggtactgggcggcgccgggctgctggcggcgttcccgaaagcctatgcggtgctgttgtcggcgctgtacctgccggtgctgctgctggtggtggcgctggtgttccgcggcgtggcgttcgagttccgcttcaaggcacatcgttcgcgccggctgtggagcgtggggttcggcctgggctcgctgctggccacctttgcccagggcgtgatcctgggcacgctggtgcagggcatcccgctggtggacggtgcctaccagggcggcgcgttcgcctggttcagcccgtttgcgatgctgaccggtgccgcgctggtggccggctatgcgctgctgggcagcacctggctgatcctgaagacggaagggcgcgtgcaggcgctggcgcggcagatgacccgcccgctggtggtggcggtgatcgcggcgatgggcctggtgagcagctggctgccgttcctcgattcgcggttgatggaccgctggttcagcgacggcaacttctggtggctgtcgccggtcccgctgctgaccctggcggtggcggccgcgctgtggcgcagcgcgacccatccgcgccgcgacctgccgccgttcctgctcagcctggccctgttcgtgctcggcttccttggcctggtgctgggcatgtggccctacctgctgccgccgtcgatgaccctgtggcaggccgccgcgccggcctcctcgctgggcttcaccctggtcgggctggtcattctgctgccggtcatcctcggctacacggcgtggtcgtaccgggtgttccgcggcaaggtgcacgccgacaccggttaccactga

SEQ ID NO: 494703 - DNA, 1398 bp, Stenotrophomonas maltophilia
ttggacgcgttgttgttgtcccggatccagttcggattcgtcatcagtttccacgtgctgttcccggccttcaccatcggcacggccagctggctggccttcatcgaatggcgctggctgcgcaccaagctgcccgtctggcgcgagctgtacttcttctggcagaagatcttcgcggtgtcgttcggcatgggcgtggtcagcggcatcgtcatggccttccagttcggcaccaactggccgcggctgagcgaggtggccggtacggtcatcggcccgctgctgacctacgaggtgctgaccgcgttcttcctggaagccagcttcctcggcgtgatgatgttcggctggggccgggtctcgccgcgcctgcatttcctgtccacctgcatggtggcgctgggcacgctgttctccacgttctggatcctgtcgtccaacagctggctgcatacgccggccggctacgagatggtcaacggcgtggtgcatccggtggactggtggcaggtggtgttcaatccttcgttcccgtaccggctggcgcacatggcgctgggttcgttcatcaccacctgtttcgtgatcggtggcgtgggcgcgtggtacctgcgcaagggcacgcacgtggaagcgggccggcgcatgctgatcgccgccgtcgcattcgctgcgctgaccgtgccggtgcagattctcgtcggcgacatgcatggcctgaacacgctcaagcaccagccgatgaagatcgcggcgatggaagcgcactggcatgaaaccggggaaggcgagggcgtgccgctggtggtgttcgcgctgccgaacgagaaggaagagcgcaacgatttcgaagtggccatcccgaagctgggcagcgtgatcctcacccacagcctggacggcaccttcgacccgctgacctcggtacccgccagcgaacggccgccggtgacgccggtgttcttcgccttccgcatcatggtcgggctgggcacgctgatgctgctgctggcctgggtgtcggccttccagctgtggcggaacaagctgctggattcgccgtggctgctgcgcggctggaactggatgctgcccagcggtttcatcgcgctgctgtcgggttggttcgttaccgagatggggcgccagccgtgggtggtgtatggcgtactgcgcaccgctgatgcggtgggcccgcagagtgcgtggatgaccgcgctgtcgctgggcgtctatgtggttggctatgccttcgtgttcggctggggtatctggtacctggtgaagatcctgcgccacgggccgcagccgtacgccgaggggccgtcgctggaccatggcagccacacgccggcacgcccgctgtcggcggccgacgaaccgctggaggagcgctga

SEQ ID NO: 494704 - DNA, 216 bp, Stenotrophomonas maltophilia
gtgaacccacccaccgatcctcgcgatgcggaagcgcgcgtgttggcacaggcgttgcgcgagcaggcgcagcaggaagcaacgccggatgtgagcgaggcgctgcagaagcgcattgccgctgagtcgcgcgacagtggcgtggtctatgtgctggtgcaggtgctgttgtttggcgcgctgctggctgcagcggcctggtatttctggcactga

SEQ ID NO: 494705 - DNA, 654 bp, Stenotrophomonas maltophilia
atgagcctgctcggcgaagcgctgtcggcactgcggggccgtcgccgccacgatgcagtatcggcggcaccgcccgccgagccgctcgacgcggaccaggccctggtgcgggccatcatcgatggctcgcagtcggccttcgcgcagctggtggagacccaccagcgcacctgcgcgcatgtgatcggacgcatggtgggcgaccgcgaccaggtggctgacctgctgcaggaaaccttcctggccgtgttccgccagctgcaccggttccgctttgaatcttcgttgcgtacctgggtttcgcgggtggcctacaccactgcactacagcacctgcgccggcggcggctggaggcgcaatggatggtggcggtggaggtgccggaggaactggggatcggcgatgaaggccccgggcccgccgagttgagcgaggcgctgcaggccgggcgccagctcggcgcggcactggaacggctgagcgcgccgcagcgcctgatcgtcggcctgcattacctggaggattttgatctggccgagatcgagcaggtgaccggactggcacgcggtaccatcaagagccacctgcaccgcgcgcgccaggtcctgaagcaggaactgacgcggcatgccactgccggagagctgctgtga

SEQ ID NO: 494706 - DNA, 330 bp, Stenotrophomonas maltophilia
atgcaggaactgatcccgatcaccctcttcatctgcatcgcctacgcgatccatgccattgccgatgcgcgcgcgcgcagcaagctggtggccccgcacgtgccggaggaagtgatccgctcgctggccgtgctggaagaagagcggcgccgccagggggcgttgcgctggggcatcagcctggtctgcctggccctggccatggccctgctggaggccatcggtgcgcgtgacctgaccttcggtgccgctgccgcgctggtcggcagtgccggcctgggccagctgctggcctggcacttcacccgtcctgccgcacgcaagggctga

SEQ ID NO: 494707 - DNA, 2493 bp, Stenotrophomonas maltophilia
atgcgcgaccacggcaaccggttgcaccactttgccaatcccgctgccatgacctgtggcccctgcccctggcccttgcggctgctacgcttgcccggtttcctctactggtgccgtccgcccatgtcccgagtgctgcccctgtccctcctgctgtcggccgtgctggccgcaccggctgcgcatgccgcgccgacgccgatcaccatcgaacaggccatggccgacccggactggatcggtccgccggtcgagaaggcctggtggtcgtggaacagccagcaggtggagtaccagctcaagcgcaacggcagcccggtacgcgataccttccgccagcctgtggccggtggcgtggccgtgcaggtggccgatgaccagcgcggcaccctggacgtggccgagccggtctacgaccgcagccgcagccgcagcgccttcgtgcgcaatggcgatgtgttcgtgcgtgacctgcgcagcggcgcgctgacccagctcacccgcagcaacgagcgcgcgggcaacgtgaactttgccgccgacaacggcgtgatctggcgcgtcggccagaactggttccactggaccgccgccagcggcgtgcagcaggtggccagcctgaaggccgagaaggacccgcgtacgccgccgaaggccgacgtgctgcgcgaccagcagctgcgcacgctggaaaccctgcgccgcgaccgcgaccagcgcgaagcattgaaggaccaggaccagcgctggcgccaggccgacccgacccgcgcaccgggcccggtgtacctgggcgccgacgtcgagatcggtgacagcgtgctgtcgccggacctgacccacctgatcgtggtgaccaagccgaaggacttcgacgacggccgcaccagcaagatgccgctgtacgtgaccgaatcgggctacgaggaaaccgaggacacccgcacccgcgtcggccgcaacggcttcgagccacacaccctgtggtacgtggacgtgcgcaccggcaaggccgagaaagtctcgctgtccaacctgccgggcatcagcaccgacccgctggccgagctgcgccgcaaggccggcaaggatgcgctgaagggcgagcgcagcgtgcaggtgatgagcgacttcatgggcggcggcatccgctggagcgccgacggccagcaggccgcggtgatgctgcgtgccaacgacaacaaggaccgctggatcatcagcgtcaatgccgccgacggccgcgtgcagaaccgccaccgcctgaccgacaacgcctggatcaactggggcttcaacgatttcggctggatggccgatggccgcacgctgtggctgttgtccgaggaatcgggcttctcgcacctgtacacccaggccggcaccgccaagccgcaggcgctgaccagcggcaagtgggaaacctcggcaccggtgccgtcggccgatggcaagggcttctacttcctgtgcaaccagcaggcgccgcatgactacgaagtctgcgcggtcgacaccggcaaccgccaggtacgcgagctgaccagcctcaatggcgtggaggatttctcgctgtcgccggacggccagcagctgctggtgcgttactccggtgcctacctgccgccgcagctggcggtgctgcccagcaccggcggccaggcacgcgtgctgaccgacacccgcaccgccgactacaaggcacgccagtggatccagccgaagctggtggcagtgccgtccaggcacggtgccggcgtggtctgggccaagtactacgagccggaaaacaaggaaccggggaagaagtacccgatcgtgatgttcgtgcacggcgccggctacctgcagaacgtgcaccagcgctacccggcctacttccgcgagcagatgttccacaacctgctggtgcagaagggctacatcgtgctggacatggattaccgcggcagcgagggctacggccgcgactggcgcacggccatctaccgcaacatgggccacccggaactggaagactacaaggatggcctggactggctggtcgacacccagcagggcgaccgtgaccacgccggcatctacggcggctcctacggcggcttcatgaccttcatggcgctgttccgttcgccgggcacgttcaaggccggcgccgcgctgcgcccggtggtcgactggcacaactacaaccacggctacaccagcaacatcctcaacaccccggacatcgatccggaggcgtaccgcgtgtcctcgccgatcgagtacgcgcagaacctgcaggacaacctgctgatcgcccacggcatgatggatgacaacgtgttcttccaggactcggtgaacctgacccagcgcctgatcgaactgcacaaggacaactggtcgatcgcaccgtacccgctggaacgccacggctacgtgcgtgccgattcctggctggaccagtacaagcgcatcctcaagctgttcgagcagaacctgaagtga

SEQ ID NO: 494708 - DNA, 420 bp, Stenotrophomonas maltophilia
gtgagcaacgccgcggccacgatccggatcgtggccgcggtcatcctggatgaccgcggccgggcactgctggtgcgcaagcacggtgcccgccgcttcatccagcccggtggcaagcccgaacccggcgaagcaccgttgcaggcgctggcccgcgagctggacgaagagctcggtgtgcagctgcgcgccgagaccgccatcgcgctgggcaccttcgaggactgggcggtgaacgagcccggccaccgcgtgcaggcccaggcgtggtgggtgcaggtggacggcacgccgcaggcgcgcgccgaaattgccgaactggcctgggtgccgctgcaaccaccgtatggcctgcccttggcacccttgagcgaacaccatatcctgccggcggtcgccacccgggtgacggcccgctga

SEQ ID NO: 494709 - DNA, 561 bp, Stenotrophomonas maltophilia
atgtcagtgccgctcccgccgcttcccacccgcaccacgccacccgctcacgcctgggtgcgcccgatggcgcaggcgtcgttctggctgtgcctgctgctgacgctctacttcgtgctgcaggcgctgctgttgtggccactgcacggcaccccgctgtggcagtcgctcgccggaatggcgcaggcgcaccgggtgcacagcgtcacttggctgctggcccacccggtgggcgcctcgatgatcatcgcgctggcctgcctggtctcgaccgcagccagctggggcctgctgcgcgaacgccgctggggcctgtggggcttcgtggcgctgttgctgctgagcgcactggccaacttcgcgatcgcctggtggctggacgcgtgcatgcgcgatctcatcgcactgctggccgatgacccggccctgcagcaggagctgcagccgcggcgctggatggtcaccttcatcgtggtcggtacctcgatcctgttcctcggcctgcagggctggctggcctggcgcctgttgaggccggacatccgctcgcgcttccgctga

SEQ ID NO: 494710 - DNA, 966 bp, Stenotrophomonas maltophilia
atgcgcgtgctgcccctgctccccgcactgctgctgttcgccgcgcaacctgcgtccgccgacgcgttgcgatgtggcgagtaccgcagcaccgagggcgccatggcgctggtgttcgaatcatccactgccggttatcgcgctctggaaggccaggaacacgcgcctgtgcgcatcgaccgcagcggcggcgatctgcgcctggtatttctcgacgacggtgtatccaccgccatcagcgtggctgccgacggggcgcatatcaacgacggcatgaccgacttcgagttgcatcgaccccaggcctgccagcgcgcccctgcgcccgtcaccgacggctgcctgggccaacctgcgctgtgcattgcgcggctcgcggatgcgccgccggaacaggcgcgacgcgcgtgcgaggaaagcgtcggcgccgggtgctcggcgctgctacgccactttctcgctgcacccgccgccgcagccgggcagcaggacgcgccattgcctgccgcgcagcgcaccacgctgcagcggctctgcctgcaccagcgcggtggtcgcttctgcaccgaggtggccgaacagcagttgatcgcgctggaacccgcgttggccgtgcaggcgctgcaggtggtctgcgatgctgggcgcgccagtgcctgcgaacgtgttgcgccattgcgtgaactcggcaccgatctacgcctcgtgcctctccagcaagtgccctgtggccgctatcaggccgatggcggcgcgatcgacaggctcgacttcggcgatggcacgcgcggccgactggaagacggcgccatccaccttcagcaggacggcgaaacccttgtcctgcgccagctgggcaacggcgatctgcttggcatggatacgcagaccggttaccagcgctaccagccggtgcccggcacggcacaatgcacgcccccgcgcgagggccgtggttcgccgtag

SEQ ID NO: 494711 - DNA, 1614 bp, Stenotrophomonas maltophilia
atgcattcacccgcaccgcgccgccgctggctggtctgggcgctgctgctggccgcgccgatggccgccgcacagtcaccgcaatgcggcctgttcaaggccgacgaaggcagcggcacgctgcgcatcagctcaccgaaccgcggcgagcagaagcacttcggcagtgcgccgtctccggtcgcgttccagcagatcgacggaaagctgcaactggtgaacctggagtacggcctgcccagcgcgttgcaggtgcgcgatcgtggccgcacggtcgaggtggatggcacggtctacatcctgcaggcccccgcacagtgcgccgccgcagccaggccggctgaaggcagctgcctggccgatgcggcggcgtgcctggacaaccgccgtgaagcgcccccggccgcgctggaagcagggtgccgggaaggcgtgcccggcatgtgcctgcagctggccgatcgctggcatgacgaggccagggcgccggccacgccggatgaggcgcagcaacaggccatcctcgataccgcactggccggcatcgaactgcctgtgccgtgccggaatggcggcttcagcaacgagacaccggcctgtgcagcggcgctggaagcggatccggcgctgcaggatcagatcgtcaaggccgcgatgggtgcggcgatggtcgaagccgtgagctccgtgctgtcaccctccacgccggtggtggtgccggccgcgcagcgccagcagctgttgcagttgtgccagcaggtcggccatggcggcttctgcagccgcgtggccgagctctcgtgggaatccggcgaccccttgcaggcggtgcaggcactgaccacagcgtgcgcgcccggtaaggaaagcgccgcctgcgagcgcctgcctgcattgcaggcgctgggcgcctcgttgcggccgcagccggctacggcgctgccctgcggcaccttccgcgccgcaggtggcctgatggatacgctggacttcggcgatgcaggacgggtcggcatcggctgggacagccaactgcgtgctcgtgtcgaagacggcgacatccgcatccgccacgacaagggcggcgacttcgtgctgcggccgttgcccgggggccagctgctgggcctggacacgtggacacgcttccaggtgttcgtgccgaccggcgagggcgcgagcacctgcagcccgccgaaacactacacggtgctgccgctgcctcaggactgcccgcaggcgctggccagcggcggtgccgaagcctgctgcgcgcagggtaagctgcagggctgcaacattcttggcaaccgtcttgcgctgtccggccagtggcggcaggcggcagagcactacaccaccgtgtgccgtgccggcgtgcgcgagggctgcgaaaacctggtcgcagcgcagggccgcagcagcgacatcgacgcccatgcgacgctggagcggctgtgtgccgccgaccgcagcgggcgccacgtcgcctgcgacgtgctggacaccggaaactggagcgccctggagctgggccgtgtcctgcaggaggcggtggacgaagcgacggccgaggacactccggcgccgcgcgcttccaaccgcaagcgatga

SEQ ID NO: 494712 - DNA, 897 bp, Stenotrophomonas maltophilia
atgaacgaattcgagcgcgtgcgcacctacctcaccgacctgcaggaccgcatctgtgcggcgatcgaggccgtcgatggccaggcccgcttccaggaagacctgtggcagcgggccgagggcggtggcgggcgtacccgcgtgctgcgcgacggcgcggtgttcgagcaggccggcatcggcttctccgacgtggccggcagccgcctgccgccgtcggcctcggccaaccgcccggaactggccggcgcctcctggcgcgccaccggcgtgtcgctggtgttccacccgctcaatccctacgtgccgaccacccatgccaacgtgcgcttcttccaggcgcagcgcgacggcgaagtggtggccagctggttcggcggcggcttcgacctgactccgttctacccgttcgacgaggacgtgcagcattggcaccgggtcgcacgcaacctgtgcacgccgttcggcgacgagcgctatgccgcgcacaagcgctggtgcgatgaatacttcttcctgcgccatcgcaatgaaacgcgcggcgtcggcggcctgttcttcgatgacctgcacggcgatttcgagcgcgatttcgcttatctgcgtgcggtcggtgatggcttcctcgacgcctacctgccgatcgtgcagcagcgcaaggacgccgcatatggcgagcgcgaacgcgagttccagctgtaccgccgcggccgctacgtggagttcaacctggtctacgaccgcggcaccctgttcgggctgcagagcggtggccgcagcgaaagcatcctgatgagcctgccgccgcgggtgcgctgggagtacggcttcaccccggaagcgggcagcgccgaggcgcgcctggccgactacctggtgccacgcgactggctctga

SEQ ID NO: 494713 - DNA, 1521 bp, Stenotrophomonas maltophilia
atgcctgctgctgttaccttccgcccccgcgccgcgggctggcgctccctgctgttgcttgcattggcctcggccagcctgccggccgccgcgcaatcgatggcctgcggcacctacaaggacgtcgacggcaacaccacgctgaccatcgaaagtgaaggccatggtttcctgtccggcccctaccaggccaccgagcagctgcgcatcgcccgccaggaggacgtgctcggcaccggcaacctgtccaccggccgcctggaaaactggtacttctcggacaacgatcgcacgatcagcaccccctatcgcgaattcacccgcgagcacaccgccgcctgcaggacgatgccggagcccatcgagggcggctgcgtgatgaacacctccgagtgcctggaggcgttgccggaagccgaaccgctgaagctgcatgcctggtgcgccgaaggcgtgggcgcggcctgcatgcagctgctggagacctaccagcggcaggccaaggacgcagcgccggcgcctgcacgttccgagccgccgatgccggagttctgcaaggaggattcggcgtcgttcaatgccgagggctgcagggcgatcgccgaggtggtcggcgccgagatgatgggcaaggccgtgctcggcctgcagcattcgaacgaccctgtcttgccgaccgcgcagctcgatgaactggccgcactgtgccggcagcagcacggcgaggcgttctgcgccgacgttgccgaggcgctgtggagtggtgggcgcctgttgcaggcccatgaggcgctgcaggtgtcgtgcgcccagcgcgcggagggcgtggcctgcggccgcgccgaggcgcttgcccgactggcctcggtaccggccgctgcactggccccggtgccggcttccgcgctgccctgtgggagctatgaagcggagtacggcgtgctctcgcagctgcgcttcctcgatggtggcctggtggaagccgggggccgcgaccagcgcctgcgcgcgatcctgcaggacgggcgcatcctcatccatcgcgacgtcggcagcgacttcgtactgcagccgctgaagaacggaaacctggccagcgtcgacggcggcaaccgcttcgcctactacgagcgcaagccgggctcaggcaatgccagctgcgcaccgccggtggccttcgtggagatccccctgccgctggactgcccgaccctggaccgcaaggacggcgccaaggcctgctgcaccgatggcaagctgctgggctgcaaggttgccggcgaggcactgttcaaaaacgaacaatgggccgcatcgcggtcctacttccagacgctgtgcagcgcgggtgtgcgcgaaggttgcctggcaatggccgcggtgtatgcgcataccgcggatccgaagattccgcaggccatggctgcgatctgcgcgaaggacggcaagggcacccacgtcgcctgcgatgtggacgcgacgcgcaactggccggcgctgaaggctgaagccgctccctga

SEQ ID NO: 494714 - DNA, 480 bp, Stenotrophomonas maltophilia
atgcccgacctgttcgccctggccatgccgtggtgggaattcatcctgcgcgcggtggtggtctatgtcgtggtgctgggcatggtccggctgggcggcaagcgggctctggggcagatcacgcccttcgacgtgctgctgatcgtgctgctgggcaacgcggtgcagaacgcgctgctgggcaccgacacctcgctgggcggtggcctgctgctggcggccaccctgatcgtgctgaactacggggtgggctggttgaccacccggaatcggcgcatggagcggatgatcgaaggagagcccaccgtgatcgcgcgtgatggccggctgttggagggcgttctccgccgcgaactgatcagccgggccgatttcgatgccgcgctgcgccaacagggcgggctgcagatcgaggacgtgcagatcgccctgctggagacgaccgggcacatcacgatcatcgcgcggaagagcacctga

SEQ ID NO: 494715 - DNA, 2775 bp, Stenotrophomonas maltophilia
atgagcagattagtcctgatcgacgggtccagttacctgtaccgcgcgttccacgcgctgccgcccctgtccaatgcgcagggtgaacccaccggcgcgctgttcggcgtggtcaacatgctgcgttcgacgctgaaggagcgcccggcctacgtcgcgttcgtggtcgacgcgccgggcaagaccttccgtgacgacctgtacgaccagtacaaggccaaccgcccgccgatgcccgatgagctgcgcagccaggtcgagccgatgtgccgcatcgtcgaagcgctgggcatcagcatcctgcgcatccccggcgtggaagccgacgatgtgatcggcacgctggcccttcagggcctggcgcaggacctgaaggtgaccatttccaccggcgacaaggacttcgcccagctggtgcgcccgggcatcgaactggtcaacaccatgaccggcagccgcatggattccgacgcggcggtgatggagaagttcggcgtgcgcgccgaccagatcatcgacctgctggcgctgatgggcgacgcggtcgacaacgtgccgggcgtggagaagtgtgggccgaagaccgccgccaagtggctggccgagtaccagcacctggatggggtgatggcggccgcgccggccatgaagggcaagatcggcgagaacctgcgcgccgcgctggagcggctgccgctgaaccgcgagctggtgaccatccgtaccgacgtgcagctggacgccagcccgaccacgctggccctgcgcgagcaggatgtgccggagctgaccgagctgtatgcgcgctatggcttcacccaggcgctgaaggagctgggcgcgccggtgccggcaccggtggccgccagcgaggcgaccccgagcctgcgcggcaccgccgctggcttcgcccgtggcagcggcgaggcgcccgccgccggcacgctggatccggcactgtccgcgccgggtgagtacgagaccgtgctgaccgccgagcagctgcaggcctgggtcgaacgcctgcagcaggccgacctgatcagcttcgataccgagaccgatgcgctggacgcgatgcgcgcgcgcctggtgggcatcagcctggccgtcgagccgggcagggcggcgtacattccggtcggccacgattacccgggtgcgccggcccagctgcccatgcagcaggtgctggacgcactgcgcccggcgctgcaggacccggcgaagaagaagctgggccagcatggcaagtacgacctgcatgtgctgcgccgccacggcgtggcggtgcagggctaccacgacgacaccatgctcgagagcttcgtgctcaattccaccgccacccgccacgacatggattcgctggcgctgcgttacctgggctacagcaccatcaagttcgaggacgtggccggcaagggcgccaagcagatcccgttctcgcaggtgggcatcgacgaagccagccgctacgccgccgaggacgccgacatcaccctgcgcctgcaccacgcattgcagccgcagctgctggccgagccggcgctggacagcgtgtaccgcaacatcgagatgccgctggtgccggtgctggccagcattgaagccaatggcgtgcggatcgacaccgacgaactccgccggcagagccaggacctgtcctcgcgcatgctggccgcgcagcagaaggccaccgagctggccgggcgcagcttcaacctggattcgcccaagcagctgcaggcggtgctgttcgacgagctgaagctgccggcggtggtgaagaccccgaagggccagcccagcaccaatgaagaggcgctggaggcgattgccgaccagcatgagctgccgcgggtcatcctggactaccgcgggttggccaagctgcgcagcacctacaccgacaagctgccggagatggtcaacccggacaccggccgggtgcataccagctaccaccagtccggtgccgccaccggccgcctgtcctcgtcggacccgaacctgcagaacatcccgatccgcaccgaggacggccgccgcatccgccgcgcgttcatcgccccggaaggcttccagctgctggcggccgactattcgcagatcgaactgcggatcatggcccacctgtccgaggacccgggcctggtgcgtgccttcgagcagggcgccgacgtacaccgtgccaccgccgccgaggtgttcgggcgcacgctggaggaagtgaccccgaacgagcgccgcgccgccaaggccatcaacttcggcctgatgtacggcatgagcgccttcggcctggcccgcaacctgggcatcgaccgtggccaggcgcaggactacgtggcgctgtacttcagccgctacccgggcgtgcgcgacttcatggagcggatgcgccagcaggcccgtgaccagggctacgtggaaaccctgttcggccgtcgcctttacctgaacgacatccacgcccgcaaccagggcctgcgtgccggtgctgaacgcgcggcgatcaacgcgccgatgcagggcactgccgccgacatcatcaagcgcgcgatggtggatgtggaccagtggctgcgtgacagcggggcgccggcacggatgatcctgcaggtgcacgatgaactggtgttcgaaaccgaaagcagtttcgtcgaggacctgcgtttgcaggtggtggagcgcatgtcgcaagcggccaaactgcgggtgccactggtggtcgacacgggcgtcggcaacaactgggacgaagcgcactga

SEQ ID NO: 494716 - DNA, 285 bp, Stenotrophomonas maltophilia
atgaagaccctgatgctggcttccctgctcctgctcgctggctgcgccagcatgggtggcgcgggcgctcccccggtggacgtcaagggcgcggatgtatccaagcgcaccatggacaacggtgacaccatcgaggaataccgcgtgtccggccagctgcgcatggtcaaggtgaccccgtcgcgcggtgccccgttctacatgtacgacaagaacggcgacggccgcatggacaacgacaaggacggcgtgtcgccggtctactggaagctgtacagctggtga

SEQ ID NO: 494717 - DNA, 447 bp, Stenotrophomonas maltophilia
atgtacaagcgcatcctgattgccactgacgggtccgaactggccgacaagggcctggccaagggcttggagctggccaaggaccttaacgccgaggtcgatatcgtcactgtttccgagccgtgggccgtcggcatgtacgacgccatgggctggagcgtgggctacatgaacagccccgaatacaaggccgaccgcgaggaaggcgcgcagaaggtgctgcagccggcgctggccaaggccgccgagcagggcatcaccgccaacccggtgcacgtgctggaccgctatgcggccgacggcatcatcgagaccgccggcgagcgcaacagcgacctgatcgtgatgacctcgcacggccgccgtggcgtgacccgtgtactgctgggcagccagaccgccgaggtgctggcgcgcagcacgctgccggtgctggtcatccgctga

SEQ ID NO: 494718 - DNA, 555 bp, Stenotrophomonas maltophilia
atgaccgaacccgcgctgcacgtcaccgtgacgttgaatgcccggctgcagcccgaacatcgccacgaactgttcgaggacccactcgatgcgctgctgcaggcggccaatgtcggcgagatcaccggcggcggcacggcgatgtccgacctgggtgaggtcgaatacggcgatatcgaagtggcgctggtcgatgccgatggcgtgcccaagctgatcgacctgctggagcagctgggtgcaccgaagggctcgaagatccagggcgcgggtgaagccgatcgcagcttcggcgtgaccgaggggctgggcatctatctggatggcctgaacctgccggacgaagtctacgaacagtgcgattccaaccacgtgttcgagcagctgtccgagcgcattgatggccttggcgagatctgcagctggtggcagggcccgaccgagaccgcgctgtacatgtacggccaatcgttcgaggcgatgcgcgatgcgattgacgggttcgtggccagctacccgctgtgccagaacgcgcggatcgtgcagatcgcctga

SEQ ID NO: 494719 - DNA, 327 bp, Stenotrophomonas maltophilia
atgacccgcaacgtgctcttcctctgcagtcagaaccgcctgcgcagcccgacggccgagcaggtattcgccgattggccgggcatcgagactgcctcggccgggctgctggccgacgccgaggaagtgctcagccccgagctgctgcagtgggccgacctggtgttcgtgatggagaaggcccaccgcaaccggctgtccagccgctacaagccgtggctgaaggagaagcgcgtgatctgcctggatatcccggatgactacgagtacatggacccggtgctggtggaactgctcaagcgcaaggtgaccccgttcctgcgctga

SEQ ID NO: 494720 - DNA, 711 bp, Stenotrophomonas maltophilia
atgatcaccaaggatgacctgttaacgacgttcggagaggtggccgaaatccacggctgctacttctgcaagtacgtagtcgcgacgtacgtactctattgctgcgtgaggaacgccaagggacatgacctcgcgatcgcgtccaggaatgtcgatgatccggaattcgccaccagcgtcgtgctgaacgcaccgcaccatctttcacatgatgggccaacgatcttcgagattccttccaacgcctatgggttcactcatgcgatggcggttcccagcacctatcacgggcttctgaatcggatcgagaagcgcacggggctgttcctatgcctgccgatcttccggtgtgagttcaacggcaaagaatcagcagaggatttcagatggtccacacatcacatcgttgacgtcaacaactggcataggaccaggcagccgaagataagcgtgtacttcgacaatccccgcactggcggcggaacggacaaggacggcgccatcgtgagcctggagacgttaatggccgagatcgacaacctcaacggagtgagcagcggcttcatcgagatcaccaactatcgcgatgaggtgatcgaggtgttgtcgccggaggatggccactacgtattgatccgcaaccgtcaggacgaagaagcgatggaccgagccgggttggtggctgccgtagagacgttcaccaccggctga

SEQ ID NO: 494721 - DNA, 2193 bp, Stenotrophomonas maltophilia
atggatgtctcccacctgcttgatggcctgaacccggcccagcgcgaagccgtctccgctccccccggtcaccacctggtgctggccggtgccggttccggcaagacccgcgtactcacccaccgcatcgcctggctgcatgaagtcgatggcgtgccgacccacggcattttcgcggtgaccttcaccaacaaggcggctggcgaaatgcgccaccgcatcgatgcccagctgccccatggcagccgtggcatgtggatcggtaccttccacggcctggccaaccgcctgctgcgcctgcactggcaggacgcgaagctgcccgaaggcttccaggtgatggattcggacgaccagctgcggctggtcaagcgcgtggtgcaggcgctggagctggacgacggcaagtacccgcccaagcagatcgcgtggtggatcaacgcgcagaaggacgagggccaccgcccgcagcacatccagcccgaaccgcacgacgcgtggctggaaaccatgcgccaggcctacatcgagtaccaggcgcgctgcgaccgcgccggcctggtcgacttcgccgagctgctgctgcgcgcgcacgaactgctgcgcgacaacccggcgctgctgtcgcactaccgcgcccgcttccgcgagatcctggtggacgagttccaggacaccaacgccatccagtacgccttcgtgcgcgtgctggccggtgattccggccacgtgttcgtggtcggcgacgatgaccaggccatctacggctggcgcggcgccaaggtcgagaacgtgcagggcttcctgcgcgatttcccgggcgcgcagaccatccgcctggagcagaactaccgctccaccgccaacatcctcggcgcggccaacgcggtgatcgcgcacaacccggatcgcatcggcaagcagttgtggaccgacagcggtgacggcgagccgatcgacctgtacgccgcgtacaacgagatggacgaggcacgctacatcgtcgagcgtgcccgccagtgggtgcgcgacggtggcagctacaccgaagtggccgtgctctaccgcagcaacgcgcagtcgcgcgcgctggaagaagcgctgctgagcgagcaggtgccgtaccgcgtgtatggcggcatgcgcttcttcgagcgtgccgaaatcaaggacgcactggcctacctgcgcctgctgtccaaccgcaacgatgacgccgcgttcgagcgcgcggtcaacacccccacccggggcatcggcgaccgcacgctggacgaagtgcgccgcgaggcgcgcgcgcagggtatctcgctgtgggaggcaacgatgctggtcacccagggcaacgcgctggccgcacgtgcgcgcaatgcgctggccggcttcctggggctggtcaacgagctgcaggcgcagaccgtgcacatgaccctggccgagcgcgtggaccacgtgctggcccgctcgcagctgcgcgagcactggagcaaggaaagccgcaatgcgctggactcggagtcgcgcaccgacaacctcgacgaactggtctcggtggcctcgcgcttcgtgcgccgggccgacgacatcgaggaagtgggcgaggacatggacgagctggtcgcgttcctggcctatgccgcgctggaggccggtgagggccaggcgcaggcaggcgaagagggcgtgcagctgatgaccctgcactcggccaagggcctggaattcccgctggtgttcctggccggcctggaagaaggcctgttccccagcgcacgctcgctggaggaaagcgggcggttggaagaagagcgccgcctggcctatgtcggcatcacccgcgcgcgccagaagctggtgctgagctatgccgaatcgcgccgcatccatggccaggacaactacagcctgccatcgcgtttcctgcgcgagatcccgcgcgagctgctgcacgaagtgcgccccaaggtgcaggtctcgcggccggcctcgatgggcgccagccgggtgatgggccatgcctcgatcgaggcgccgccggtcaagctcggcgcgctggtcacccatcccaagttcggcgaaggcatggtgaccgactacgaaggcagcggcgcgcacgcccgcgtgcaggtcgaattcgccgacgccggcagcaagtggctggtgatggcctacgccaacctgacggtgatctga

SEQ ID NO: 494722 - DNA, 1422 bp, Stenotrophomonas maltophilia
atggcctacaatcggcgcatgactgattcaccgcgtaatggcgaactggacctggcaatcatcggtggtggtgcggccggggtgctggtggcgatccaggtgttgcgccaggcccaggcgccgctggcgctggccatcttcgaaccggcttcgcagctggcgcagggcatcgcctatgccacgccgtggccggagcacctgctgaacgtgccggcggcgaagatgagtgcgtttgccgaccagcccggcgatttcctcgactacctgatggccgccaacgcctacccgggcgaggcgcgcgaggtgctgggcgagcgttacgtgtgccgccactactttgcagcgtacctgcagcagcgcctgcaggaggccgccgcggccagcccggcacagctgcaggtgatcgtgcagccggtactgggcctgcagccggatgaccacggctaccagctggcactcggcgatggccagacgctgcacgccgcacaggcagtgctcgccaccggcaacagcatgcggccgctgccggtagccggtgccgaggcactgcccgccgatgacgtgatcgaggcctgggactacgacggcgtacgcaccctggccggtgagcaggccgtggccatcgtcggctccggcctgagcatggccgacaccgtgctggcgctggttgctgccggccacaccggcccgctgcacgtgatctcgcgccatgggctgctgccgttgccgcatgcgcatggcggcctgccctcgttcgacccggctgcgctgctgccgatgagcctgcgccagcgcctgcgcgcgttgcgcgggttcgcgcgccaggcgcaggccgatggtctgccgtggcagggggtgatggaccgcattcgtccgcacgggcaggcactgtggtgcagcctcgacgcggccgaccagcgccgcttcctgcgccatgtggtgcgctactgggacgtgcatcgccaccgcatcgccgaagaggtcgacgcacagctgcaggcgctgatcgaaagcggccaactgcgtattcaccggtcccgcctgcaacgcgtcggccgcgaaggcgatgccctgcggctgtcgggtcgcgacgcctccggcaaggatcagcagtggacggtcagcggggtgatcaacgccaccggtgtggaaacccgcgccagcgcgctgcgcaatcccttgctgcaacagctgcagagcgatggcctggcccgccccggcccgcacgggctgggcctggacagcacagtgccgggcgaccgcctgcgtgccgccggtggccagccgcaggcgcggctgggcgtactcggcagcctgcgcatcggcagcctgtgggaaagcctggcggtgcctgaactgcgtcagcaggcgcaggcactggccacccaggtggtcgcaggagccgcgacggcgatgccgtaa

SEQ ID NO: 494723 - DNA, 1419 bp, Stenotrophomonas maltophilia
atgctgttcgagtggttgctgggttcgtacctgctgctgatcgactggctgatccggctggttgcactgtgctggatccccacccgcaccacgccgggggcggcgcgtagctggctgctgctggtcggcttcgtgccgctgctgggcctgccgctgtacctgctgttcggccacccatggctgtcgcgcgagcgcatccgccgccaggccgaggcctcgcaggtcatccgcgaggaacaggcgctgcagcatcgcctgcgctggacaccgcagccggacaccgccagcgccgagatcgtgccgctggtgcagcgccagggcgacttcatgccggtgcacggcaacgccgtcgatctgctgaccgactacgacgaatcactgcacacgctgatcgccgacatcgaccaggccgaagaccgcgtgcacctgctgtactacctgatgttcgacgacgcggtgggcgaggcgatcgtcgaggccctgcagcgtgcggctgcacgtggcgtgcagtgccgcgtgctgctcgacgcggtgggcgccaagcgcggcctgcgtgcctatcgcaagcgcctgcaggcgcgcgacatcgaagtgcgcgcgatgctgcccggtggcctgcgctggcgccgcagcgggcgcatggacctgcgcaaccatcgcaagatcgcggtgatcgacaacgaagtggcctatgtcggttcgcagaacctggccggcccgcagttcgtgcctggccacccgaaccgcgagctggtggcgcgcgtgcgcggcccggcggtggcgcatctggaagcggtgttcgccagcgactggtacatggaaaccggccagcgcctggacgtgatcgccgatgtgcccgagtgcagcgacgacatcgccacccagctgctgcccagcggcccggcttatccgtacagcaacgcacgcgatgcggtggcggcgctgatccacctggcgcggcgccggctggtgatggtcaccccgtatttcgtgcccgacgaagccacgctcagcgccttgcgcattgcggccttgtccggcgtgcaggtgcagctgatcctgtcggccagcaacaaccagcggctgacgtcgtgggcgcaggaggcctactacgacgagctgctgcgctgtggcgtgcgcatcgcgctgtacgagccgcagttcctgcatgccaagcacatgagcgtggacgaggacatcgccgtgctcggctcgatcaacatggacatccgctcgttcgcgctgaatgccgaaatcggcctggtctgctacgaccgtgcgctggtgcagcagctgtgcgcgatcgaggatggctacctgcgcgagtcgcggcagctggacctgcagcagtggcgcagccgtcccacgtggcggcgcagccgcgaaggcatcgcacggctggccgatgcgttgatgtga

SEQ ID NO: 494724 - DNA, 249 bp, Stenotrophomonas maltophilia
atgaacaccccatcacaccggcaggacctggaactgggctggctgcgcctgcagcgcatgctgcaaggcatcgagggcatggcgctgctgctgtgcgaccaccatctggcactggccaacggcgcgccgtcgccgctgccggaggcgcagctggagcgggccgcacaggcgatcgcctgcatggcgctcaacggccgccgccatgccgacgcggtgcggcagctgtgcgaggtgccggtgcggcattga

SEQ ID NO: 494725 - DNA, 165 bp, Stenotrophomonas maltophilia
atggcaggcaagcgcgataaggtccgtatgatttcctcggccggtaccggccacttctacacgaccgacaagaacaagaagaacaccccggggaagatggaattcctgaagtacgatccggtcgtgcgcaagcacgtcctgtacaaggaaggcaagatcaagtaa

SEQ ID NO: 494726 - DNA, 237 bp, Stenotrophomonas maltophilia
atgtcccgcgtatgccaggtttccggcaagcgagtgcagacgggtaacaacgtctcgcacgccaacaacaagacccgtcgtcgtttcctgccgaatctgcacgagcgccgtttctgggtggccagcgagaaccgctgggtcaagcttcgtgtttccgcgcatgcactgcgcaccatcgacaagaacggcatcgattccgttctggctgagctgcgtgcgcgcggcgaaaaggtctga

SEQ ID NO: 494727 - DNA, 1215 bp, Stenotrophomonas maltophilia
atgcggctgctggccctgacctacggaaccgaaggcgatacgcgtccgctggccatgctctgccatgggctgatcagcgcaggccacgcggtgacactgctggccgatggcggcaccctgggcagcgcgcaggccctggatgtgccccacgcggcccttgagggtgacatccatgacgaagtggtcgcccttgtctcgcggggcaacggtgttgccgccgccagtaccggtctggcacggatggcgctgcagcatgtcagcggctggatgcgccaggccgatgccgccgccgaaggctgcgatgcgattctgaccggcggactggcggcccttgtcggcatgagcgtgggcgaacgtcggggtctgccggtcatcggcaccggcatgattccgctgaccccgacgcgggccttccgctctccgttcctgccacccggacgctcgccgggctggttgaaccgggccagttacgggtgggtcaacggcctgatctggcgccagttccgtcggccgatcaacgcggcacgccagcaactggggcaatcgccgcgtcgcgcgctgtggtccggcctgccgatgctctatggcatctcgccgcagctgctgccgccaccggcggactggccggtcgaccacatcgcctgtggccaatggcggcttcctgatgcgccctggacgccgccagccgatctgcaggccttcctcgatgccgggccgccgccggtctatctgggctttggcagcatgaccggattcgatcgcgagcgcgtgctgccggccctgctgcaggcgctggcaccgcgccgggtgctgctgtttcctgggtgggccggattgccgacgggtgcgctgccagcagatgtgttcgtgctcggcccgacgccacacgaagcactgttcccgcattgcgcactcgccatccaccatggtggcagcggcaccacgcattcggcctgccgcgccggcattccctcgctggtgatgccgttcgccgcggatcagttcttctgggccgatcgcctgtatcggttgggcgtggcaccggcaccgttgtcaccgaagcgactggatgcagcaacgctggcggcagccatcaccttcgttgaaaccgacgcaacacgcgcacgcgcggcggccctgggcgtggcgatgggccatgaggacggggtggcctgtggcgtggcgatgatcgagcgctggttacggccggtgtaa

SEQ ID NO: 494728 - DNA, 510 bp, Stenotrophomonas maltophilia
atgagtcgcatcgtcgcactggataccgaaaccaccggcatctcccaccgcctggggcaccgggtgatcgaaatcggtgccgtcgaactgatcgatggccagctcaccggccgccagttccacacctacctgcagccgcagcgcagggtcgactggggtgcacagcgcgtgcacggcatcagtgatgcgatgctggtgggcaagccactgttttccagcaaggccgccgaactgctggacttcctgcgcggcagcgagatggtcgcgcacaacgccaccttcgatgtgggcttcctggacaacgagctgcgtctgtccggtattcccggcacgctggcccagcattgccgcatcacctgcagcctgaagctggcgcgcgggcgctggcccggccagggcaacaagctcgatgatgtgctgcagcgcctgcgcattcccagccagcgcggcctgcacggcgcgctcaaggatgcccatctgctggcgcaggtgatcccgcacctgcgctga

SEQ ID NO: 494729 - DNA, 894 bp, Stenotrophomonas maltophilia
atggaccgtttcgaggcgatgcgggcctttgcccgggtggtggaaaccggcagcttcacccgcgccgcgcagaccctgcagatcagccgcaccacggccacccagctggtgcagcagctggaggcgcacctgcggctgcgcctgctcaaccgcaccacgcgccgggtcagtgtgaccgctgacggcgcggcctactacccgcgcatcgcccgcctgctggccgagctggaagaggtggaaggcgggctgggtgacgcggccagccagccgcgcggacgcctgcgcgtggatgtgccctggccgtacgcgcggctgcggctggtgccggcgttgccggatttccaggcgcgctacccggagatccagctggacatcggcgtgagtgaccgcgaggtcgatgtcatcgccgacaacgtcgactgcgtgatccggggtggcaccccggccgacccggcactggtggcgcggccgctggcggcgctgccgatcggcttccacgccagccccggctatgtgcagcgtttcgggttgccgaccgatccgcgcgcgctggaaggacccgaccaccacatggtcggcttcctcagcccgcgcagtggccgcgcacgcgtgttcgttgcacagcgcggcgatgaacgcgttgaggtgcagggccgctatacggtcggcttcgatgatggaaacgcctatctggccgctgcgttggcggggttgggcgtggtggcgctgcccagctacatggccgagccgcacgtggcgcgcggcgagctgttgccggtgttgccggactggcaactgccgccgatgccgatgcatgtgatgttcccgccgaaccggcacatgagccagcggctgcgggtgttcatcgattgggtggtggaggcgttgggttga

SEQ ID NO: 494730 - DNA, 390 bp, Stenotrophomonas maltophilia
atgtcacagcgtgatgtcgttttccccgccggccgccaggccctgtacgagcgcaaccgctactcgcctgcgatccattccaacggcttcctgttcgtatccggccaggtcggcagccgtgaggacggctcgcccgagccagacttcgaaacgcaggtgcgccgcgctttcgagaatctcaatgcggtgttggctgctgccggctgcacgttcgatgacgtgatcgacgtgaccgtgttcctggtcgatccagagaagaactttgagaaggcttgggcaatcgtgccggagtattggggcgaggcgccgcacccgaccctgaccggtatcggcgtgacctggctgtatgggttccagttcgagatcaaggtgatcgcgaagctgccgtga

SEQ ID NO: 494731 - DNA, 333 bp, Stenotrophomonas maltophilia
atgcgctggatcacccgccacctccgttcgaccctgctgatgctgctgatggcggcattcgtggtcgtgccggtggccgacgcgctggcctgcacggtggaaccgcatgccagcacggtgcatgtggagtccgcaccggatgccgatggcgatgccgacggcaagcacgtcggtgcctgtggccacaaccactgccaccactccaatctgagcctgccggccagtaccttcgccgccttcggtgcgccgcttccggcgcgctggatgaatgccggcgacgcggcgacctatgcggtcgcccaggatgaactgacgcgtcctccccgggcgtga

SEQ ID NO: 494732 - DNA, 1254 bp, Stenotrophomonas maltophilia
atgtcgaccctgacacgtcggccgctgcgtgcggccgggcgggtcgtcgccgtgttgctgggcctggccccggcggcatcggtgatggcgcaagccgccccttcctacgacaccctgcttgaacgcctggaccagctgcccggcacccgcgtcggtgcggcgctggccgaggccgccgacgcgcgcgccgaccaggcccgtgcgttgcccaacccttccctctcttactccgccgaaaacgcctggggcaccggctcctatggcggcatgggcaaggccgataccgtgctcaccctgtcccagccgctggaggtctggggccagcgtggcgcgcgtgtccgtgccgcccgtgccgaggcacaggccgccaacctgcgtggtgcccaaagccgcagcgacgtggccagccagctggcggtggtctatgcacaggcggaaagtgcactgcgccgctacaccctggccgaagaagcactgagcctcacccgcgctgacgccaacgcggtcaacgcgatggtcaagcagggccgcgagccgcagctgcgcgccgtgcaggcgcagagcgaagtcgccaacgccagcgccgcgctggatgaggcgcaggccttccgcgatgccgcgctggcccgcctggccggtgccgcgctgctggatgcgccggtgcagtcgatcgccgacagcctgctcgaccgcgcgccgccgttgccacgcggtgccaccgataccgcgctggcggtgcgcatcgccgaagccgaagcggatgcggcgggcaagctggtcgacgtggagcgcaagcgcgccctgcccgacctgagcgtcactgccgcgcagacccgcttccgcgaggggggcgagcgcgcctacaacctcggggtcagcctcagcatcccgctgttcgaccgcaaccgcgggggcatacgcgccgccaatgccgaccagcgcgcggccgaggcacgcctggaccagcagcgccgcgacagcgaggcggcacgcctctccgcggtggccggtttgaaggccgccggcagccgtacccgcgccgccgatgaaagcgtggtcgccgccgaagaggcgtatcgcctggcccgcatcggcttcgacgccgggcgcatctcgcagctggaactgcgcagcacgcgcagcgccctcatcgccgcccgcggcaccgccgtggatgcgcgcctgtcgcgcgtcgccgcggaaatcgatcttgcccgccttgaagggcgcgcaccttttgtggaggtcccatga

SEQ ID NO: 494733 - DNA, 1206 bp, Stenotrophomonas maltophilia
atgacgctctcccgtactttcccgctgatcggcggcgtgctgctggccgcgctgctggccggctgcgctggcaacgcgcagacacctgccaatgaagacccggctgcggccaaggccggcaccgacgatggccacggccatgccgccgacagcaaggaggccaaggccgaatccgcaaaggcgcccgccgatggcgatgagggtgtcgtgcagctgactcctgagcagatcaaggcgtccggtatcgaagtggtcgcggtcggtcgtggtggcggtagctccacgcgcctgtccggccgggtcgaaccgtcggtcggtgcacgcgcctcggtggcgtcgaccgtgaccggccgcgtcgaacgcgtgctggtcgcaccgggcaccgcggtgaagcagaaccaggcactggccatcgtggtcagcggcgaagcggcggtgttccgcgccaatgcgctggccgcctcggccgaagccgaggccgcgcgcctggcctatggtcgcgacaaggcgctggtcgaccagggcgtggtcgcccgccaggagatggaagcctcgcgcgcacggtcgctggcggcacaggcccaggccgctgccgcgcaggcccaggccgctgccaacggtgcgcccgatgccagtggccgcgtgcgcatcaccagcccggtggccggcatcgtcggcaacgtgcaggtcactccgggcggtgtagtcgccgccggcagtgcagtcgccgatgtcgccgacccgacaatgaacgagctggtgttcaccgcaccgccggcgctggccgcacaggtcacgcccggcatgacgctggaagtgagcgtgccgggtggcagcttcaccgccaccgtcaccggttcggccgccgatgtgcgccagcagggcggcgtcgcggtgatccgcgccaccccggtggatgcgtcgctgccgccggccggttcgccggtctcggccgtggtggtcaccgaaggccaggacggctcgctcagcgtcccggccgatgcagtgcagaacgttgatggcagcagcgcggtgtttgtcgccgtcgaaggtggcttcaaggcgcagccggtcctggccgggcgccgtgccggtgaccgcatcgagatcctcgctgggctgaccggcagcgagcgcatcgtcggtgccaatgccttcctgctcaaggccgagctggccaagggcgaagccgagcacggccactga

SEQ ID NO: 494734 - DNA, 3210 bp, Stenotrophomonas maltophilia
atgttcaagctgatcattgaaacagcggtgcgccaccgctggctggtggtgttcatggccgcgttgatcgccgcggtgggcctgttccagctgggcaagctgccgatcgacgcggtgccggacatcaccaaccgtcaggtacagatcaacacggtggcaccggcgctgacaccggagcagatcgagcggcaggtgacctatccgctggaaaccgcgctggccggcatccccggcctgaccaccacgcgttcgctgtcgcgcaatggtttctcgcaggtcaccgcgatcttcaccgatgccaccgacatctacttcgcccgccagcaggtggccgaacgcatgcgcgaggcatcggaagacctgcccgatggtgcatcaccgatgctgtcgccggtcaccaccggccttggcgaggtgctgatgtggacggtggacttcaccgcgttcgatccggccaaactggccaaacccgatgaagcgggctggcaggccggcgaggtctaccgcacaccggaaggcaacctgctgcgtacgcccgaagaacgtgcgacctacctgcgcaccgtgcaggactggatcatcgcgccgcagatgcgttccagcccggggctggccggcgtcgatacggttggcggctacgtcaaggaatacggcgtgcatccggacagcgccagactggccgcgcatggcctcggcctggccgacctggtcactgccctgcagcgttccaacgtgcaggccggtgccggcttcgtacagcgtgccggcgagggcctggtggtacgtgccgacggcctggcgctgaccaccgacgacctggcacaggccccggtggcgacccgcaatggcgtggtggtacgcgtagccgatgtggccacggtggaactgagccgcgcgccgcggctgggtgcggccagccgcaacggccatgaagccgtgctgggcaccgcgctgatgattgccggtggcaacagccgcaccgtggcccaggcagcggccgcgcgcctggaacaggtaaacaagtcactgccggccgacatcgtggcggcaccggtgctggaccgcagcgtgctggtcaattccaccatcaagaccgtcgccaggaacctcaccgagggcgcgctgctggtggtggtggtgctgttcctgctgctgggcaacctgcgtgcagcaacgatcaccgcgctggtgattccgctgtcgttcctgttcgcagtgatcggcatgaaccgcttcggcatcagtggcaacctgatgagcctgggtgcgctggacttcggcatcctggtggacggtgcggtgatcgtggtcgagtcgacactgctgatgctgggccagcgccgcgccgaactgggccgtgcgctgaccgcgatggaacgcctgcgcgtagccgccgattcggccattaagatggcgcgccctgcggccttcggccagctgatcatcctgctggtgttcgcgccgatcctcacgctggagggcgtggagggcaagacgttccacccgatggcggccacgttcatgctggccctggtcggtgccttcctgttttccttcaccttcgtgccggcgatggccgcgctgctggtgcgcgagcccaaggtgaaggacggcgatgcgcacgcggacgacggcgagcacgaaaccaggctgatccgcgtgctgcgtgcgcgcatcgaaccggtggtgcgcaaggccgtggcgcacccgcgcacggtgctggccggtgcggtgatgatggtggtggtgggcatcggcgcgttctcgctgctgggccgcgagttcatgccgaccctggatgaaggcaacgtggcgatgcaggccctgcgcgtgccatcgacctcgctggagcagtcactggcaatgcagctggcgctggaaaaggcgattgccaagcagccggaagtggaaaccgtgttctcgcgcaccggtaccgccgaggcggcgatcgacccgatgccgaccaacatttccgacagcgtgatcgtgttgaagccacgcaaggactggcccgatccgacgctggccaaggacgcactggtggcgcgcttcgagaaactggccgggcagcagctgggcaacagcttcgagttcagccagccgatcgagctgcgcttcaacgaactgatttccggcgtgcgtaccgacctggccgtaatgatcttcggtgatgacttcagccagctgcagaaggtggccgaccaggtggcgttgaagctgcgtgcggtggatggcgcggccgacgtgcgggtggaacagatctccggcctgcccacgctcaacgtggcgatcgaccacgtggcggcggcacagtacgggttgagcgctgcagatgtgagtgatgcgctgtccaccggcatcggcggtaccacggccggcaagatcttcgaaggcgaccgccgcttcaacgtggtggtgcgcctggacgatgcctcgcgcaacgatccggaccagctggcctcgctgccgatcgccacgccatcggggctcgtgattccgttgtcgtcggtggcgcgcattaccgtgagcgaagggccgaaccagatcagccgcaacaacggcagccgccgcgtggtagtgcaggccaacgtgcgcggtcgcgatctgggcggcttcgtcggcgaggcgcaggctgcggtggccgacgtggcgctgccgccgggcgcctacctgacctggggcggtcagttcgagaacctgcagcgcgcggagaagcggttggcaaccgtggtgccggtggtgttcctgctgatcggcagcctgctgttcatggccctgcgcagcggcaaggaagccattctggtgttcagctgcgtgccgttggcgctggtcggtggcatcctcgcgctgctgctgcgaggcatgccgttctcggtatcggcggcagttggcttcatcgccgtctccggcgtggccacgttgaacggcctggtgctgatgcaggcgatccgcgaacgcctggatgccggcgacctgccgctgcaggcggcgatcaacggtgcctcgagccgcatccgcgcggtgctgaccacggcgctggtggcgatcgtcggcttcatcccgatggcgattgccagcggttccggtgcggaggtgcagaagccgctggccacggtggtgatcggtggcctgatcaccgccaccgtgctgaccctgctggtgctgccgaccttcgcagcacgggtggccaagccgcggccggtggggtga

SEQ ID NO: 494735 - DNA, 1773 bp, Stenotrophomonas maltophilia
gtgaaaacccgtcttgccgttgccctgctgatcgccctgtccgcccccgccgtggccctggccgcgccgcccgcccccgccgcaccgtccggcgtggctactgaatcgcccgccgacgccgccttccgcgcgctgtacgagaaggaatggaagtggcgccagcagggcggtggcgaggccagcgaggacgaggacgccccggccaacgccacccgcatgcccgacgtcggcccggccgcgcagcaggcgcgcctgaaggtgtgggatgagaccctggccgcgctgaagaagatcgacccgaagaccctgtcggccgacaaccaggtcaactacgcgatctaccacgaccaggtgttcaacctggccgaagagacgcgcctgcgcggctacgagatgccgttcaacgccgattcctcgttctggtccaacctgtccttcatggcccggcgcgagatgaagaccgtgcaggactaccagaactacatcgcacgcctgaatgatgtaccgcgctacttcggccagcagaccgagaacatgcgcgccggcctgaagcgtggtttcagcgtgccgcgcgcggtgctcgatggccgcgaagtgtccatcgccaccgtcgccgagctgaaggacccgaccgaatcgccgctgtacgcgccgttcaagaagctgcccaccaccatcccgaccgccgagcaggccaggctgcaggcgcaggcgcgcgcggcgatcagcggcaaggtggtgccggcgttccagcagctgcgcaccttcttcgtcaacgagtacgtgccacaggcgcgcaccaccctggccgccgaagcgatgcccgatggcaaggcgtactaccggcagcagatccacgaatacaccacgctggacctgtcgccggacgagatccaccgcatcggcctgggcgaggtcgagcgcatccagaaggaaatgaacgacatcatcaagcaggtgaagttcaagggcagcttcgccgagttcctggccttcctgcgtaccgatccgcagttctatgcaaagacgccggaagagctgctgtcgcgtgccgcgtggatctccaagcgggcggacggccagctgggcaagtacatgacgttgccgcgcgcgcgcttcaccatcgtgccggtgccgccggacatcgcaccgttctggacggccggccgcggtggcatgggcacctactggctcaacacctacaacctgccgtcgcgcccgctgtacaacctgccggcgctgaccctgcatgaatccgatccgggccactcgctgcagggcgcgatcgccgccgagcagaagaacctgccggagttccgccgcaacgcctacatctccgcctatggcgaaggctgggcgctttactgcgagaaactgggcgtggagatgggcatctacgaaaccccgtacgaggatttcggccgcctgacctacgagatgtggcgtgccgcgcgcctggtgatcgacaccggcgtgcacagcaagggctggacccgcgagcaggcgttggcctacctgcgtgaccacaccgcgctgagcgagcatgaagtgaccaccgaggtggaccgctacatctcctggcctggccaggcgctgagctacaagctgggcgagatcgccatcgtgcgcctgcgtgcgcaggccgagaaggagctgggcgacaagttcgacatcaagggcttccacgacaccctgctcaagcagggctcggtgccgctgccggtgttggaacagcagatccaggcctacatcgccgagcgcaagaaggcctga

SEQ ID NO: 494736 - DNA, 348 bp, Stenotrophomonas maltophilia
atggatctggagctgcattggctcgaccagccgctgacctggctgtactggaccggcctgcacgtgaccggctggaagctgatcggctataccggcgcgctgatgttcggcggccgctggctggtccagttcgtcgcgtccaagcgcgccggcaagccggtgatcccgcgcctgttctggtacatgagcgtgctcggcagcctgatgacgctgagctacttcctgttctcggccaagcaggactcggtgggcgtgctgcagaacctgttcccggcgttcaccgcgctgtacagcctgcacctggacatcaagcaccgcggctggaagcgagacaaggccagccactga

SEQ ID NO: 494737 - DNA, 723 bp, Stenotrophomonas maltophilia
atgagccaacccgagctttccgttgtcgtcccggtattcaacgagcgcgacaatgtcgccccgctggtcgccgaaatcaccgccgcgctgcgtggccggctgccgttcgaaatcgtctacatcgacgatcactcgcgcgatgacaccctggcggtgctgcagggactgaaggcgaccaccccggaactgcgcgtgctgcaccatgtgaaccagagcgggcagagcaccgcggtgcgcaccggcgtcaagcacgcgcgcgcgccgtggatcgcgaccctggatggcgatggccagaacgatccggccgatatccccaagctgctcgccgcacgcgacgccgccgaggcgcaggtgaagctgttcgccggctggcgcgtcaaccgccaggacagcggcagcaagcgctgggccagcaaatgggccaacgccatccgtgcacgcatgctgcgcgacgatacgcccgataccggctgcggcatcaagctgttcgaacgcagcgcgttcctcgacctgccgtacttcgaccacatgcaccgctacctgccggcgctgatgcagcgcgccggctggaagaccaccagcgtgccggtcaaccaccgccaccgtaccgctggcgtgtccaagtacaacaacctcggccgcgcgctggtcggcatccgcgacctgcgtggcgtggcctggctgatcacccgcagcaagcgcaccgcggtggaggagcgctga

SEQ ID NO: 494738 - DNA, 966 bp, Stenotrophomonas maltophilia
atgaccatcctgctcaccggcgctgccggcttcatcggtgcctacaccgcccgcgcactgctggaggccggccaggccgtggtcggcctggacaacttcaacaattactacgacccgcagatcaagcgcgaccgcgtggccgcgctgtgcccgtcgctggacctgcgcgcgctggacctgaccgaccgcgagggcctggctgcgctgttcgatgaagtgcagccgacggcggtgatccatctggccgcccaggccggcgtgcgctattcgctggaaaacccgcacgcctacgtcgacagcaacctggtcggcttcgtcaacatgctcgaactgtgccgccaccgcggcgtgcagcacctggtgtatgcctccagcagctcggtctacggcgattcggccacgccgccgttctccgaggaccagcgcgtggaccagccgcgttcgctgtacgcggcgaccaaggcggccaatgagctgatggcttacacctacgcgcagctgtacggcctgcatgccaccggcctgcgcttcttcaccgtgtatggcccgtggggccggccggacatggcaccgctgctgttctcccgcgcggtgctggccgggcggccgatcgacgtgttcaacgaaggccgcatgcagcgcgatttcacacatgtctccgacattgtgtccggtatcctcggcgccctcgcgcatccggccgacggcccggtgccgcaccgggtgttcaacctcggcaaccatacgccggtcgagctggagcgcttcatcagcgtgatcgagcaggccgccggccgccccgcgcagaaggtgtacaagcccatgcagcccggcgacatggtgcgcacgatggccgatacccggcgcgcacatgacgctttcggcttcgatgcggtgaccccgatcgaagaaggcctgccgcctgtggtgcagtggtgccgcgagtattttggcgatcgcgcctga

SEQ ID NO: 494739 - DNA, 735 bp, Stenotrophomonas maltophilia
atgagcaacgaatacgaggacgtcagcccggacggcacccagatactggtacatcgccgcgaaaaggacttcgtgctcgccaccggcgaagaacgccacatcgaggcgatcagcgcccacctcgaacgccatctgggcccggtgtccggtgtcttccacgagatcatctccgacctggtgcacatcgacgtgcacgtggtgccggccaatgaccactgcccttacctgcgcctggtcacctccggcatgagcgacctgccgatgaccgtgcccgccgaggtggacgcggacgtgccgcgctacatggaactgatggtgaccctgccggcggactggcccatctcccaggacgccttcgaggacgagcgcaattactggccggtgcgcctgctgaagggcatggcgcggttgccgcacgagtacgacacctggctgggcttcggccacaccattcccaacggccatcccagcgagccctatgcgccgggcgtgggcttcgacggcgccatcgtgctgccgccggtaaccaccccggaggactttgccacgctggaactggacgacggcaagaccatcagcttcatgagcctggtcccgctgtaccccgaagagatggacctgaagctgaggaagggcgccgaggcgctgctcgaccgcttcgacgcgaagaagatccaggatgtaatcgaacccggccgcaccaacgtggcgaagaagcgtttcggtttgttctga

SEQ ID NO: 494740 - DNA, 924 bp, Stenotrophomonas maltophilia
atgaccagcagcaagccggcagccaagaagcgaggcctcggccgtggcctggatgcgctgttgggcccgaaaggcgcggtcagccaggtgcaggccaccaccgcggtgatcgagccgctgccgggtgaagtgctgcgcaagttgccggtcggccagctgcagccgggcaagtaccagccgcgccgcgagatggacgagggcaagctgtccgagctggccgactcgatcaagtcgcagggcgtgatccagccgatcctggtgcgccagctgccggcaggcaactacgaaatcgtcgccggtgaacgccgttggcgcgcatcgcagctggccggcctggacgaagtgccggtggtggtgcgcgagctggaagaccgcaccgtcatcgcgatggcgctgatcgagaacatccagcgcgaagacctcaatccgctggaagaagccgaggcgctgcagcgcctgatcagcgagttcaccctgacccatgccgaggccgccgaggccgtcggccgctcgcgcgcggcggtgtccaacctgctgcgcctgctggagctgccggtggcgatccgcctgctgctggaaacccgccgcctggaaatgggccacgcccgcgcgctgctgaccctggctcccgagctggccggcaagctggcccaggaagcagccgatgaaggctggtcggtgcgcgaggtcgagcgccgtgcgcaggccttcgccgccggcaaggtgccgagcaaccgcccggcggccacgccgaaggtgcagcaggccgacatcgcctcgctggaaaccgaactgtccgaagcattgggcgccaaggtggcgatcaatcatggccgtggcggcaagggcaagctgatcatccactacaccgacctggataccctggacggcgtgctggaaaagctgcgcacgcgccagggctga

SEQ ID NO: 494741 - DNA, 798 bp, Stenotrophomonas maltophilia
atggcccgcatcatcgccatcgccaaccagaagggtggcgtcggcaagaccacgaccgccgtcaacctggccgcttccctggccaacgcacccaagcgcgtgctgttggtcgacctggattcgcagggcaacgcgaccatgggcagtggcgtggacaaacgcgagctggccgcctccacctgtgacctgctgctcggcgagaacagcgctgccgatgtacgcgtgcagactgccgagggttacgacctgctgcccggcaatatcgacctgaccgccgccgagatccagctgatgggccagagcgagcgcgagcagcgcctgaagcgcgcgctggcgccgatccgcgacgagtacgactacatcctgatcgactgcccgccggcgctgtcgctgctgacgctcaacgcgctggccgctgccgactcggtgatcgtgccgatgcagtgcgagtactacgcgctggaaggcctgagcgcgctggtggaaaccatcgaagcgctgcgcaccagcctgaacccggcgctggagatcgaaggcgtgctgcgcaccatgttcgacgtgcgcaacaacctggccaacgcagtgtcggccgagctcaccgagcacttcggcgaccgcgtgttccgcaccatcgtgccgcgcaacgtgcgcctggccgaggcacccagccatggccagagcatcgtcggctacgaccgcgcctcgcgcggtggcgtggcctacctgggcctggccggcgagatcatccgccgcaacaacgaacgcaacaaggccggcaaggccgtggagatcgtctga

SEQ ID NO: 494742 - DNA, 639 bp, Stenotrophomonas maltophilia
atgagcgaacacccacttcccgccagcgtgtctgccacgctggaacagggcctggccagcatgggcctggacgccgcgctggcgccgccgttgctgcgctacctggccctgctgcaccgctggaacggcacctacaacctcaccgccatccgcgacccgcaggagatggtcacccgccacctgctcgactcgctggcgatgcagccgttcgtggccgacggcagcctggccgaccttggcaccggccccgggctgcccggcatcccgctggcgatcgcctgcccgggcctgcaggtcaccctggtcgagagcaacggcaagaaggcgcgcttcatgcgcgaagccgtgcgccagctcggcctgggcaacgcccgcgtggccgagtcgcgcgccgaggcgctggacgaggccggccgctacgaccagttgaccgcgcgcgcgatggacaccctggccggcatcgtccgcgtcggtggccacctgctgcgccccggcggcgtgttgctggccatgaagggcgtccacccgcatgaggagatcgcggacctgccggcgggctggcaggtgcgtgaggtgaccccgttgagcgtgcccggcctggccggcgaacgccacctggtcactgttacaggcccctga

SEQ ID NO: 494743 - DNA, 600 bp, Stenotrophomonas maltophilia
atgagcctgccagccaccctcgatggcccgtggcgcttcggtccggtgacggtctggcggcgcccgcatgtgccgggccagcgtggtgaaccgcaggcgcggcaggtgctggcgcaggcattgggcgccgacccgcagacgctgccgctggtccgtgatgacaagggccggccggaactgagcggcccgttggcccactacggcaccggctggagccacagcggcgaggtgctgctggtggcgctgggcgaaggcgtgcggctgggcgtggacctggagctgctgcggccgcgaccgcgcctgctggaaatcgtgcggcgcttcttccacccgcaggaggtggcctggctggaacgcctggatgaggccgggcgcgagcactggttcttccgcgtatggtgcgtcaaggaggccatcctcaaggcgcatgggcagggcatctcgttcggcctgcaccgcctgcagctggcgcccgggcccgatggcgccctgcacctgcgctggtgcgacccggaactgggcgaggccgcgcgctggcacctgcacgagtggcaggccagcggccagttccgcgccgcattggcctggtatccacactga

SEQ ID NO: 494744 - DNA, 252 bp, Stenotrophomonas maltophilia
atgggcatcatcatctggctgatcgtcggcggcatcgtaggctggctggccagcatcatcatgaagcgcgatgcccagcagggcatcatcctcaacatcgtggtcggcatcgtcggcgcgctgatttccggctggctgttcggcggcggcatcaacgaagcgatcaccctccgcaccttcctgttctcgctgatcggcgcggtgatcctgctggcgatcgtcaacctgttcacccgcaagagcatacggtga

SEQ ID NO: 494745 - DNA, 768 bp, Stenotrophomonas maltophilia
atgaaaatcgcctcgtggaacgtcaattcgctcaatgtccgcctgccgcacctggagcagtggctcagggagttcggcccggacatcgtcggcatccaggaaaccaagctggaggaccacaagttccccgattcggcgctgatcgccgcaggctatcgcagcgtgttcgccggccagaagacctacaacggcgtggcgctgctgtcgcgtgagccggcgcaggacgtgcagatcggcattcccggtttcgaggacgagcagaagcgcgtcatcgccggcaccttcggcgacctgcgggtgatcaacctgtacgtggtcaacggccaggacatcggtaccgacaagtacgactacaagctgcgctggctggaagcggtgcatgcctggatcgccggagaactgcagcgccacccgaagctgatcgtgatgggcgacttcaacatcgccccggacgcgcgcgacgtgcacgacccggcggtgtggaacgacaaccacatcctgacctccaccgccgagcgcggcgcactcaacaagctgctgcagctgggcctgcacgatggcttccgcctgcacaatgacgaggcgggcaccttcagctggtgggattaccgtgccgccggcttccgccgcaacctgggcctgcgcatcgacctgaccctggtctcagacgcgctgaagggcagtgcggtggcctcgggcatcgaccgcgagccgcgcacctgggaacgcccgagtgaccatgcgccggcctgggtgcagatcggttga

SEQ ID NO: 494746 - DNA, 1410 bp, Stenotrophomonas maltophilia
atgaccaccaccacgccggcagaccttcccgccctcctgcacaccctgcgcagcgcctggcaggcccagcgcccgacgctcgaccagcgcgaagccgacctgcgccgcctgcgcgaggcattgaagccgcgcctggacgaaatggcccaggccatcgccgaggacttcgggcatcgcgcccacgttgaatcgaaactggccgatggcatgagtgtgctgtcggccatcgaccacctgcggcgccacctgcggcgctggtcgaagccgcagcgcgtatcggccggctggaagctgtggccggcgcgcgcgcagctgcggccgacaccgctcggcgtggtcggggtgatctcaccgtggaactacccggtcacgctggcattggtgcctttggccaccgccatcgctgcgggcaaccacgtgctgctgaagccgtctgagcacacgccgcgcaccagcgcgttcctggccgatctgctggccagcgtgttcccgcccgatcgggtggcggtggtgcagggcggggcggatgtggccgcagcggtgtcgtcgctgccgctggaccatctgctgttcaccggctcgacggcggttggccgcaaggtgatggccgccgccgctgagcatctggtaccggtcacactggagctgggcggcaagtcgccggcgattgtctgtcgcgatttcccgctggacaaagccgctgcgcggctggccaccggcaagtggttcaacgcgggccagacctgcatcgcgccggattacgtgctgatcgataccgttcgccagcgcgaattcgtacaggcgctgcagcagcaggtgcgcgagcgctatggcgacttcagcgatgccgacgactacacccgcatcatcaatgaaggtcagtaccggcgcctgcagggctatctggcacaggcgcggcaacgcggggtgccggtgattccgttggcgcaggtggatgacgcgcgcgccgaccgcgagcgcctgctggtgccgaccgtggtgctggacccgccggacgacctggacctgatgcgcgaggagatcttcggcccgatccttccggtgcgggcctacccggatctggacgccgcgctgggcgacgtgctgtcccgcgaccggccgctggcgctgtatcccttcagccacgacacggcgacggtggagcgcatccttggccaggtggtgtccggcggggtgacggtgaatgacacgctgctgcacttcgccgccgatggcctgccgtttggcggtgtaggggccagcggcatgggcgcgtaccacggccgcgccgggttcgatgcgatgagcaagcggctgccggtgctgtggcagtcgcgctgggcggccagcgaccggctgcggccgccgtattcgaagattgcggggttgttgaagctgctgcttcggtag

SEQ ID NO: 494747 - DNA, 1665 bp, Stenotrophomonas maltophilia
atgtccagcactgcaccaggcccgcaccatgcggcgggcaccctgaccaagggccacaagaaagtcatcttcgcctcgagcctcggcacggtcttcgagtggtatgacttcttcctgtacggctcgctcgcggccatcatcgccaagcagttcttcagtggcgtcaatgaaaccacgggcatgatcttcgccctgctggcgttcgctgccggcttcttcgtgcgtccgttcggcgcggccttcttcggcagcctcggcgaccgcatcggccgcaagtacaccttcctggtcaccatcctgatcatgggcatctcgaccttcctggtcggcgtgctgcccaactacgcctcgatcggtttcgccgcaccggtgatcctgatcatcctgcgcctggcccagggcctggcgatgggcggcgagtacggcggtgccgccacctacgtggccgagcacgcgccggacgacaagcgcggcctgtacaccagcttcatccagtgcaccgccacgctcggcctgttcctgtcgctgctgatcatcctggcctgccgcatgacgctgggcaacgaggccttcgaagcctggggctggcgcatcccgttcctggtctcgatcctgctgctgggcatttcggtatggatccgcctgcagctgagcgaatcgccgctgttccagcagatgaaggctgaaggcaagggctccaagaccccgttccgcgacagcctgaagggtggcaacctgaagctgatgctgctggtcctgctcggtgcggcggctggccaggcggtggtctggtacggcggccagttctacgcgctgttcttcctcagcagcatgctgaaggtcgatgccaccacctcctacctgctgatcgccgctgcgctggcactgggcacgccgttcttcatcttcttcggctggctgtccgaccgcatcggtcgcaagaagatcatcctggccggctgcctgctggcggccatcacctacatcccgatcttcaagggcctgacccacttcgccaatccggccatcgaagaagcccgcagcagctcgccggccctggtcgtggccgatccggctacctgctcgttccagttcgatccggtcggcctgcgcaagttcaccagctcctgcgacgtggccaccgccgcgctgaccaaggccggtgtgccgtacgacgtgcagcccgccgccgccggttcgctggcgatggtgaacgtgggcagcgccagcgtcacctcgtatgaggccgccggcctgaccaaggaagaaggcaaggccaaggccgatgcgttcggtgcggaactgaagaccgccctgaccaccgccggctacccggccaaggccgatggcgcccgcatcaacatcgccggcaccatcttcatgctgtggctgctggtgctgtacgtgaccatggtctatggcccgatcgccgcctacctggtcgaactgttcccgacccgcatccgctacacctcgatgtcgctgccgtaccacatcggcaacggctggttcggtggcttcctgccggcgatctcgttcgcgctggtggccggtaccggcaacctgtactacggcctgtggtacccgattgcgatcgcactgatgtcggtggtgatcggcggcctgttcctgcgcgaaaccaagaacgtggatatcaccaagtaa

SEQ ID NO: 494748 - DNA, 1428 bp, Stenotrophomonas maltophilia
atgagccaccgtacgttgaaagccgtgcgcacacctttggcggcctgcctgttggtcgccctggtcgcaccgggcatggcgttcgcagagaccgccaaagagaaggcactggaagcacgcgttgccgaactggaacgccaggtccagctgctgctgtcttcgcagcaacaacaacagacccagatcagccagacccagcaggcggtgaccgaagtgcgcacggtgcaggccgggcagaagccggtcgcctcggtgccggcgggcaagcagccgatccaggtcaccaccatcaccccgggcgccgcgccgggtaccacggtcaagatcggcggcttcatcaaggccgacttcctggccacccagaccagcgatggccagctggccgacgacgccaccggccgttcgctgtacctgccgggccagaccccggtggaaggcgccggcggcagcggcaagcgttcgggcaccgacttcaacgcccacgccaagttctcgcgcttcaacctgggcatcgacaacgtgagcgaatcgggcaacaaggccggtgcgttcttcgagatggacttcttcggcaactcgctgggcaaccagaccgccaccaatacctatggcgtgaccctgcgccacgcctacatgtactggaacaactggctggccggccagacctggtccaacttcatggacgcggccgcgctgccggaggcggtcgacttcgtcggccccaccgacggcgtgatcttcgtgcgccaggcccaggtgcgctacacccagggcggcttcagcgtcgcactggaaaacccggaaaccaccaccctcaccggtacccgcaacccggtcaccggggcctggaccaacgccagcgccaactccgaccgtggcagcctgcccgacctgaccatgcgttatggctggaagggcgactggggaaccttcggtgtcggcggcatcgtccgccagttgaaggtcgacaaccaggccaccggcgcgaaggccgacaaggtggccggcggcctgaccctgggcggcaagtgggtgatgggtgacagcgactcgctgcactaccagctgaccggtggcgaaggcatcgcccgctacatcggcctgggcatcaccgccgacagtgcctatgacgtggcccgcgacgagctcaacccgaccggcgtgctggccggctacgtgggctggcggcatgcgttctcgccgaagctgcgcaccaacctgatctacgcgcgcagcgactacgacaacgacagcatcctcggcccgctggtgaccaagagcgtgcagagcatccgcggcaacatcttctattcgccgctgcccaaggtcgatatcggcgccgagctgatgtatggccgtcgcgaagtggaaaacggcaacaagggtgacatcacccggttgcagttcaccacgaagtacagcttctaa

SEQ ID NO: 494749 - DNA, 1944 bp, Stenotrophomonas maltophilia
atggctgatatctaccccgtcgatccgcagttcgccgccaaggcacgcatcgacaagacgtcgtacgaacagcagtaccaggcctcggtgaccgacccggatggtttctggggcaaggccgccgagcgcctgcaatggatgcgcaagccgacgaagatcaagaacgtcagctatgacctgtccgacttccacatcaagtggttcgaagatggcgagctcaatgccagcgtgaactgcctggatcgccagctggaaacgcgcggcgacaagaccgccctgctgttcgagccggacggcccggatgcaccggcccagcacgtgacctatcgcgagctgtacgagcgcacctgccgcctcggcaacgcgctgcgcaacctcggcgtcaagaagggcgaccgggtcaccatctacctgccgatgatcgtcgacgccgcggtggccatgctggcctgtgcgcgcatcggtgcgatccactcggtggtgttcggtggcttcgcgccgaattcgatcgccgaccgcgtcagcgactgccagagcaagctgatcatcaccgccgacgagggcctgcgcggtggccgcaggattccgctgaaggccaacgttgatgccgcgctgaagctgccgggcacgaatacggttgaaaccgtgctggtggtgcgccacaccggcggcgcggtggacatgcaggccccgcgcgaccgctggttccacgatgtggtggacagccagccgtccacctgcgaaccggaacgcatgaacgcggaagacccgctgttcatcctctacacctccggttccaccggcaagcccaagggcgtgctgcacaccaccggcggttacctgctgtacgcggcctacacccatgaagcggtgttcgacctgcgcgaagacgatatctactggtgcaccgccgatgtcggctgggtcaccggccacagctacatcgtgtacgggccgctggccaacggcgcgacctcgctgatgttcgaaggcgtgccgaactacccggacacctcgcgtttctggaacgtcatcgacaagcacaaggtgaccatcttctacaccgccccgaccgcgatccgtgcgctgatgcgcgaaggcgaggagccggtgaagaagacctcgcgcgcgtcgctgcgcctgctcggcagcgtcggcgagccgatcaatccggaagcctggcgctggtactacgaagtggtcggcgacagccgctgcccgatcgtcgatacctggtggcagaccgagaccggcggcatcctgatctcgccgctggccggcgcgatggacctcaagccggggtcggccaccctgcccttcttcggcgtgcagccggcgctggtcaatgccgatggcgagatccaggacggcccgaccgaaggcaacctgatcatccgtgattcttggccgggccagatgcgcacggtgtacggcgaccaccagcgcttcatcgacacctatttccgcacctacccgggcagctacttcaccggcgacggttgccgccgcgacgaggacggctactactggatcactggtcgcgtcgacgacgtgatcaacgtgtccggccaccgcatcggcaccgctgaagtggaaagcgcgctggtctcgcaccccaaggtggccgaagcggccgtggtcggcttcccgcacgacgtgaagggccagggcatctacgcctacgtgacgctggtggccgaagaggcgccgagcgacgagctgcagaaggaactggtcgcctgggtgcgcaaggagatcggcccgatcgccacgccggaccacctgcagtgggcgccgggcctgccgaagacccgctcgggcaagatcatgcgccgcatcctgcgcaagatcgccgagaacgcgccggaccagctcggcgatacctcgaccctggccgacccatcggtggtggcctcgctggtggacgagcgcaaggtgcgctga

SEQ ID NO: 494750 - DNA, 666 bp, Stenotrophomonas maltophilia
atgaccaccctcctgattgccgatgaccacccgctgttccgcgaagccctgcgtggggccgtgcagcgggtcatccccggcgtgcagctgttcgaggccgacagcgtggaagcgctgtatgcactggccgaccagcacaacgacgccgacctggtcctgatggacctcaacatgcccggtgcgcagggtttcaacgcgctggtgcacatgcgctcgctgcacccgcacctgccggtggtggtggtgtccgcgcgcgaagaagccacggtgatgcgccgcgcgctcgaccacggcgcgctgggcttcattccgaagtctgcggattcggacaccatcggccacgcactgggcaccatcctcgatggcgagacctgggcgccgccggaagcgcacaacgtgccgccgaccggcagcgaagaacgcgaagtcggccagcgcctgcgtgagctgaccccgcagcagttccgcgtgctgcagatgctgggcgccgggcgcttgaacaagcagatcgcctacgacctcaacgtctccgaagcgacgatcaaggcccacgtcaccgccatcctgcgcaagctgggcgtgaccaaccgcacccaggccgtgctgatggccggcaagctggccatcgacgacgacgccatcgtgctgccgccggaagaagattga

SEQ ID NO: 494751 - DNA, 576 bp, Stenotrophomonas maltophilia
atgtcccccatttcgatcctcctgatcggctttgccatgtccaccgatgccttcgctgcggcgatcggcaagggtgcggccatgcgcaagccggtgttccgcgatgcactgcgtgccggcatcatcttcggcgtcatcgaggcgatcacgcccatcatcggctggctgctcggtcgcgccgccctgcagtacgtggaagctttcgaccactggatcgcgttcggcctgctcggtgcgctgggcatccacatgatctacaacggcctgcgcccggatagtaccgaggacgacgaggacccctcgcatcaccacggcttctggaagctggcgctgaccggtttcgccaccagcatcgacgcgatggcggtgggtatcggcctggccttcatggacgtccatatcggcgtgatggccgcggtcattggcctgtgcacgctctccatggtcaccgtcggcatcatgctcggccgtgtgctgggcagcatggtcggcaagcgtgccgagatcatcggtggcgtgatcctggtgatcatcggcgcgatgatcctgtacgagcacctgcacggcgtggggtaa

SEQ ID NO: 494752 - DNA, 3447 bp, Stenotrophomonas maltophilia
gtggtctccagctggatcctgctgctggtctcggttgcctatgccgcgctgctgttcggcgtggcgtggtggggcgaccgtcggccgatgtaccccgaccggccgtggctgcggccggtggtctacagcctggcactggccgtgtactgctcgtcgtggaccttctacggcgcggtcggcaccgccgtgcgcaacggcgtgggctacctgcccatctacatcggcccactgctgctgctgctgttcggctggcgcatcatcgagcgcctggcgctgatcgcgcgcagccagaacgtggtctccatcgccgatttcatctcctcgcgcttcggccgttcccggcggctggcggcgctggtggcgatcatcgcgctgatcggcatcattccgtacctggcgctgcagtacaaagcggtggcgatgagcctgcaggtgctgaccggcaacaccggcccgaccggcttcttcaccgatcccgcgctgtacgtggcgctgctgatggcgctgttcgccaccctgttcggtacccgccaggtcgatgccaccgaacaccaccacggcatgatgctggccatcgccttcgaatcggtgatcaagctgctggcaatgctggccgtgggcgtgttcgcctacctgtggctgagcaaccgcaccgacgcggtggtcgagtcggtgcatacgctgttcaccggcctgccgccggtgggcttcatctcgcagacgctgctcagtttcctggccatcatctgcctgccgcgccagttccacgtggccgtggtcgagtgcggcgatgtgcgcgacgtgcgccgcgcgcgctggatgttcggcggctacctggtgctgatctcgggcatggtgctgccgatcgccaccgccggcgtgaccctgttcggcaccggcggcagcgtcgccgacgactcgatggtgctggccctgccgctggccgaaggccgcaatgcgctggcgctgatcgcctacgtgggcggcttttcggcggccaccggcatggtcatcgtgtcgtccatcgcactggccaccatggtcagcaacgacctggtgatgccggtgctgctgcgtcggagcggtgaccaccaggaggccgccgacgtcgcctcgcgcgtgctgtggatccgccgcctggcgatcctgctgctggcgttgatggcctacagctactaccgcaccagcagcaacgacagcaccctggcctcgtacggcctgatggcgttcgcagcggtggcgcagttcgcgcccggcctgatcggcggcctgtactggcgcggtgccagccggcgtggcgtcgaggtgggcatgctgctcggcttcgccacctggctgtacaccctgctgttgccggcgatgaccatggccggctgggtcgatgccgcctgggtgcagcacggcccgttcggcatcgagtggctgcgcccgcagcagctgttcggcatgaccggctgggatccgctgacccatggcacgttctggtcgctgctggtcaatgcggcgacgatgatgctggtgtccgcacgctggcggcccggtgtggacgagcggctgcgcgccgcgccgttcctcgacccgtatgccgagcgcccgtcggtggccggtggctggcccggtcatgtgcacgtgggcgacctgctggcactcgcctcgcgcgtggtcggcgagcgccatgcgcggcgttcgttcttcgagcaggcacagtcgctgggccgcgagctgcaatcctcggcgccggccgaccggccgtgggtgcagttcaccgaacgcctgctggccgcgtcgattggtgcggcctcggcgcgcctgctgctgaccagcctgctgcgtggctcgggcatggacctgggcgaagtggtggcggtgctggacgaagccgggcaggaactgcgcttcaaccgcgagatcctgtcgaccacgctggagaacatcagcgccggggtcagcgtggtcgatccggacatgcgcctgaccgcatggaatcgtcgttaccaggacatgttcggctaccccgacggcatgctctacgtgggccgcccggtggccgacctgatccgctacaacgccgagcgcggcgagctgggcgagggcgatatcgaagtgcagatcaaccgccgcatcggctacatgcgcgccggctcaccgcacgtgttcgagcgcacccgcagcgacggcaaggtgatcgagatgcgcggccaggcgctgcccggcggcggttacgtgaccagctacaacgacatcaccgactacaagcacgcggagaaggcactgctggaagccaacgagacgctggaacagcgcgtggccgagcgctcgcacgaggccgaggtcgcgcagcagtcgaagacccgcttcctggcggcgatcagccatgacgtgctgcagccgctgaatgccgcgcggctgtttgcttcggcgctgcgcgacagcgaccatgtgagcgacgagcagaagcatctggccgaacgcgtggatgcgtcgctgcgcgccgccgaagaactgctcgatggcctgctggacgtgtcgcggctggatgccggtggcctgcacccggtgatcggcgagttcgacgtgagcgcgctgatgcgcgaactggccgcgcagtacacgccggtcgccgccggccgtggcctgcgcctggacctgttcacgcgtccggcctgggtgcgcagtgatcgccgcctgctgcgccgcgtgctgcagaacttcctggccaatgcgctgcgctacacccgtcagggccgcatcgtgctggcggtgcgccagcgtggcaacgaagtggagctgcaggtatgggataccggcccgggcattcccgagcaccacatgcggcagatcttcgacgagttccaccgctaccagcagccgttcgattggggcgaacaggggttgggcctgggcctgtcgatctgccagcgcatctcgcgcctgcttgaccatcgcctcaatgcgcgcagccgggttggcaagggctcgatgttctcgatcatcctgccgcgggtggcgccgctgccgggctataccgaactggccgcgccggtacaggccgcagccgcgccgctgcgcagcgattcgctggccggcctgcgcgtgctgtgcgtggacaacgacgaagagatcctcgacggcatgcgcgcgctgctcggtcgctggcaggtgcaggtgattacggcatcgacggtggatcaggcgctggagaaagtggccgagcggccgcaggtgatgctggtggactaccacctgcacgaccgcatggacggcctggatgcgctggtggcgctgcgtgaagccgccggttacccgctgccgggtgcgttgttgaccgccgatggccgcgacgaactgaagcggatggcacgcgaacgcggctaccgcgtgctgaccaagccgatcaagccggcctcgctgcgcgccttcctgggcgcgctgcgcgatgcgcagtag

SEQ ID NO: 494753 - DNA, 2148 bp, Stenotrophomonas maltophilia
atgtcaccacgcaaagccctccccaccgccctggccctgggcctgaccctcgccaccggcgcccacgccgatgaaggcatgtggatgccgacgcagctgccggacctggcccaaccgctgcaggccgctggcttcaagggcaatccggccgacctggccaacgtcaccgcgccgccgctgagcgccgtggtgcgcgccggtggtggcaccggttcgttcgtgtccgccgacggcctgctgctgaccaaccaccacgtggcgatgggcgtgatccagtacaacagctcgcccgagcacgacctgatcgctggtggcttcatcgccagggaccgtgccgacgagcgcccggccaacccggacttccgcgtgctggtcaccgtcggcttcgacaaggtgaccgaccaggtgctggcgcaggcccgtggcaagaccggctgtgcctacttcgatgccgtggatgcagccagcaagcagatcgtggccgagtgcgagaaggacggcagcgtgcgctgctcggtggccaacatgtactacggcaccgatttctaccgcattgcccagctggaactgagcgacgtgcgcctggtgtatgcgccgccgcgtgcgatcggcaactacggcgatgagatcgacaacttcatgtggccccgccacaccggcgacttcaccctgctgcgcgcctacgtgggcaaggacggcaagccggccgcctacagcaaggacaacgtaccctaccaggcgccggcacacctgcagatgtcggtggaaggcccgaaggaaggcgattacgcgatgctggccggttacccgggcatcacctaccgccaccgcaccgcggccgaattcgccggccagatcgataccgtgctgccgcgccgcgtatcggtgttccagcagatgatcgacaccatcgaggccgccagcgccaaggacgcgcaggcgcgtacccgctacgcctcgcagctgcagtcgctgaagaacaaccgcaagcgcgccgccggcgaactggaaggcctgctgcgcagcgatgcgaaggcccagcgtgccgccgacgagacggccatgctggctgccaccgaccgcaggtaccagggtgacatcaaggcgctgctggccaacctgtcgcagggtgcggcggtgggcgagcgtgacctgctgctggagcagatggccgcgcagagccagctgctgcgctcggcgctgctgctggagcgcctgcgcatcgaatcggccaagccggacgcgcagcgcgagagcggctaccagcagcgcgaccaggcgatgatcgaaggggtgctcaagcaggtccagcgccgttacgcgccggaggtcgagaaggccctgctgaccaccctgctgacccgctaccagcagctgccggacgcgcagcgcgtggccgagttcgacgcggcctttggtcgtaccccacagcagctggccaaggcgctggacaccctgtatgccggtacccagctgggtgaggaagcgcagcgcctgtcgcgctttgccgccgcacgcgaaggcaaggcactggccgccgatccgctgatcagcgtggccggtccgctggtggccgcgcagctgcgcatcgagaacgagagcaagacccgcgaaggcgagcagctgcgcctgcgcccggcgtacatgcaggcgctgttcgcctggcgtgccaagcagggccgcgcggtgtatccggatgccaaccgcaccctgcgcatcagctacggcaaggtcgaggcgctgcacccgcgcgatggcgtgacctactcgccggtgaccaccgtggccggcatcgtcgagaagaacaccaacgcctacccgttcgatgcacccaagccgttgctggcagcgatcgccaagggtgacttcggcagcaccgccgatccgacactgaagacccagacggtcaacttcctgaccaacctggacaccacgggcggcaactccggctcgccggtgctcaacgccaggggcgaactgatcggcctgaacttcgacagcaactgggagtcggtcagcgccagctggtggttcgacccgcgctacaagcgcgccgtgcacgtggacatgcgctacctgcgctggctgctggccaaggtctacccggcgcccgagctgctgaaggaaatgggcgtgccggcccaataa

SEQ ID NO: 494754 - DNA, 1689 bp, Stenotrophomonas maltophilia
atgatcgtcggcatcgatcttggcaccacccattccctcatcggcaggcacacggcagcagggccgcagctgttccccaatgcccatggcgagctgttgaccccttcggtggtcagcctcgtcgatggtgccgtactggtcggccagccggcccgtgaccgcctggtcagccatccgcagcagaccgtggcccatttcaagcgctggatgggcagcgaccgtgagacccggctgggtgagcgcagtttccgtcccgaggagctctcggccatggtgctgcgctcgctgctggccgacgccgaagccgccctgggccacaaggtggaggaagcggtgatcagcgtgccggcctacttctccgacgcccagcgcaaggccacccgggccgccggcgaactggccggcatccgcgtcgagcgcctgatcaatgaacccacggccgctgcgctggcctatggtctgcaggagcgtgacggcgaaggccgcgtgctggtgctggacctgggcggcggcaccttcgacgtctccatcctggaactgttcgatggcgtggtcgaagtgcatgccagcgccggcgacaatttcctgggcggcgaggatttcctgcaggtactcgtgcaggccttccacgccgaccagggcacgtccgccagcgacctgtccgctgccgagcaggcgcagctgctgcgtcggctggaactgttcaagcgcgaactcagccagagcggcactgccagcctgcagttgcccctggccggcagcgaacgccagtggcagctggatgaagcccgctacgcccagctctgcgagccactgctgctgcgcatgcgcgcgcccatcgagcgcgcgatccgcgacgcccggctcaagcccgaggcgctggacgacatcatcctggtcggcggtgcggtacgcatgccgatggtcagcaggcttgcgacccgcatgttcggccggctgccgctgcgccatgtccatccggaccaggcgattgccttgggtgccgccgttgcagcgggattgaaggcgcgcgacgaatcgctgcgcgaagtcgtgctgaccgatgtctgcccctacacgcttggcacgcaggtgtcccgccaggatgctgccggtggcgagcgcagcggctatttccacccgatcatccagcgcaacagcgtggtgccggtcagccgcgaggatcgcttctacccgctgcacgagcggcaaagtgccatccgcatcgacgtgttccagggcgagagcccgacggtggatcgcaacatcaagctcggtgagctgaccgtgccgctgacccattctgtcccgatgcaggaacgcagcgtcaccgcccgcttcacctacgacgtgaacgggctgctgcaggtcgaagtcaccgaggatgccaccggcaggcgccacgagctcatcctggaacagaatcccgggctgctgtcacccgaagagatccagcagcgcctgcgcgcgctggaagcgctgaagatccacccgcgcgacgcccagcccaacctcgcggtgatcgcccgcaccgagcgcctgtacgaggaacgcatccatcaccgtgaacagttgcagtcgtggctgagcagcttccgccatgtgctggagagccaggatgccgttgccgtcgagcgtcatcgccgtcagctggacgaggcactcgacgccctcgagcgcgatgcatga

SEQ ID NO: 494755 - DNA, 1455 bp, Stenotrophomonas maltophilia
atgagctgggcactgcacgtcctggagctggaccaaacggctgacgagcgcgcggtcaagcgcgcctatgcaaagcgcctgcgggtgacgcgacccgacgaggatccggtcgccttccagcacctgcatgaggcctatcaggcggcattggactgggtccgccaggaagcgctggccgatatcgcggacgaagacgaaccggcggagcatgcaaccgacatcgcaccctggccgcccgacgcagacgtggcatgggcgccgcccgaaacgcgttcgtactcgcctccatggccacctcgcggcacgcctgtgctgctgcgcacggcaccagtggcggaactggagggagcggtccacgtatcgggccatgcgcacacgatcctgcgcatggcccatctgtcttcccctgaagacttcggcccctggctggaggccacgccggtgctgtggtcgctgcgctacaagccattggtgggcgacgcgctgctggatgaactggcacgcagtcacaacagcgtcagcgcagccaacatgggtctgctggcacgctgctttggctgggatgatgtacacgatggcgtggatccggacaggctggcatcgatccagtcgcgcggtcatcggcgctgggctgccgaatccggcaatgcggcggagctgtcggcgctgctggaggaggagggcagcctgcggctggggagggtcacccttgcgcgttgcctgcgctacctgtcgcagccatggcacgcgcgacgatccctctggcaggcgcagctgcccgagcacatcattgaggtcaacgcgctgctggatgcgctggaacgcggcggccaggagccattgcccgccgcctgggatcggcagcaggtgcagttctggcgcagccttgccgacgtttcccgtcccaaccgctggcgttgccaggtcaatgcgctgcggggcggcctgttggctgccctgacgctcgcgattgccggtggctcgactctcatgagtcttgcccagcgtgacctgcgcaccgccgccgcgctcggcataggcggcgtgctgctcggggtcctgctcgccctggccggcgctctgtgggtccatgtccgttgggcgctgcgccagctgacgctggatctgcccccttcgcgctggggatggctgctggcgttgccagcgccgctgatcgccctcgccagcctgatcctggtccatggcctggatctgcggctggaaggtacgttgctgctgttccctggccttgctctggcgacggcacgctggatccggcgcgaggatggccggggattccggccgcgcaacctgattggaccgggcatcggcatgttcgtccccgaagtgggctgcgccctggtcctgctgctatggaccacctggttcctgcgtgacaggtgccgtcgcctgtcgatcgacctgcctccacctgcttctggaaacaccgtgtga

SEQ ID NO: 494756 - DNA, 1248 bp, Stenotrophomonas maltophilia
gtgaaccgggcactggacgctctcgggctcgacgccagcgccgacgaaaaggcgatcaagcgcgcctacgcgcagagactgcgcgcggcacgcccggacgaagacccggtggcattccaggcgctgcacgaggcttaccagcaggccctgctgtgggcacgcagccgcacgcaatggcaggaggaaagcagtgcagaagcgctgtcgacgccacctgcagacaacagcccacccggcccaccggcgccgtacgacagccattcgccgatggaccacatgccggtgctgcatcatccatgcacgcccgacatcgacatgccggacgatgtggtggagccatcattgaacctgccccggtttgcgcgcctgctgatcaacaccgccggcgacgccgacccggccagcttcgagcactggctggcccatcgcccggagctgtggtcattggccgacaggccgcgtatcggtgacgtggtactgcagcagctgctgcaccagggccagccgctgtgcgagtccaacttcgatctgctgggtcgatacttctgctgggatgagatccgggctgatatcgatccctaccgggtccgcgcacggcgcaacctgctgcatcgccgctggcagctgcagccgcgcaaccacacggccctcaccgcagccctggaccaaccgcatgaccgggtgtccgtaaccgaggcccatgcccgcatggaacgcttgacccgaccgtggcactggctgcaatcgctgctgtcggccagcgtgcccgggcgtgctggcatcatgcggcaaacgatgcagcgtctgggagtgcatggtgtccgtgacacgctggcgccactggacacggatcaggtcgccttctggatggcggtatcccaacccgggcacttcaatctcatgaagatgcaggtggccattgtccgctgcctgctgggcgctctcgtcgtgctggccgttctggcggcgctggcattgctcggtgatgccgctcgccctatcgcgatcagcacgtccagcatgaaacacgtggcaatccatgcctcggtggtcatcgtgtctggcgtcctcatgctgacgcctttcgttggaggcaccccatcgcggacggcgtccgcgccagcgcccgtcgagccaccgtcggcgcttgatgggcacggcatgctcacgcacgggcctcgtccgcgcaggccagccccctgcttcgccgttgtcagccagaccgatcccgacacagagggtggttga

SEQ ID NO: 494757 - DNA, 3858 bp, Stenotrophomonas maltophilia
gtgagcacgcccgcacccaccccgaacacgccgccgccgcgcgtgcgcttctaccgacgccgccgcttctgggcctggtccggcgtcggcgtgatcggcgtggtgctgctggccctgctggcggtgtactggctgctgcagaccgtggccggccgcgatgtgctgctggcccaggtggtggcgcggctgccggtgggcgccagcttcacctgggacaaggtggaaggcccggtagccggtccgctgaccctgtacaacgtcgacttccgctacgacgacatccacttccacgccgagcgtgcgcacctggagccggacctgcgcccgctgctgggccgcaagctgctgctggacaagctggagctgaccaacgcgacgttgaacctggccaagagtgacgagccgttcaagctgccgtcgtggcccgattcgctgccgcagatcgaaatgccgctggcgatccaggccgatgccatcgccatcgacggcttccgcatcagccaggccaacgaaccggtgatcgacatcagccgggtgcgcggcggcatcgagatcgccaatggcgagttccaggcgcacaaactggtggtggacagcgacatgggcaatttcaccgcccagggccgttacattccggccgaggactacgacaccgatgtgacggtgacggcggtgctgccagcaccgcgtgggcgcaccgccgctacggtgggcctggtcgcacgtggcgacctgtcgcacatggaagtggccgtagccgggcgcgcgccgaagccgctgcacgcgatgctggtgttcgatggccgcaccgacccgagctggagcgcccgcatccgcagcgacgagctggatctggcgctgttgtcgccagcattggcgagctcggcgattgcgccgttgtcgctggacttcaccgccgccggcaagggcggcaatgccaacctgcgcggcagggtgaagcagggcgaccaggagctggaactggcaccgtcggtggtgtcgctgcaggaccaggtgctgaaggtctcaccgctgctggtgaagggcctcggtggcgaagcgcggctggaaggcaccgccgacttcagccaggacgatcagcagaaactcaatttctcggtggtcgcacgcgatctgacctacgtgccggcacccgacccgaacacggctggcagcgcaccggtgccggtcaccctgaaggaagcacgcttcggcctggccggtaccctgaaggcctgggcggctatcggccgtgccgagatcgaacgcgaggcgcagaaggcgcagctgcagttcgacgtacgcggcaatgaccaggccgcgtcgatccaccagctgcaggcgcagacgccgggtgggcagctgcaggtggaaggccaggtggcctgggcgccgcagctggactgggacgccaaggccacgctgaaggacttcgaccccggctatttcgtgccgggctggaacggccgcctgtccggcaacctggcctccaagggccgtcagctgccgccgccggccaatgccgcaccgggcacggccggcacgctggaagccaccgtcgacctgccgtcgctgaagggcatcctgcgccagcgcaaccttgatgcacagggcaagttcgcgctgcagggcgcgcagggccagggtgacctgaagctgtcgctgggcagcagccgggtgaccgcgtcgggcaaggtcggcgaccgcctcgacatcgatgcacgtttcgaaccgctgcagctgagtgacctgctgccgggcgccgacggcggcctgcgcggccaggtgcaggtgaaggggccgcgcgatgcgccggacatcaccgccgacctggtcggcaacaatctcaactgggagggctacggcgccgagagcgtgagcatcaagggccacctgccgtggcgcggcgacagcggcacgctggcggtgcagggccagcaggtcaacgccggcatgctgctggagcgcttgaacgtggatgcgcagggcagtgtgtccaacctgcgcctggctgcgcagacccgcaatgagatgggcgcgatcgagctgcagggcagcgtgcgccagcagggggcgcagtggcgtggcgagctggcctcgctgcgcatcgcaccggtgaagggtgatgcgtggtcgctgcgtgcaccggcggcgttcgcgatcaacggcagcacctacaccctgtccgaagcctgcctggccgccgccagcagcggcgcgctgtgcgcacaggccaactggccgcgagaaggcctggtggtgcgcagtgacgcgctgccgctggcgctggtgcagccgtggctgccgccgcagtccggccgccgcatctacctgcgcggcgacgtcagcctggacgcgcagatccgcccgcgcggcgcggcctgggaaggccatgtggaagtgcgctcgaaggaaggcggcgtgcgcctgggcgagaaccgcaacaccgtgggcgataccacccgcggcgagctggtgcgctatgaccagttctcgctgaagctcgacatgaccccagccagcatcaagggctacctgggcatgggcttccagggcaatggcttcgtcgacgcgaagatgcagaccggctgggaagccagtgcaccgctgaacggtgagctctacctcaacatgtcgcggctgtactggctggagctgttctcgccggacatcgtgcgcccgaccggcctgatcgaaggccacgtcagcctgcgcggtacgcgcgggcagccgtcgctgggcggcgacgcgcagctgagcaacttcaagggcgaattccccgcgcttggcctgaccttcgaccagggcaagggcagcttcgtggcccagcccgacggctcggccaagatcaccgcgcaggccaactcgggccagggcacgctgtatgtcgacggcggcctgtcgtggttcggtgatgcacagccgctgcagctgaagatccacggcgagaacgtgctgctgtccaacaccagcgagctgcgcatcgtcgccaaccccaacctcgacttcacgttggccaaggcggcgatggagctgcgtggcaccgtgcacgtgcccgaggccgacatcgacctggagcgcctggaccgtggcacctcggtgtccgaagacgtggtggtgctggacccggccgatccggaagagtcgcgcacctcgccgctggacatggacctgacggtcagcctcggcgacaaggtgaagatgaccgggttcggcctgaagggcgcgctgaccggcaagatgcaggtctgggccaagcccggccgtgaaatgaccgccaatggcggcctggaagtgagcggccgctacaaggcgtatgggcaggacctgaccatcacccgcggcaacctcacctggaactacaacgcggtgtccgacccgcgcatcaacatccgcgccgagcgccggatcggtgatgtcaccgccggcatcgacgtgaccgggcgtgcgcagcagccgcgcgcggacgtgtggtccgatccggcaatgtcgcagtccgaggcactggcctatctggtgctgggacgcagcctgaccggtgccagcagcgaccaggcgcagcaggtcaacgcggcctcggcggcgctctcggcgggcagcggcctgctggcttcgcagctgggcgccaagctgggcctggacgacgccggcgtgagccagtcgcgcgcgctgggcggctcggtgatcggtgtcggcaagtacatctcgcccaagctgtacgtcggctacggcgtgtcgctggtcggtgccggttcggtgatcacgctgaagtacctgctgcgccgcgggttcgacgtggaagtggagtcgagcaccgtggaaaaccgcgggtcgatcaactggcggcgggagaagtaa

SEQ ID NO: 494758 - DNA, 1797 bp, Stenotrophomonas maltophilia
atgctgtcccgcatgcagccaaagaaatacgccctgccgctgatggtcctgtcgttggccgccacttccgtggtccacgcgcgcggcaccatcgacaaggtggacatcaagggattggacaagggcgacgacgccgcaatcatcgagaacatccaggaatcgctgtcgctgtacgacacgatcggcaaggaacagggcgaatcgcgcctggaatacctgctgtcacaggccgagcggcagacccgccaggcactggaaccgttcgggtactacaacccggtgatcaaggtcgaggcaccgcgcgaggacgaacacgtgcgtgtgctgatccatgtcgacaagggcactccggtgaccgtgcgccgcgagcacatcgacatcaccggcccggcgatgtacgaccagtacctgcaggatgacctggccgcgttcaagccgcgcaagggccagcgcttcgagcacacccagtacgaagccagcaagatcaccatcacccggcgcctggccgagcgcggctacttcgacgccgactacacccagcgccaggtgcagatcacccgcgccgacaacgccgccgacatcgacctgacctgggacagcggccgccgctacaacatgggcccggtgcgcttccagcaggactacttcgtcgacaagctgttcgatccactggtctactgggaccagggcagctactaccacgagggcaagctggaccggctgcgcgagtcgctgaccaagctggactacttcagcgtgatcgacatccagccgcgcccggaccaggccgacgagaacggcgaagtgccggtggacgtgaagctgacgcgcgccaagcgcaccatctataccgccggcctgagctacggcagcgagagcggcccgggtgtacgcggtggcatcgagcggcgcttcctgaacaaccgcggccacaagatgaacacgcagctggactatgcgcagaagcgcaagagtctggtgaccagttaccgcatccccgccttcaactggcttgacggctggtacaccttcgccgccagtgcgtatgacgagcagaccgattacatcgacctgcgcaacttcaagctgatcgccagccgcagcggcgagatcaacgaacactggaccgcgatcgcctcgatcaacgcactgcgcgagcgttggcgctatgcctccggcactgaattcaccgatgccgtctacaacacctcgacgctggtgtacccgcagatggttgccgactacgtcaacgtcgacgacgagatgttcccgcgcaagggcatcagcggtactgcgacaatgcgcgccggcgttgaaggtgccggctcggacaccagcttcgtgcaggccaacgccgtgctgcgctggtacatcccggtgggtgaaagcaaccgcctgatcctgcgcggtgaggggggtaccacctggaccagcgatctggtggcgatgccgccgagcctgcgctacttcgcgggcggtgaccgcagcatccgcggttacgcctaccgcgaagtcggcccgcgcacacccaaacccgacaaatacgcgctgggcgccaagaacctggtgatcggctcggccgagtacgagcactacttcaatggcggcccgtggggcgcggcggtgttcgtcgataccggcagcgccttcgacaacaccattgacctgcacaccggcgtcggcttcggcgtgcgctggaaatcgccggtgggcccggtgcgcgtggatatcgcgcatggcctgaacaacccggattcgcagttccagctttacctcaacatcggagcggacctgtga

SEQ ID NO: 494759 - DNA, 2076 bp, Stenotrophomonas maltophilia
atgagccaactgtcccccctgctgatcgaactgggcaccgaggagctgccggtcaaggcgctgccgggcctggcccaggcgttcttcgacggtgttgtcgaaggcctgcgcacgcgcggcatcgcgctggaactgggtgatgcacgcccgctgtcgaccccgcgccgcctggccgtgctgctgccgggtgtgggcctggaacagccggaacagcacagcgaagtgctgggcccgtacctgaacatcgcactggacgccgaagggcagccgaccaaggcgttgcagggcttcgccgccaaggccgggatcgactggaccgcgctggagaagaccaccgacaacaagggtgagcgcttcgtgcaccgcgcggtgaccccgggcgcgagcactgccagcctgctgccggagattctgcgcgaggcaatcgtggcaatgccgattcccaagccgatgcgctggggcgaccacgcctggggcttcgcgcgcccggcgcactggctggtgctgttgcacggcgccaacgtggtcgaggccgaactgttcggcctgcaggccggccgcgtcagccgtggccaccgcttccaccacgaccagaccgtgtcgctggcgcagccgcaggactacgttgaagccctgcgcgctgcgttcgtgctggtcgacccgcgcgagcgccgtgcgcgcatcgtcgccgaggtcgaggccgccgcggccagggccggtggcagcgcccgcatcaccgacgacaacctggagcaggtggtgaacctggtcgagtggccgtcggcggtgctgtgcagcttcgaacgcgcgttcctggcagtgccgcaggaagcgctgatcgaaacgatggagatcaaccagaagttcttcccggtgctggatgccgcaggcacgctgaccgagaagttcatcggcatcgccaacatcgaatcgaaggacgtggccgaagtggccaagggctacgagcgggtgatccgcccgcgctttgccgacgccaagttcttcttcgacgaggacctgaagcagggcctggcgtcgatgggcgacggcctgaagacggtgacctaccaggccaagctgggcagcgtggccgacaaggtggcgcgcgtggccgccctggccgaagtgatcgcaccccaggtgggtgccgatgccgtgcaggccaggcgggctgccgaattggccaagaacgacctgcagtcgcgcatggtcaacgagttcccggagctgcagggcatcgccggccgccactacgccgtggccggtggcgaatcgaccgaggtggcgctggccatcgacgaggcctaccagccgcgcttcggcggtgatgacatcgcgctgtcgccgctgggcaaggtgctggccatcgccgaacgcgtcgacacgctggccggtggtttcgccgcgggcctgaagccgaccggcaacaaggacccgttcgcgctgcgccgcaatgcgctgggcctggcccgcacgatcatcgaaagcggcttcgagctggacctgcgcgcgctgctggccagcgccaacgccggcctggccgcgcgcaacgtgcaggccgatgtcggcgagctgtacgacttcattctcgaccgcctgaagggctattacggcgacaagggcgtgccggccacgcacttcaacgcggtggccgaactgaagccggcctcgctgtacgacttcgaccgccgcctggatgcgatcggcaccttcgccgcactgccggaagccgaagcactggctgcggccaacaagcgcatccgcaacatcctgcgcaaggccgagggcgacattccggcgcagatcgacccggcgctgctgcaggaagacgccgagcgcgcgctggccgaagcggtcaccgccgccatcgacgacaccggcgccagcctgcaccagaaggactacgtggccgtgctggcacgcctggcgcgcctgcgcccgcaggtcgacgcgttcttcgacggggtgatggtcaatgcggacgatctggcgctgcgaggcaaccgcctggcgctgctgacgatgctgggcgagcgcctgggcaaggtcgcggcgatcgagcatctgtcgagctga

SEQ ID NO: 494760 - DNA, 912 bp, Stenotrophomonas maltophilia
atgtccgcgaccccgaccgttccgatcaccttccagggcctgatccagaccctgaaccagttctgggcccagcagggctgcgtgctcatccagccgctcgacctggaggtgggcgccggtaccttccacccggccaccttcctgcgtgcgatcggtccggaacgctggaacgcggcctacgtgcagccgtcgcgccgcccgaccgacggccgctacggcgagaacccgaaccgcctgcagcgctactaccagtaccaggtggcgatgaagccggcgccggacaacatccagcagctgtacctggattcgctgaaggcgctgggcatcgacccgctggtgcacgacctgcgtttcgtcgaggacaactgggaatcgccgacgctgggcgcctggggcctgggctgggaagtctggctcaacggcatggaagtgacccagttcacctacttccagcaggccggtggcctggagtgccgcccggtgctgggcgagatcacctacggtctcgaacgcctgtgcatgtacctgcagaactgcgacaacgtctacgacctggtctggacctacggcccggacgggcaaccggtgacctatggcgacgtctaccaccagaacgaagtcgagcagagcacctacaacttcgaatacgccgacgtggacgaaatgttccaccgcttcgatgcctgcgagcgtgaagcgcagaagctggtcgaggtgggcctgccgctgccggcctacgagcaggtgatgaaggccagccacaccttcaacctgctcgatgcacgccgcgcgatcagcgtgaccgagcgccagcgctacatcctgcgcgtgcgcgcgctggcccaggcggtggccaaggcgtactacgagcagcgcgagaagctgggcttcccgggcgcgaagaaggcctga

SEQ ID NO: 494761 - DNA, 1836 bp, Stenotrophomonas maltophilia
atggaacatcggctgccggtgggcacgcccggcgagccaggcgacatcccgctgccgtggggccgcctgcatttcgaacaggtctgcgcagcgctgctggccgatggcctggtggccgagcacgacgtcgagcgcatgcggttttccgcacagggcgcgcgcaacgccagtgaagtgcacccgctggtgttgctgtccaacctcaagctggccgcccgcgacggtggcgaactgaccctggaacgcctgaccgaatggctggcccggcgcaccggcagccgctacctgcgcatcgatccgacccgggtcgacgtcgctgcggttaccgcgctggtctcccatgcctacgcccgccgccaccgcttcctgccgctggcggtggatgccgaacgggtgctggtggccaccagcgagccgctggtgcaggagtggcgccgcgacctgcagcacctgacccgccgcagcatcgagctggcggtggtcaatccgctcgacctgcaccgctacaccatggagttctacggggtgacccgctcggtgcgtggcgcgcgcggcgatgtccgcggcgaagccagcaccaccctgcccagcttcgagcagctggtcgagctgggccgtaccggcgacgtcaatgccgacgaccagcacatcgtgcacatcgtcgactggctgctgcaatatgcctacgaacagcgcgcctcggacatccacctggaaccgcgccgcgagatggggcgcatgcgcttccgcatcgatggcgtgctgcacaaggtcttcgaggtgccaccggcggtgatgaccgccgtggtcagccgcatcaaggtgctcggccgcatggacctggccgaacgccggcgcccgcaggacggccgcatcaagacccgctcgccgggcggccgcgaggtcgagatgcgcctgtcgaccatgcccaccgccttcggcgagaagtgcgtgatgcgcatcttcgacccggatgccgccttcaagagcatcgaccagctgggtttcagtccgcaggaggccgccggctggaatgcactggtcgaacgcccgcacggcatcgtgctggtcaccggcccgaccggctcaggcaagaccaccaccctgtattccacgctgaagcggctggccacgccggacgtgaacgtgtgcaccgtggaggacccgatcgagatgatcgcgcccgagttcaaccagatgcaggtgcaggccaacatcgacctggacttcgccagcggcgtgcgcaccctgctgcggcaggacccggacatcatcatgatcggcgagatccgcgatctggaaaccgcgcagatggcggtgcaggcctcgctgaccggccatctggtgctgtccacgctacataccaacgacgcgccgtcggcggtcacccgcctgctcgacctgggcgtgccgcactacctgctggccagcaccctcaacggcatcctcgcccagcgcctggtgcgcaccctgtgcccgcactgcaagcagccgcacacccttggtgctgccgactgggcggtgctggctgatagccaagctgcatatccagatgccgccacgccctgtcggccggttggttgcctggagtgccggcgcaccggattcctcggccgcatcggcctgtatgagttgctgccattgggctcgcggctgcgtgggcagatccgcgccgacatggatctggccggtttcacccgtgccgcgcgggctgaagggctgcgaaccctgcgccaggccgggcttgaaaaggtggcgcaggggctgactacaatcgaggaagtcctgtcagtcctgccgcccccggatgaacccagccccgttcctgatccttga

SEQ ID NO: 494762 - DNA, 747 bp, Stenotrophomonas maltophilia
atgaacccagccccgttcctgatccttgaaaccggccgcccggtgccgtcgctgcgccgctacgggcgcttcccgcactggatccgggtggccgccgggctggaagagcacgagacggtggtggtcgatgtcgaacacggggatgccctgcccgacccgcatgccttcgccggcgtgctggtgaccggctcggccgccttcgtcaccgaccacgccgaatggagtgagcgcagtgccgcatggctgcgccaggccgcccacgacgacttgcccgtgttcggtatctgctacgggcaccagctgctggcgcacgcgctgggtggcgaggtggcctacaacccggccgggcgcgagtcgggcacgatcgaactggagctgcagccgcaggccgcgcaggacccgctgttccagggcctgccgcagcacttcgccgcccacgccacccacctgcagaccgtgttgcgcgcgcctgacggtgccgaagtactggcacgctcgccgctggatggctgccatgccttccgctgggggcgccaggcctggggcgtgcagttccaccccgagttcgccacccaccacatgcgcggctacgtgcgtgcccgtgccgactgcatcggccgccatggcggctgtgcccgcagcatcgagcgcgcggtcagcgccgcaccgctggcgcgccagctgctgcgccgcttcgttcgccaggcgcggctgtcttcagcccagccggcggcaaaacagggataa

SEQ ID NO: 494763 - DNA, 912 bp, Stenotrophomonas maltophilia
atgaaagagattcgcaagctgccggcctcggcgggcgcccagtggttgctggatacgttctcgctgtatcggcgtgcgccgctgcagctggcccggatcggtctgacctggctgctggtgagctgggtggtcaccctgttgtcgacgctgattcccggcgctgccggcatggccgtgcagctgatgaccctggccatctcgccgatcatgttcggcggcatgctgtacgccgtgggtgagatcgacgaaggtcgcccgggcctggcctcgcacctgctgcagccgatccgcgaccaccgcgtcagccacctgctggtgccgctggcgatccaggtgctggcggtgctgctgctgggcgcgctgctcttcctgatgatcggccgcgaaggcttcaccgccttcagcgaggtcatgaccaagatggaagagatcagccgcagtggccagcagatcaagccggacgatgccgcggcgctggtggccaacctgccggccaagcgcatcgcactgtggatgctgctggtgttcctgagcgcggtcgcactgtcgctggcaatgttcacccagccggcgctggtggtgttcgacaagcagagcggcatgcacgcgctgcgcctgagcctgcagggctgcatcgagaacatcggcgcgatgatcgtgttcgccgtgctcggcctgatcgccgcgttctgcatctacatcctgttcgtgatcgtgatccagatcgcgatgctgatcggcggcccgctggccgccgccttcatcgcccagctggtgctgaccacggtgctgatgccgctgtatgtcggcgcggtctacgccgcgtggaagcagatgttcgtgcaccgtggcagccgcgccgcaccgccgatcccgaccacgccgacctcgagcgacatcttccacgcctga

SEQ ID NO: 494764 - DNA, 750 bp, Stenotrophomonas maltophilia
atgagtgaacaggatttcggcgagagctcgctggtcgaacatctggtggaactgcgcggccgcctggtgcgcgcattgctgggcctgggcgtggtgctgctggcgctgctgccgttcacccagaagctgtacaacgcgttggccgagccgctggtctcgcagctgccgaacgggcagacgatgattgccaccaatccggccggcgccttcttcgcgccgttgaagctgaccttcttcgttgccctgttcgtggcggtgccgtggctgctgtaccagctgtgggccttcgtcgcgcccggcctgtatgcgcgcgagaagcgcctggcggtgccgctgctggtgtcctcggtgctgctgttctacaccggctgtgcctttgcctacttcctggtgctgccggcggtgttccacttcctcaccaccttcagcccggacgtgattgcgatcaccccggatgcaaatgcctacctggatttcgtgctggcgatcttcttcgccttcggcggcagcttcgaactgccggtggcgatggtgatcctggtgctgctgggctgggtgacgccgcagcagttcaaggaaggccgcggctacgcgatcgtcggcatcttcgtgctggcggcggtgctgaccccgccggacgtggtttcgcagctgatgctggcgatcccgatgtgcctgctctatgagctgggcatccacgccgcacgctggctggtgccgtcgtcggcagtcaagaagcccgccgcctga

SEQ ID NO: 494765 - DNA, 459 bp, Stenotrophomonas maltophilia
gtgtttgatatcggcttcagcgaactgctggtgatcgccgtggtcgccctggtggtgctcggtcccgagcgcctgcccaaggcggcccgctttgccggcctgtgggtgcgtcgcgcccgcaatcaatgggattcggtgaaacaggaactggagcgcgaactgcaggccgaggagatcaagcggcagatgcaggacgttcgccagggcatgcaggacaccgagaaccagctgcgtgccagcggcgaagcgatccgtcgcgaagcgcaggaggcgcagcagcagggcgatacgctggcgcaggaggtacgcgcaccggcgcctgcggatctgccgccgcatatgagcggcctgacccgtgccgatgcaccggtacaggagggcgtcgctcccgagccgacgccggcgacaccccctgaagccggtgcgccgccgccgccgcgcacggagcgccagccatga

SEQ ID NO: 494766 - DNA, 267 bp, Stenotrophomonas maltophilia
atgctcgacagcctgatcactaacgtaacgagcgtctttatgggcagtttcagcatctggcattggttggtcgtgctggccatcgtcctgctggtgttcggcaccaagcgcctgaccagtggcgccaaggacctcggttcggcggtcaaggaattcaagaagggcatgcgcgacgacgacaagccgaacgcgcagctgggcgacgagtcgcgcagccaggacgcctcgcgcaccgcgcaggacgagcacgaccgcacccctcgctga

SEQ ID NO: 494767 - DNA, 900 bp, Stenotrophomonas maltophilia
atgcgtcgcccgatccaagccctgctgatcgccgccagcctgctgtccagccaggccatggccggaccgcaggaagaccagcgcgcccgcaatgccgtgcgggtgctggcggagatccaggaaatccctgaacagggaattccggacaagttgctcgacgaaggccgcgcggtcatcgtcattcccgacacgatcaaggccggcctggtcattggcggtcgtcgcggccacgggctgatgtcggtgcgcatgcccaatggcgcctggtccagcccggtattcgtcaagctgaccggtggcagcatcggcttccaggccggcgtccagtcttccgacgtagtgctggtgttccgcaacgaccgcagcctggacaacctggtcaatggcaagttcacgcttggcgccgatgccggcgttgccgccggtccggtcggccgcaatgccgccgccgccaccgacggccagctgaaggccgagatctggtcgtggtcgcgcgcgcgcggcctgttcgccggtgttgcgctggatggcgcggtgctgcagatcgacgatgccgccaaccttgacgcctacggcagcaacaccacgccgcgcatgatcttcgaaggtcgcgccgtcggttcgccgtcgatggacgtggtcgccttccgtgatcgtctggaagaggccacctacgccgcccgcaacaaccgcaacggcaacggtggcaatgcgccgcgcccggcgccggccccggctgccgcccctgtgcctgcgcctgttcaggcagcaccggcggccccggccgaagccaccaccgcgccgctgcagaacgttccgcagaacccgccgccgcagcagcagggcttccagccggtcaacgacggcgaaatccgcacggaaacgctgggcggaaactga

SEQ ID NO: 494768 - DNA, 972 bp, Stenotrophomonas maltophilia
atgcaccccatgctcgacgcacccgataccgccgtgctggcggtcaacctaggcacgcccgatacgccgacggcccccgccgtacgccgttacctggccgaattcctgtccgaccgccgcgtggtcgcgatcccgccactgctgtggcagccgctgctgcgcggactgatcctgccgctgcgcagcagtcgttcggcggccaagtacgcccaggtctggctgccggatggctcaccgctgatggtccatacccggcagctggcgcaggcgatgcaggccctgctgccaaccctgaaagtgcgccacgcaatgcgctatggcgaaccggccctggcccacgagctcgaccgcctcgccgccgaaggcgcacgccgcatcgtggtgctgccgctgtacccgcagtactccaccaccaccaccgcctcggtcgaggaccgcgtcgacgcctggcagcggcgcaacccgggcgtgaccgtcagtctggtacgcgactactcggtcgacccgggctgggtcgaggccgttgccggctcgatccgccgctactgggaacagcacggccgcagccagaaactgatgttctccttccacggcatcccgcagcgcctggccgacgcgggtgatccgtatccgcagcgctgcgaggccagcgcgcaggccatcgccaacgcgctgggcctgggcaaggacgactggcagatgggttaccagtcgcgcttcggccgcgagcgctggctgcagccttacgctgagccgagcctgtgggcgttggccgaatccggtgtgaagcagatcgacgtggtctgccccggcttcgccaccgattgcctggaaacgctggaagaagtcgcgatgggcttcaccgaaacgctggccgaacgtggcgcgacgatgcgctacatcccctgcctcaatgccgaaccggaacacgcgcgcgccctggcacgactggccgtggcctcgctggcatga

SEQ ID NO: 494769 - DNA, 855 bp, Stenotrophomonas maltophilia
atgagtctgcaaccctttgaactcgaggtgggcggcacccgcgtcgccggcctgcgcaacagcggcgacggcccgcgcgtgctggccctgcatggctggctcgacaatgccgccagcttcgtgccgctggcgccgcacctggcgtcgctgcagctggtggcgatcgacctgcccggccatggccacagcgcgcacctgccggccggtgccagctacaccacggcggccgcgatctgccacgtgcttgatgtggccgacgccctgggctgggaccgcttcagcctgctcggccattcgatgggcgccggcatcgccagcctcaccgcctcggtcagcgaccgcttcgagcgcctggtggcgatcgaagctctcggcggcctgcgcggccccgaagaagagaccgcccatcgcctgcgcgagcacgtgaacgcaacccgtgcgttggcgcgcaagcagctgcgcgtgttccccgacctggccgcgccgatccgcgcacggatgatgaccaaccagctcagcgaaccgtgcgcacgactgctggtcgagcgcggcgtggaaccggtcgaaggcgggtatcgctggtgcagcgatccgcgcctgatgctgcccaccgcgatccgcctcagcgagggccagatcgacaacctgctgcaggccatcgcctgcccgacacaggtgatctatgccacgccggcgcagtcgtattatcccgagccgatgcgcagcgatcgcctgcagcacctgcgggatggccggctggcagtgtttcccggcaaccatcacctgcacatggaagatccggaacagatcgcaggcgtgatcctgcacttcttcagcaacgacaacgccggctga

SEQ ID NO: 494770 - DNA, 2106 bp, Stenotrophomonas maltophilia
atgtccattgcatccgcccgtccccccgataccgcccgcctgtcgcacctgcaacagctcgcccgcggtgctgaccgccgcctgctgaccggcagcgcggcactggccgtgaccgggctggtgctggccctgcgcggtccgcacggtgtggccgccgcgttggccgcgggcgctgtgctgcccgccttgtggctggccggtccgctggcaggccgcggcatcgcccgcaacgccctggcaatcctggtggcgctgcagctggccctgttgtccgcgatcaccggcctgtcgccggcgttgccgatcgccctgctgctgggcgtgctgctggaccatcgcgatcgtctgccggtgtggctggccggtagcatcggcacgcttgcactgctggccccgctgccggccggtgctgcggtggggccggcgctgctgcaggccgcgatgctggccggcctgaccctgttccttggccaggtcgcactgcggctccgccagcagaccgaagcactcggccacggtccccgccggctggccgcgctggcgcgcgacatcgccaccggcgccgatcttggtgcacatgctgacaccaccgcctacgcaccgggttcgctggcccatgcgctggccgacaccgcacgccatgtgcaggcccagcgtggacgcgaagcggaggcacacgccgagaacgcgcagatccgccaggccctcgatgcctcgcgcaccgcgatgatgattgccgacaacgatcacgtgatccgctacgtgaaccgctcggtggtggccctgctgcgcaaccagcaggcaacgttgcgccaggccttccccgatttcgatgccgagcgcctggtcggtagcagcattcatcgcttccacgccaacccggaccggatccgcgccatcctcaatggcctgcaggtcagccacaacggcaaggtacagatcggcccggtgcacttcgcacaggtggttactccggtcttcgacgcacagggcgtgcgcctgggctttgccgtggagtggcatgaccgtacccatgagctcgccttggagaacgccgtcgccggcatcgtcgcggccgccgccgccggcgacctcgaccagcgcctgcaggcaaccgaaggtgccagcttcctcgatggcctcaccggtggcatcaaccagctgctggatacgttgggcagtacggttgacgaggtgcggcagatgctctcggcgctggccagcggcgatctcgatcgacgcatgcatggcgagtatcacggcgcctttgccgcgatccagcgcgatgccaacgccaccgccggccagctggcgcgcatggtgggccgtatccagcagtgcgcgtcctcgatcagcaccgctgccagcgaaatcgctgcgggcaatggcgcgctgtccgagcgcagcgagcgccaggcagcgcacctgcaggaaaccgccgcttcgatggaagagctgactgccaccgtgcgccagaacgctgcccatgcgcgcgaggcgagccagctggcgatcaccacccagagcgccgccagcgacggcaacgtcgccatgcagcgggtcgtcgacaccatgcaggcgatcgagggagcctcgaagcggatcggcgacatcactggcgtgatcgatggcatcgccttccagaccaatatcctcgcgctcaacgcggcagtggaggccgcccgtgccggcgagcagggccgtggcttcgcggtggtggccagcgaggtgcgcgtgctggcgcagcgctccgccgctgcggctcaagaaatcaagaagctgatcgatgaggcaggtcgccaggtgggcgaaggcgcccagctggtggccgatgcgggccagcggatgcagggcattgtcgggggcgttgagaatgtcagccacctgatgcacgagatctcggcggcctcgcaggagcagtcggtcggcatcgagcagatcaaccagaccgtggtgcagatggaccaggcgacgcagcagaatgccgcgcttgtggaggaagccaccgcggccgcacgcgagctgcaattgcaggcgggtacgcttaccgaggcggtatcggtgttccgccagcaggaaccgcacgaggtctcgcgggccgcctga

SEQ ID NO: 494771 - DNA, 2040 bp, Stenotrophomonas maltophilia
atgaacaacgagatcgatgccggcgccaagtccgagcgcaacaccgcctacctcaacggcaccttcctggtgggcgacagcaccgagatcttcgccgaggcgacctataccgacatcgacctgcgcgccaacggtggcacgccgcgcacctatggcaccacgaccggcaacccgaccagctggttctcgcgcaacaccggcaacaccgtcaaccagttcctgtacccgttcctgggcccgaacaacgagtacaaccacgccagcccgcagttgagggccatgatgggcggcgtggtcggcctgaactacctgctgcaggatgccggcccgaactacttcggccagcgcaataccgacaagagctaccgggtgctggccggcgcacgtggcaatgtgggtgactggaactgggaaaccgccttcgccagcgcgggtacccactccaccacctaccagacgatcaacgtcaacaccaagggcttcgagaaggccttcggcccatacacgatcgatccgggcaccggtcgggtgatcatctccgaccacccggcttacaagttcggcgagatcagcgaagccaacgccgcgttgatccgtgaagcgttcccgaccttcgacatccagtcgtggacccgcctgcataccctggacggcaagatcgaaggaccgctgttccagctgccggccggcgagatgcgcgccgcgttcggtttcaacgccagccgtgagaccttctacaccccgggcaacgccgatgcggccaatggcctgatcacccagcagggcggctcgtggttcgacggcaagcgcaacacctacgcgctgttcgccgagaccgtggcgccgatcaccgacaagctggaactggatgcggcggtgcgcgtggacaagtacccgaacttcagcgccaacatcgcgccgaagatcggcttcaagtaccaggcgttcgatcagctgatgctgcgcggcacctactccactggcttccgcgcgccgagcctggccgagtccggcaatggcggcgtgttcgcacagctcggtggcttccgtgacgaactgcgctgcggcgagaccaatgccatcgccaacctgctgctgaagtcgcagcggccgggcgatgtcgatctgggcaagagcctgctgaacgtcgattgcagccgcaccgtggcgcgcatgacccagccgaacaaggacctgaagccggagaaggcgaagatcgccaccctcggcttcgtctacgagccagcgagctggctgtcggtgtcggccgactactggttcatctaccgcaacaatgaaatcgtcgcgccggattatcgccgcatggaagacatcatctcgatgtcgcgctcgccgatcaccgacagcgaccgcgccaacctggcgcagctggcggcaatgtgcgccgatccggccagcggcgtgagctgcccggccaccctgccgggctactccgccggcaacgtggccagcgtggtcggccagtacaagaaccgcggcaagacgctgatcgacggcttcgacatcgacgcgcgcagccgcttctcgctgggcgactggggcaacctgaacatcggcctggccgccaccatcgccaaccgcaaccgcttctacatggacgccgagaacggctggtactacggcgacgtggtgggctactacaacaacccgcgcctgcgtgccacgctcaatgcagactggacctacaagcaggtgaccaccagcatgttcgtcaactacgtgggtggcaccaagtgggctaccgaccagatcgacgaagagagcaacaacagggaaacctgcaccggcggctacctggccctgcagaagagcaagtgcgatggtgcaccgtcgtggtggaccgccaacatgagcgtcacctggcgcccggacgatgcgtggaacctgagcttcaccgtcaagaacctgttcaaccgcctgccgttctacgatccgaacagcttcctgggtgactccagtgactacgcaaccatcttcggtcgtggttacagtgtgaccatcggctaccggttcaagtaa

SEQ ID NO: 494772 - DNA, 1356 bp, Stenotrophomonas maltophilia
atgaagcgtagggaattcatcgcggccagcgccgctgtcgccgccagcagcctgctgccgcagacccccgcctgggcacgcgggcgcaaggtgcgcctggccatgatcggcaccggcatgcgcgggctggtgctgctgaaggaactggtgcgtcgcgacgacgtcgaagtggttgccgtctgcgatatcgagccgatcatgctcggccgtgccacagagatggtggcgaaggccggcaagcccgcgccgaagacctatggccaggaccgcgacaccaacgcctggaagcgacttctggaacagaagggcatcgatggcgtgatcatcgccacgccgtgggaataccacgcaccgatggcgattgccgcgatgcaggccggtgtggccgtcggctgcgaagtggtggctggcatcaccctgcaggaccactgggacgtgctgaagacgcaactgagcaccggtaccccgtacatgctgctggaaaacgtctgctatcgccgcgacgtgatggcggcattgcagatggtgcgccaggggctgttcggcgagctggtgcatctgcaggccggctaccagcacgacctgcgcggcgtgaagttcaattccggtgacccgaaccagccctacgacagcggcgtggaattcgggcccaagggctggagcgaagcacgctggcgcaccgagcattcggtgcagcgcaacggcgagctgtatcccagccacggcatcggcccgtgcgcgatgtacaccggcatcaaccgtggcaaccgcttcacccacatcaatgccttcgcgaccaaggcacgcggcctgcacgaatacaccgtggccaagagtggcggcaccacccaccccagcacccaggtaaagttcaagctcggcgacatcgtgaccaccacgctggcgtgcgagaacggcgaaaccatcctgctgcagcacgacacctcgctgccgcgcccgtactcgatgggcttccgcgtgcagggcaccaacggcctgtggatggacgtgaaccattcgatccacatcgaaggccgcagcccgccgcaccagtgggaagagttcaagaagtaccaggaccagtacgagcacccgctgtggaagcagaatgccgacaccgctgccagcgccggccacggcggcatggactggttcgtcatccatgcatttgttgaagcgctgaaggccaaggcaccgatgccgatcgacatctacgatgcggtgacctggagtgcgatcacaccactgagtgagcagtcgatcgccaacggtttccagacgctggagttccccgactttactgctggtgcgtggaagacgcgcaagccgatcttcgcgttcgacgggaagtattga

SEQ ID NO: 494773 - DNA, 537 bp, Stenotrophomonas maltophilia
atgttggaacgactgaagaccatttcgtgtgccgcactggcgatgatcgcgctggggagcttggctccttgggctgcgcaggcgcaggaggtgcagaagaagtgggagagctacctgtcgatgggccagccgcgagccaccgaagcggcggtgcagaaggacatcaagtcgctcttttcccagtacgaaaaggacaaacccttcaattggcatgtcaaacgccaacgcgtccttggaaagaaggtcatctacgattaccgggtgagacccgagaagatcgttactaccgactgggtctacatccactcagggcaggagtactcctccgaagatcagattcgtagcgtgatcctcgctacccgcgtcagcgacccgcgggcggtggggcgtatcttggcgcagggacgtcagccaatgcttcgaagagctcagggccgctgccaaagaaatcttggggcgtctatcgatactctgaaatggcgggcggttgggggccatcgattggcggctccattcaaggttcagataatcttatga

SEQ ID NO: 494774 - DNA, 456 bp, Stenotrophomonas maltophilia
atgagcatgttcaagaagactggtcttctcctgtatctggtgggtgcagggtatgtaaatgcgcaggtgccccctcagccggaaaggccggtggttgagcttgacggctcgatcgcgacggatagtggcgctgagcttgatgataagcagctacttgcgttgactggccgcgcagacgcgggcgacgctgaggcagcgtttcgaatctcacgccactttgagggcagaggcacggctggcagctcccacatgtggcttgtctatgccgcagcactggggcacccgattgcacagtacaacgtgttcttcatgttgaaggacaagaaggactgcgcgtcatcaagtgaggcatacgcatggctcaagagtgccgcgttgaagggggtgagaggcgcggactctgaacttgagcaagcggcccgcatagcagctcaacgatgcggtagtaaacgatag

SEQ ID NO: 494775 - DNA, 219 bp, Stenotrophomonas maltophilia
gtgcgcatctacatccatccgcctgacagcctcaatgaatttccaaccttcgccaggatctcgctggatgatgtcatcaacttcatccagcccgcctgtgagcggatcccgctcaatcgcatcgattgcgagccgattaaaattgacccaagcttcagctattttttccacgcgctctttatcaaacattatgtatatctcaaattggttgagccatag

SEQ ID NO: 494776 - DNA, 216 bp, Stenotrophomonas maltophilia
atgcatatgcgcaatagaatactgaattggctcggtttggtgtttttttcgctaatttttctgaggtcatcgtcctatctcgcattgaaggtgtatgcgattggtcaccttgagaggggcgattattttgtaatgttgcctctggcgctgggttcgctcctgatctgcggcatgtttgtggcaattgttcttaagaacgtaaaatccaatcaatag

SEQ ID NO: 494777 - DNA, 366 bp, Stenotrophomonas maltophilia
atgggtatcactatccatgatttcaagatgaccggaattcgtcttgatccggtgtccggagtgactgtttctctgtttgatgactctgtgcagggatcctatgatttggtctttggtcgagtcaggaaggcgagcattgatggtttctctagccagaatgtcgtgctcgatcttaaggtcttccatcgaaaggatgattcctttgaattccagcggtgttgcttcctccttggtctagacccagtggctgcccgggaaattgtcgatggtgacaccttggtcttcattgaggcctctgtcggcgcagagattgcacttctagtagagggcacttgggaaggccggttgattcctgtcaaatcatga

SEQ ID NO: 494778 - DNA, 390 bp, Stenotrophomonas maltophilia
atgaacatcatcgatcctgtactccgcgaactgctttcccggctcagtgtcgacactgacttcggcgatacggtgctgacttgtccggagacccaaggggcctatgaggacacgcccctgcatgtggtggcctattacaacgatttggccctcctcagcgcattgatgcccttcgtgaccaacatcgatgtgcgtggtgatcttgatctgacggcgctggcaagtgcggtggcacatggcagcgtcgcggcagcggcctatctcctctggtgtggtgcagacccgcacgcagggaatgagcttgatcggacaccactggaaatgatgtgccaggacccgaggtttgatgatgcggtgcgtatgatcgacaccgcagatggagcctggtga

SEQ ID NO: 494779 - DNA, 420 bp, Stenotrophomonas maltophilia
atgcgcctgatgaccttcatctgcccactttgtggcgctagcgggcagcgctttccgctgcgatctgctggaaagcgtcaagcgaagacgtcctgccgggggtgtcacgtcgagcttcgttcagacccgcggttgggcacgtacacgttctatcttctgtacgcacaggtcatcatcctggtggcggcattgccgctggtcggggccggtgtcgcgggtgaatgggcacggctgggaatgatctgtctggtagtgctggtgctgtgctggttccccggcgtgatcaggcacgtacgaagtccgatcgtgcgcgcctgccaagatcccgattacagctatgcgcgcaggccgggtgcttcgactacgcacgctgccgcaaacccggagcagagtagcgacacgccaagcgccagcccgtga

SEQ ID NO: 494780 - DNA, 225 bp, Stenotrophomonas maltophilia
atgccgttgagtgacctgaagccagcggccggggagagcgtctatctcgtcagggccgcttcggatgaaagtaggggcaagttcatcggctacgtcaacgacaagggacttctcatcatgtatggggtgatggggggctgcggtgagcagaagcaacgggtggttgccgtgagccttcgggagaagcccgccaacgtattcggtcgatgctcggcggcgctatag

SEQ ID NO: 494781 - DNA, 450 bp, Stenotrophomonas maltophilia
atgaagcgcctgactgccttttgcctcgtggttgcactgacatcctgtgcggcgcatccgaaccgcaccacgaagtgtccaccggcccatttcacctacgtcggcaccgagagagtcgacggactgacctacgggcgcttccagatcacccacaacgctgatcaaccgcttcagctgtgggtggatgagagacgcaggttgaactcaaggaccgctcgcgcagagatgaggcgtaaaggcgaggatgcctggcgaccttacaacgtgatccttgaggaaatcacaccgggagcgatcgggctgtcgatcgggcagggtgaacagcagagcgttttgttcgatggtgatggcgtgttcctgcccggccaatccagtgcggacacggagtactccatcgtggtacgggatgcagccggttgcgaacatcgcaccgcgtcattcattccctga

SEQ ID NO: 494782 - DNA, 1878 bp, Stenotrophomonas maltophilia
atgcgtttgcgatggatgctaggtggcctgctgtggatgctggcggttccggcacacgccgcgggggtggatgctgccgatgtgctggccaaggcccgcgtagccagtggtggcgagcagtggctgtcggtacagcgtctgcaggcggtgggcgagcagtcggtgggcggcctgcacgggcgctggcagctcaaccaggacctgcgtgccgggcgctatgccgaacaggcgcaactgggagacttcaccgtcgcgcagggctttgatgggcaactgtcctggcggcgcgactatggcggcgaggtcggcctgctggatggcaccgtgccacgtcggaccgcgcgcacgcagtcgtggctggcgacccgtgcctattggtccaacgcctatccgaccacgcactttgccgcgccccgcaccgaggctctggatggccggcgctataccgtcctggccacgaagccggagggcgccgacccgatcgagctctggttcgataggggcagcggcctgctcggccgcgtggtcattgcatccgctcgcacacccaccgccaccgcactggaggactaccgggcggtcgaaggcctgttgctgccccatcgcatcatcaccgacaccctcgatgcccggggccgtgctgatccgcgactgcgcagcgatgtacaggtgcagcgctaccaggtggatggcccggtaacagacaccgtgtatgcaccgccaatgatggcccatgacagctatatcgaggatgccagcggcaccacccgcattccgttcgacctgatcaacaaccatgtctacatcgaggccgaagtggacgggcagccggcgcgattcctggtggatacgggcgccatcaatctgctgacaccgaccgccgccaagcgcctggggctgaccaccacgggccgcctgagcgtgcatggtgccggcgacaacgccagcgacctgggcctggcgcaggcccgccacctgcgcatcggtggcgcgcaccttgcaaacccggtgttccacatcatcgacctcggccagcagatcaactcgatgggcgtgccacacgatggcttcatcggctacgagaccttcctgcgcttcgtcaccaccttcgactatggcgcgcgcgtgctcagcttcacccgaccgggccactaccagccgcccgccaacgcggtggtgctgccgttcgaacaggacgaccgcgcaccggtactgaatggcgagctggacggcactccgctgcggttgtggctggacaccggctcacgcaactcgctgagcctgagcagcccgttcgtgcgtacccatggtctgttggagaagtaccacgccagtgaggaggcggtgcttggatggggcctgggtggcccggggcgggcgcgaccggcccggctcggtgtgctgcgcatgggctacatcaaggtcaccggcctggtcggtgatctgtccagcaccgacaagggtgcactggccctggccgactatggcgcgattctcggtggcggcgtgctgcggcgcttctccatgggcatcgactacgacgccaagcgcctttatctggtgcccaacgctgaaagcacgcaggccgatgccttcgaccgcagtgggctgtggcttcaggccgaggactctgcactgcgtgtggccgatgtggcgccgaccagcgctggtgcgcgcgcggggctgcgaagggatgatcgcatcgtcatgatttcaggcgagccgattgccacgcggaagctggcggactggcgtgcgctgctgcgtgagcgcccggttgggacgcgcgtgggcatccgttatctgcgcgatggccggcaggtggataccgagctggtactggcggaccgggtggctgcgggatggcgtgccgattga

SEQ ID NO: 494783 - DNA, 1125 bp, Stenotrophomonas maltophilia
atgacgccaccggatctgctgaagctggccgcgggtgctgcgattctcggcctggccaccttgtccaccggcgtgagcgtcggtcgcacatcgcgtgggaacccgctgctcaccgcattcctcgcctgtttcgccgccgccaatctgttcggattggtgctgctgggtggccaggcctggctctcgcccgacgccgtgcgctggctgcgggtcatcgaagtgcctctggtctatctgctcggtccactgctgtatggccatgcgcgtgcgctgctgacacccgcgcaggccgctgcaacacccttgccgctcgcgcatctgctgccggctggcctcgcgttcgccatttccctgttgaacgcactcgcgcctttcgaggcctcaccgctgggcgatgtgctgttccagctcagtttccacggctggctgttgcagggtgctccctacctgctggccgcgctgtggctctcgctgcgtgcgccgcccgccccgcccggagccgccatccaacgcagcggactgcgcgggctggcgatcgtgatggcgggatgctggcttgccagcgcaatgaaccggtggccgccggacgctgctccactgctggccagcatcgggctcagcctgctgaccaccatgggcatgtacctgctggcgtgccgggtcgtacgccagcagctgcgcgtacgtgcgagcactgcggcacccatcatggtggacatgaccgcgtccgccgaggatacgacccacgcacgctacgaacgctcgggcatcgacgcagcacaatgcgcggccatcgccagcgcgctgaccgcattgatgcaggacgaacgcctgcatgaagcgcccgggctggatcttcagaccctcagccagcgcagcggctggtcacccaaccaggtctcgcaggcgctcaaccaaggggtgggccagagcttctccgagttcgtgaacagcttccgcgtcgctgccgcgagggcgtgcctgtccgatccgtccgacctccgcagcgtgctggacatcggccttgccgccggcttcggcagcaaatcgaccttcaacagcgcgttcaagcgcgccaccggacagacgccgagcgagtaccgccgcctcaccgcgtccaactga

SEQ ID NO: 494784 - DNA, 894 bp, Stenotrophomonas maltophilia
atggctgatacccccctcacttcgccgcagtcgccggcgacgccgcgttggcggcattactggagtctgatgcgcgctgatcgcccgatcggcacgctgctgctgctgtggcccacctggtgggcgttgtggctggccgcgggcggcctgccgccgctgtggacgctgttcgtgttcaccgccggcgtgtggctgacccgctcggccggttgcgtcatcaacgactacgccgaccgctggctcgacccgcatgtggagcggaccaaggcgcgcccgctggccaccggtgcgatcagcggccgcgccgcgctggcgctgttcgccgtactgatgctggtggcgttcggcctggtgctgaccctgaacgggctgaccatcggcctgagcttcatcggcgtgttcctggctgccagctatccgtacctgaagcgctacacccatctgccgcaggtctacctgggcatgtcgttcggctggggcatcccgatggcgttcgccgccgtgcagggcgaggtgccgatgctgggctggctgctgtatgccggcaacatcctgtggtccaccgcctacgacacctggtacgccatggtcgaccgcgaggacgacctgaagatgggctcgcactccaccgcgatcctgttcggtgatctcgacctggtcatccagggcgtgctgtacgcactgttcctggccacgatggcgctggtcggcgtgcgtggcgggctgggcgggtactacctggccggcgtggccgtggccaccgcgctggtggtgtacgagttctggatctgccgcaaccgcgaacgcggcccgtgcttcaaggcgttcctgcacaacaactgggtgggtgccgcgctgtttgccggcatcgccgcggacctggcgctgcgttga

SEQ ID NO: 494785 - DNA, 1425 bp, Stenotrophomonas maltophilia
atggcctctacggcagcagtacaggacggctggatggcgcgcgcagcgctgcgttcggccgcctgggcggaaaagtggttccccgacgcgtatgtgttcgcggtgctgggcgtggtcatcgtcgcgctggccgcgatgggcttcggctcgaccccgcaggccaccgccagcgccttcggtgacggcttctggagcctgattcccttcaccatgcagatggccttcgtggtcatcggtggctacgccgtggcgacggcgccggtggtcgcgcgcttcatcgacttcctggcccgggtgccgcgtaccggccgcggtgcggtggtgtacgtgggcctggtcagcatgctcgcctcgctgctcagctgggggttctcgctggtgttcggtggcctgctggtgcgtgcgctggcccgtcgtaccgaactgcgcatggactaccgcgccgccggtgcttcggcgtacctcggcctgggtgcggtgtgggcaatggggctcagttcctcggccgcacagctgcaggccaacccggccagcatgccgccggggctggtggagatcaccggcgtgctgccgttcaccgaaaccatcttcctgtggcagtcgatcgcgctgacctcggtgctgatcctggtctcgctgctgatcgcctggctgacggcacccgcggcgggtagtgcgcgtaccgccgaggagttccccggtgctgcacaggccgagccggaaccgctgcagcgacgcacgcgcccgggcgaatggctggaatacagcccgctgctgaccgtgctgctctcgctgctggcgttcggctggctgttcaacgagttcgccaacaagccggtgatcaccgccatcgccaacctcaatacctacaacttcctgttcatctcgttgggcctgctgctgcactggcgcccgcgcagcttcctcaacgcggtggccaaggcggtgccgagtaccaccggcgtgctgatccagttcccgctgtacggcggcatcgcgatgatcctcacccacgccgctggcggtgacgggcagaccctggcgcaccggctgtcgagcctgttcgtgcacgtggccagcaccgattcgttcgcgctggtgatgggcgtctattcggccgtgctgggcttcttcgtgccgtccggtggcggcaagtggatcatcgaggcgccgtacgtgatgcaggccgccaacgaactgaaggcgcacctgggctgggcggtgcaggtctacaacgcggccgaagccctgcccaacctgatcaacccgttctggatgctgccgctgctgggcgtgctgggcctgaaggcacgcgacatcgtgggcttcaccttcatccagctgctggtgcacatcccgctggtgctgggcctgctgtggctgctgggcatgaccctggcgtatgtgccaccggtgatgccatga

SEQ ID NO: 494786 - DNA, 165 bp, Stenotrophomonas maltophilia
atggcacagcagaaccagaacccgaaccagaagcagcagggccagcagaaccagcaggatcagcagcagggccgtggccgcgaccagcagcagcaacaacagcaggaacagcagcagcgcaaccagcgcaatcagcagcaaggtgggcaggacgaggaagagtga

SEQ ID NO: 494787 - DNA, 627 bp, Stenotrophomonas maltophilia
atgcgtcgcctcctgctcatgatcggcctgctgttgcccgccctgtggccagcgctggcgatggccgtcgatgtccacgaaggcgatctgctgttcgtcaccgccggccgcagcggcctcagtgcggccatcgacgatgccaccggcaagcagggcgcgcccagcttcgatcatgtggccctggtcgctgtggcgccaaacggctgggaggtactgcatgcggacgagaagggatcgcgtcggcaatcgctggtcgagttccgccaggacgcccgggccaagcagcggcagatcgtggtctatcgcctgcgggcaccgcagcaggcggcgatcaaggatgcggtcgccaccgcgcgcatgatgctgggcaagccgtacaacacgtcgtatgtgttgaacgaggacagctactactgttccgacttcatcgagcgtgcgttccgtgcgcaccatgtgttcgcgctgcagccgatgaacttccgcaatccgcagaccgggcagatcgcccagcactgggtcgatctgtaccgcggcatgggcatggaggtgccgcaggatcagcccggcaccaatcccaatgacatgtcggccgcgccggtgctgcaacgcatcggcgtgctggaataa

SEQ ID NO: 494788 - DNA, 513 bp, Stenotrophomonas maltophilia
atgcgtcgaaaccgttccgctgccgtgctgatgcttgcctgtggcgtggccctggttgcctgcacgcccgagccccaggtgacgcccacggaagtggcgcctgcacatcccgcgccgtcgtccacggcggcagcggtccagcccgcaccggtgcctgccagcggtgaatgcccctactcgcagttcgatgcgttcctgaagcacttcggcaacgagatcgcgctgcaggaaaaagccaccgccgatccgctgctggacagctacatcgatgccgaggccgagccggaaccgcgcaaggtggaaagccgcctggcgctggccgatgtcgagtggccggtgatgcccgatcccgccgcgttggccgggcagggccgcgagatgcaggtcagcacgctggccgatgggcaacgacaggtacagatccgcacgccggacagcagcgaccagcagacctacaccttcgcgcagtcgccctgctggacgctggtcaagcgcgaggatgagtcgatctga

SEQ ID NO: 494789 - DNA, 1839 bp, Stenotrophomonas maltophilia
atgcaggctcgcaggatgtgcaccatcaccgccaccatgactgtcatgctggcaatggcacccttcaccggcgtccaggcgcagtcgctgccggccgacgatagcgcctacttcgccagtgcggcagccgaacaggccgcgcgcggcgagctgggcaagcgtgtcgaggccctgcagcaggcttccgcgcttgcacctgcgcaacgcttccatcaggccgaggcactgcaggcgcagtgcctgcgtcatcacagctatctgcatctgcaggccgcacgcaatgcccgtgaccatcgcccgacgcaggcgctggaccagatgatggggctgtgcagccgcatcgcccacaccggccgcgcggcgctgcgcgaagcgcccgcagacgcggcgtgggccgcaccgtatgccttcctgcgcgcgcgtgcgctgaaggacgctgcagcaccggccagtaccgcactggatgaggccgtggaggccctggccgatccggcgctggacagtttcgcacggctgcgtgggcagatcctgcgcagtgccgagtacccgcagatcgagcgtgatggtcggcactgggacaccgggcacgacaagcaggcactggcccagcagcaggaccgcgcgttgcgggaagcgggctggaagggttattggcagggcctgcactcgcgccgcgagccgatggcctcggtgctgctgggcctggtgcaggtgaacgatgccgccgcgcgcctgcagggcgatggttctgcaccggcgcggggctaccagcgcatgggcctggatgcatcggcggtggatgctacgctgcaggcgatcgaacgccatgcacgggaccgtcgcgcctaccaggacatgctgctgcgccacgccgcgcgttcaggcatcgatgcgccgcagctctgggataccacgttgcccgatgccggctatatgccgccggtactgacgctggcgcagctgcgcgacaatgccgccgatgccatgcagcacctggggccggcatacgtcagtgagctgcgtgcgctgctcgatccggccaaccggcgcatggatctggccaccgaacgtggtgaccgcagccaggacgcgttctcggtaagcgctcccggcgtgccggcaatgctgttcgttggcgtgcgccgtggtgatctggaaagcgatgtcgagatcgcccatgaggccggtcatgccatgcacggtgagtggatgcagcgcggccatgcctcgccgctgcagcgcaatggcagccagtggctgaccgaggccttcgccatctacaacgaactgcgcttccgcgaccagctgtaccagcaggcagaggacccgcgggccaaggcctattacctgaagtcactgctggacgatatggtgctgcagctgttcacgtcttccgaagaggcgcagctggagcagtcgatctacgagggcgtggcggacaacacgctgggtaccgccgatgacctggacgcgttgaccggccgggtgctggcgcgcttcgggcaggacccggagcgctatccgcagctgcgcaacggctggatcggcaagcgcctgatgtatgacgaccccaactatctggtgaactacctctatgcagggctgctggccgtgcagctgttcgtgcaggatcaacgcgacccggcagggttccgtgaacgctatctcgcggtgctgggcgaaggctttgatcgtgcgccgaccgagcaggtggcgcagttgctggggcacgcgcccgactggccggcgctggtcgatgccgatatgcaggtgttcaatcaggcggccgcgcagctgcaggcgctgcatgcgcggatcgaggcagggcagggcacgtga

SEQ ID NO: 494790 - DNA, 1401 bp, Stenotrophomonas maltophilia
atgctgcgcaggacgacgtgcacccgggccacggcatggctgttgatgctgttgtgcctgttgccgatggtggtgatggccggtgctgcggtccctgcgctggatgacccggtggtggacgccgccaacgcactttcggcggatacccgcgacatactgcgcacgcaggccttcaagttgcaggcacgcaccggcgcgcagctgcaggtgctggtggtcgaccatgctggcgacgagggcatcgaggcctacgcacagcgggtgttcgaccagtggcagctgggccgcgaaggcgttgacgatggcgtgctgctgctcgtggccgtgcaggaccgccgggtacgcatccagaccggttacggtctggagggcgcgattccagatgcctatgccgcccgcatcatcgacaaggcgatcgtgccgcgtttccgcgatggcgaccttgaccagggcctgctggatggaacgaaggtcgtggtcgcgctgatcgatggcgaggacctgccggcctgggaagcgccagcgatgcgcaacgtgttgccggccgattggcgcagcgcggattccgtggttgcactgacgctgctggccggcttccttgcgggtctgtggcgctcaccgccctcggcgcccgcggccaggatgccggacgacctcgcacgcaggcaccgcgagcgccagcgtggagcgccacgcgaggtcaccacgccgcaggcgcgcccgaagcgattgccggcctggggtcgcccgctgctggtgacggctgtggtagccgcgggtctgctgtcggcggctatgtgggcgccacgccaggcattggcagcggtctgcatcgtattggcgttgtgcgtaccggtggcgagcctgcttggctggtgctggcgccgcagccgaggtgtgcgcgtggtgctgctcggcatgctcggggtcagttcggggttcttggtggtgatgctgctgcgtggccagttgccgcccagtctggccctgcacacgttgctggacctggcggcaggcatcgtagccatgctgctgttcttcctcgtgcaggcgtgccgcgcgcgctggcacaaggaccgcagcagcttcggggtgaggttcgcagtgctcttgctgctgaccgctggctacgtgctcttcgcactgctggccattgatcgcgccgacccggtggcacgccttgccgcgacgatcgggtggagtgccggcacggtcgtgctgtacttcgcctggattttcaccatgctgcccggtgagaaggcacgcggcagccgcagatcatccgtcggccaccgcagtgcgtccagcaccccgtcgtcaagttcgtctgcgagcagctccagcagctggtccggaggcggcggccgcagcggcggaggtggtgcgtcgggcagctggtag

SEQ ID NO: 494791 - DNA, 672 bp, Stenotrophomonas maltophilia
atgcgcctgctgcacctcactctgccggtatccgacgtcgcttccgtggccacatatttccacgatgtgctgcagcagcgcgtggtcggcaaccatgtgcacgtcggctggagcaccctcgaacttcagcctgcggcggggcgtccggtgggtggcgtgcatctggccttcaacgtgccggacaaccgcttcagcgaggcaatgacgtggttgcgtgagcgcacgccgctgcagcgcaatccggcggggctggactacttcgcgctggagagcagctggcagtcgcagtcggtgtacttcaccggcccggacggcctgatccttgaactgatcggccgccgccgcctgccggccagcgcttgcgaaggcgtgttccatggcagcgagctgacctgcctgagcgaagtcggcctgcccagccgcgatgtcgaggccgtacgcgaactgtccaaccaacgtttcggcctgcagccgatcagcccggcttcgccgcagttcgcaccgatgggcgacgacgagggcctgctgatcgtggtcgcggccgatcgacggtggtttcccgagcagaaggacctgcccaatgcgcaggggctgttgctgcaggtgggcgacgtggctggccccggtgtcgtggaggacgttgtgctcggctggcgggtacaggcagcctga

SEQ ID NO: 494792 - DNA, 1080 bp, Stenotrophomonas maltophilia
atgcgcatgaccgctgctgtgctgggaggaatgctgctggcgttcgcgagcgtcggcgccgcccgcgaaagcggcgtcgccggcgagcgccacggcacgacgacgctggccagcgccgccgtgcgcgacgcagggcaccgcgacgcgctgcgctacacggcctggtatccggcacaggccggcagccgcgaaaacgcgctgaccatcggtcctcccgacgcgccgctgttcgacgccggccggtcggccaaggatgcgccggtcgcgggtgatcgcctgccgaccctgctgctctcgcatggcaacggcggcagcgcgcgcatgatgggttggctgggcacggcgctggcgcgggccggatatctggtgattgcggtggatcatccaggcaacaacggcgttgacaccatgaccctgcccggcagccttctgacctggttgcgcgccgatgacctgcgtgccgcactggcggccgtgcaagctgatccggtgctgggcccgcatgtcgatcctgagcgcctgggggtcgccggcttctcggccggtggctacaccgcgctgctggcagccggtgcgcgaccggacctgcagcgattgcgggacttctgcaccgcacatccggatgacggcgtctgccggccccaacaggaggcggcaacgcacacgatggaggcgcgcgttgccgctgcggcgtcgcccgagctgtcgccatggatgtcccacgccaacgacgcacgcgccattcccggcgtgcgcgcggtgttcctgctggcgccggcaatcgtgcaggcctttgcgcccgagcagctctcctcgctgaaacagccggtgtcgatcgtgctgggccaggcggacacggtcgcgccaccacagaccaatggcgaggctgcgcgtgcggtgattgcgggcgctgcactgcaggtgctgcccggtgtcggccattacgatttcctcgccgcatgcaccccggccggacaacagcggctgcaggacctgtgcagcacatcggtgccgaaggcgcagacccacgcgcaggcagcggaggcggcaatacggttcttcaaccattcgctgcgctag

SEQ ID NO: 494793 - DNA, 828 bp, Stenotrophomonas maltophilia
atgagcgcggcaggcaaggcgttgtggtacatcgaaacccatgcggaccagccattggcgctggccgatatcgccgctgcggccggcctgtcgccgtttcatctgtcacgcctgttccaggcccgcaccggcacctcggtggtgcgctacctgcgcgggcgccgcctgagcgctgccgcgcagcggttggccaacggcgcgggcgacatcctgcaggtggcgctgggggccggctacaccacccatgctgcctttacccgtgccttcagcgaacagttcgggcagacaccggaacgggtacgcgaacagggcaccgatgggctgacgctggtgcaggcgatccgcctggacgaggccccgtcagcctgcattgaagccccgcggctgctcgatacgtccgcgttccagctggcaggcgtcggcatgcggcacacccgcgacagcagcggcgcgattccgggccaatgggcccagctcaaccgcgagtggccgacgccggcaccggtcagcttcggcgtgtgctgcaacagtgatgacgatggtggcttcgactacattgcggcactaccggcaagcacggtgccgagcgtgcctgcgcactggcgacgcgtggacatcccggcgcgccgctacctggtggcttggcacggcggacacatctcggccatccgctcgacctggttctggttgctggatcattatctccctgcgtccaacctgagccttgccgatgcgccggacctggagcgctacgacgcccggttcgacgagcatagcggcaacggcggcgtggagatctggctgccggtggaagaacgtccccactga

SEQ ID NO: 494794 - DNA, 402 bp, Stenotrophomonas maltophilia
atgatcgagatgatcgaaatgctgcttgccctctgggtacttcccagtctgttgaccctggcgctgatgctgctgatgttgttcggcgcgccacggtggcgcggcaacccctgggtgtaccgtgtcggcttcgcgttgctgggcgggtttctgacaccgacgttgttgggggccggtcacggtgggttgccgtgcgcgactatcggcgggctggtgatgatactgacgcagctgcaatggatcggcgatctgcaggtcgacttcatggggatcgggattcgcaacaggggcatctggatcatgtccacccccgccttggtggtgttcgctgccatgatgttcgttccgctgcgaacggcacggccggcccgtttcggctttggcgacgacgccaacggctag

SEQ ID NO: 494795 - DNA, 2358 bp, Stenotrophomonas maltophilia
atggccagcgcaggaggcgcgatcgcaacggaggccgatgcggtcgatgccgccggcggcagccgcgccgcgcccacccagctcgacgcgatgctggtcaccggtacccgcgcgtccaaccgcacccagttcgaaacgctggcgccggtggatgtgttcagcaaggaagacatcaggtccgtcgaatccaccgacctgaaggacgtgctggcccagctggtgccgtcgttcgtggtgcagcgcctgccgatggcggacggccaggtgttcgtgcgtccggccacgctgcgtggcctgtcgccggaccagaccctggtgctggtcaacggtcgccgcttccaccgcagcgcgctgctcggcaaccgtggtgcacaggccgctgatctggcacagattccaaccagcgcgatcaagcgcatcgaggtgctgcgtgatggcgcgtcggcgcagtacggctcggacgccatcgccggcgtcatcaacatcatcctggaggatgggccgggtagcgagatcaccgccggctactcgcagtacgcgcagggcgacggtgcttcgcgcgatttcagtgcgcgcaccggctggtcgctgggcgactatggcagcctggtgctgttcgccgaatcgtccacctccgacgccacctcgcgcacccgccagcgccccgatgccatcgccttccaggccgcgcatccggagctggaggtgcccaacccggtgcagcgctggggccagccggaactggaaagccgccgcgtcggcttcaacgtaaaggccaacgccagcgatacgctggagctctatgcctttggcctgtacagccacagcgatggcgtcagcgatttcaactggcgcaacccggacaccaccaccggcgcgtaccgcaccaccgccatcttcccgggctggaacctgcgctcgctgtatccggtcggcttcagcccgcagtacggcaacgtgcagaacgacctgcagctggtcggtggcctgcgcggcgagatcacgccgaagctgcgctgggatgtcagcgcctcgtatggccgcaacgccatcgactatcgcctgaagaactcgatcaatgcctcgctcggtccggccagcccgaccgacttcgatctcggccgcctgacccagaccgagaagaacgccaacgccgacttcaactacgaatgggacgtggctgcgctgtccaagccgatcaacgtcgccttcggtggcgagttccgccaggaaacctaccaggtgcgcgccggtgatccggcctcgtacgcggtgggtccgggcgcggccgcgggcctggaggccaactccaatggcgcgccgggcttctcggccagccaggccgggcagtggagccagcgcagcaaggccgcctacgtggacatggaagtgccgctgggcgagcgctggagcatcggtgcagccagccgctatgaggacttctccagcttcggcagcacactggacggcaaactgtcggcgcgcttcgcgatcaccccggacgtcgccctgcgcggcaccgtgtccaccggcttccgcgcgccgacgccggcgcagctcaacaccaccagcaccacccaggggttggatacgcgcacgctgcagatcttcaccagcggccgcctgtcgccgaacgatccgctggcgcagctgctcggtgccaggccgttgaagccggaagaatcgcgtaccgcatcgctgggcctgacctggcgcaccgacctgggcctgtccggctcggtggatgtctaccagatcaagctcaccgaccgcttcagccagtcggccagtttcgccattccggccggtacgcccaatccgctgggctatacctcggtgaactacttcaccaacgacttcgacaccaccaccaccggcgtggacgtggtcggcaactacctgcgcgacctcggcgagggccgcatgacgctgaccctggcctacaactacaaccgcacccgcgtggacaacggcagcacctcggtggccaccaacgagacccagcgcgtgctgtttgaagaccgcctgcccgagcacaagggcagcttgaccggcagctgggacatcggtgcctggtcgctgatggcgcgcatgcgctactacggtgcctggaccgattccagcggcaatgcggtgggcgatatctaccagcgtttcggtgcgatgagcttcctcgacctggccgtcggctatcgcatcaacgaacatcacagcctgcgcgtgggtgccgacaacgtgttcgaccgctatccggacgaagccaccttccaggccagtcgcggcctggtctactcgcgcaacgcgccgtacgacaccgacggtgccaacctgtacgcacagtaccggctgagcttctga

SEQ ID NO: 494796 - DNA, 1302 bp, Stenotrophomonas maltophilia
atggaccgcaaccgccgcgtcctgttgtgtgccggtgcactgctgccggctgcagctgcgctgtcttcactgcccgccatggcggccgcgggttacgctgcgcccatgcagattcccgcaacgaccgtagcgccggacgcgctggcccgcgatgaaggctactgggccgccgtggccagccacttcgacatcaccgatgaagtgaaccacctggagaacggctactggggcgcgatgggccgcgaggcgctggccagctaccagcgccacaccgccgaggtgaaccgtggcaacgcctggtacggccgtcatgagttcccggcgcagtacatggcggtgcagcggcaggtggccgaactgctgggcgtgggcgccgacgagatcgcactgacccgtggcgccaccgaagcgatgctggcgctgatcggtggctacaaccgcctgcggcccggcgaccaggtgctgtacgccgacatcgactacgacagcatgatcggtgcgatgcgttggctgcagcagcgccgtggcgtgcaggtcgagcgcatcgcgctgccggtggtgcccgaccatgcgcagatcctgcaggcctacgaggccgcgttcgcgcggctgccacgcctgaagctggtgctgctgacccaggtcagccatcgccatgggctggtgctgccggtggccgagatcgccgagcgtgcacgcgcacgtggaatcgacgtgatcgtcgatgcggcgcacgggttcggccagatcgactacgcggtgccgcagctcaaggccgatttcgtcggcatcaacctgcacaagtggatcggcgcaccggtcggtgtcggcgcgatgtacgtgcgcaggggccgcgttgcggacctcgacccgtacatgggcgagaccgacgacggccgcgtgggcagccgcgtacacaccggcaccgtcaacttcgccgcttacctggcacttccggaggcgattgccctgcaccagcgcatcggtgcggacaacaagcaggcgcgcctgcgttacctgcgcgagcgctggacgctgccggcgcggcagatggcgcacatcgaagtgctgtcttcgccggatccggcgctggcgagtgcattggccagcttccgcctgcgcgggcgcaccagcgtggctgacaacatcgcgctgcagaagcgcctgttggatgagcatcgcgtgttcaccacccatcgcgacggcttggactccggcgcctgcgtgcgggtgacgccgtcggtgttcacccggccgcagcagatggatgcgctggtgaaggccctctccgccttggcctga

SEQ ID NO: 494797 - DNA, 1155 bp, Stenotrophomonas maltophilia
gtgccggggaatcttccgccggccagcggccggcgctaccggtcgggtgggtgccaaccttggttggcacattccaaccgtaccgggggatcttccgccggccagcggccggcgctaccgatctggtgggtgccaaccttggttggcacattccaaccgtgccggggaatcttccgccggccagcggccggcgctaccggtcgggtgggtgccaaccttggttggcacattccaaccgtaccgggggatcttccgccggccagcggccggcgctaccgatctggtgggtgccaaccttggttggcacattccaaccgtgccggggaatcttccgccggccagcggccggcgctaccggtcgggtgggtgccaaccttggttggcacattccaaccgtaccgggggatcttccgccggccagcggccggcgctaccgatctggtgggtgccaaccttggttggcacattccaaccgtgccggggaatcttccgccggccagcggccggcgctaccggtcgggtgggtgccaaccttggttggcacattccaaccgtaccgggggatcttccgccggccagcggccggcgctaccgatctggtgggtgccaaccttggttggcacattccaaccgtgccggggaatcttccgccggccagcggccggcactaccggtcgggtgggtgccaactgttggttggcacattccaaccgtgctgaggaatcttccgccggccagcggccggcactaccggtcgggtgggtgccaactgttggttggcacattccaaccgtgccggggaatcttccgccggccagcggccggcactaccggtcgggtgggtgccaactgttggttggcacattccaaccgtgccggggaatcttccgccggccagcggccggcactaccggtcgggtgggtgccaactgttggttggcacattccaaccgtgccggggaatcttccgccggccagcggccggcactaccggtcgggtgggtgccgaccgttggtcggcacatcccattccagggctaccgctcgatcgccggcaacgcgtccgacaacaacaaccggtcaatccgccgcaacgcgctctccagctgccggcgatcggccgccagccccagcgacagccgcacgccgttctga

SEQ ID NO: 494798 - DNA, 1515 bp, Stenotrophomonas maltophilia
atgacaccactgacgctggccgctgtggccgccacaagcaacaacggcggtcacctgtccgaaccgaccgatggttatggacaggctcccgccgttggaagcaacgatacgccccgacatgctccgtacatgccgcgaccggatgtcgcagcccgcgaatgggtgcaggacgtgctcgcgcacaacgggccgatctacctgcgcatcgtcaattcgctggagcgcacggtacgtcgcggtgggcttgcaccaggacaacgcctgccctcgcagcgcgcgttggcgcagcagctcggcgtcgacctgaccacggtaacgcgggcattcgacgaagcgcgcaagcgcggcctgatcgaggcgcgcgggccacaaggcagtttcatcgcaccacccaaggccggcttcgaccaggtggtggacctgagcatgaacgtgccgccggtgcccgatgccgatgcgctggccgaaaccctgcgccgcggtgccgccgccgtgcttgcgcgcagcaacgcgccgaacctgatgacctaccacctgggcggcggcaatcccaccgaccgccacgcggcagcgcgctggctgcaaccgatgctgggcgcggtggaggatgccagcctgttgctgaccgaaggcgcgcaggtggcgcttgccgcgatcctggtcagccagggccgcgacgatgatgcgatcctctgcgatgcgctggtctatccgggcctgctgcaggccgccgccgcactgggccggcggctgctgccggtggacagcgacgaacacggcatgtgccccgatgcgctggcccggctggcacgcgaaagcggcgcgcggttggtctatctcaaccccacctgccagaacccgaccgcgctgaccctgccgctgcagcggcgcgaagcgctggcgcgtgttctggagagggaaggcctgctggcgatcgaagacgatccttactggcacctcgccgaggatgcaccgacaccgctggcggcgctggcaccgcgccatgtgttctacgtggcgacgctgtcgaaggtgatcagccccggcctgcgcactgcgttcgtgcagtgcccaagcgctgcgcacgccgagtcgatgacggctgcattgcgggcgacgcggttgatgggtcatccgctggtctcggcgttggccagccagctgctgctggatggttcggcgcagtcgctgctggcgcaggtgcgcagcgaagcgcacgagcgcatgcgcatggcgcgctacctgctggcgccttcgctgctgctgcgcgccgaaggcctgcatgcctggtgccgggtaccagcgccatggactgacgccaccctggtgcgtaccgcacagctgcaggggctggcgatcgcgccttcatcggcattctgcccgccgggggtgcagcatcagaacggcgtgcggctgtcgctggggctggcggccgatcgccggcagctggagagcgcgttgcggcggattgaccggttgttgttgtcggacgcgttgccggcgatcgagcggtag

SEQ ID NO: 494799 - DNA, 600 bp, Stenotrophomonas maltophilia
atgggcgcagccgcgccgcgccgccgctggctgctgccgacgatgatcgccctcgcctgcctgttcatggccggcgtggcggctgcgctgtggcagtacttcggctacagcgcgcagtcgacgtttaccgaacaggccatcgtcttcgacgactcgcagctgcgcctgccgtccgatctggccggtgataccggccgcatccgcgtggtgcatttctgggacccggcgtgtgccgtctgcaaccgcgaaaccggcgcacacctgagctacctgatcagcatgtaccgccgcgccggcatcgacttctatgcgatccgccgccccggtacccacggcgaactgcctgagccgctgcgcaacaaggtgatcaacctgccgaccatcgacggcatcgaacacatcccggccagccctgccgtggcgatctgggaccggcagggccacctcgcctatgccggcccgtacagcatcggcatggtctgcaactcggccaacagcttcgtcgaaccactgctggacagactggtgcgcggcgaaaccgtgcgcccgaaaggactgcttgccgtgggctgctactgcccctggcaggccaagcgctga

SEQ ID NO: 494800 - DNA, 261 bp, Stenotrophomonas maltophilia
atgcgcgccgagaaactgaagttccacgtggtaatggccggctgtggtgccttcgtggtgttgatgctggccgcgctggcctgggtctgcctgcagccgcagaccgtggatgtgcaggccgccgaacgccacgccatcgagcaatgcatgcagcgcagcgaggatccgtcgcgtagcgagatccagcgccgcgcgcaggccgactcctgccgcgagatgcgcaagcagtacgtgcacaagttcggcggggacgcgtcctga

SEQ ID NO: 494801 - DNA, 1416 bp, Stenotrophomonas maltophilia
atgacgccacctgccgccggccgccgcctgaaacaccccaatcgcacctgggttcgccccttccgcgagggcgctggcccgctgtacctgcagatcgcccagcaggtgcgcgaggcagtggatgacggcgtgctgcgcccgggcgaccggctgccgccgcagcgcgacctggcccagcaggtgggcgtggacctgaccacggtcacccgggcctttgccgagctgcgccaggctggcctgctggatgcgcagggcgccggcggcaccttcatcgcgctgtcggccggcaaccgcagcacctcggtggacctgagcatgaacatcccgccgctgctgggcagcgcgccgttcgcacagggcatggaggccggtttccagcacgtgggccagcagctgggccagggcgaactgatgagctaccacgtcggcgccggcacccgcgaggaccgcgccgccgccgtgcagtggctgtcaccggtgctgggcacggtgggtgccgaccaggtggtgatctgccccggcgcgcagaccgcactgtgcgcactgatcctggcccgcacccagccgggcgagctgatcgccgccgagcagctgacctacccgggcctgctggccgccgcgcgcgtgctgcagcggggcgtggtgccagtggcgatggacgccgaaggcatgctgcccgacgcgctggaagaggcctgccagctgcgccgcccgcgcctgctgtacctggtaccgaccgtccagaacccgaccacggcgacgatgtcggcacaacgccggcaggccctgctggcggttgccaagcgccatgatctgaccgtgatcgaagacgatccctactggttgctggccggggacgccgcaccgccgctggccgcccaccgcgacgccggctgcccggtgtattacatctccaccctgtccaagtgcctggcaccgggcctgcgcaccgcctacctggtggtgccggccggcgaaccgatggaaccggtgctggacgccctgcgtgcgatcgcgctgatgccgacccagtcaatggtggcggtggcgtcgcagtggatccgcagcggccaggccgaggacatggtgcagcgcttccagcaggagctgcgcgagcgccaggcgattgccgcgcagtacctgccatcccgcgcgcgggcgcacccggccggcctgcacgtatggctgccgctaccgccgcggctggaccagtaccggctgatccaggccgcacaggaacaggggctgggcatcgccagctcggacgccttcagcgtggaagaaccgccaccgggcaacgcgatccgcctgtcgctgggcggcgcagttgaccaggatgcgctggccggggcgctggccaaattgaacgagatcctgtctgaagcccccgaggcccggcacaacgccatcgtctga

SEQ ID NO: 494802 - DNA, 750 bp, Stenotrophomonas maltophilia
atgaatatctgctggaaccgcatccgcctggcgctggtcgccctggcctgcgtcggcctgtcgggctgtgactgggtgctgctggattcgaagggcatggtcgggctcgcccagcgcgacctgatcctgatctgcatcggcctgatgctgatcgtggtgataccggccatcgtgctgaccttcgtattcgcctggcgcttccgcgccggcaacaccaaggcgaaatacacgccggaatggtcgcactccaccaaggtggagatcgtggtctggggcatcgccacggtcaaccagctcaacttcccggccaaccgcccgctggcgttcaacatcacctccaactcgacgatgaataccttcttcatcccgcagctgggtgggcagatctacgcgatggccggcatgcgcacgcagctgcacctgatcgccaacgagcccggccagttccgtggcatgtccggcaactacagcgggcatggcttctcgaacatgaagttcattgccaccgccagcagcaacgaggagttcgagcgctgggtggccgaggtacgcagcgcaccacaggcgctggacttcaaccagttcaaggcgctggccgcaccgtcgaagaacgcgccggtgcagcacttctccagcgtcgaaccgctgctgttcaagaaggtcatcgaccagttcatcggcgtcggtgagaacaccgctgctgcgtccccggcgggtgctgccggtggtgcccaggtttcccaggagtaa

SEQ ID NO: 494803 - DNA, 1977 bp, Stenotrophomonas maltophilia
atgttgggtaaattgacgtgggaggccgtgccgctgcacgagccgatcgtcgtggtcacgctggcggccatggtgctgggtggcctcgcgctgcttggcgcggtgacgtacttcaagctatggggcgtgctctggcgcgactggttcaccaccgtggaccacaagaagatcggcatcatgtacgtggtagtggcgctggtcatgctggtgcgtggcttcgccgacgcgctgatgatgcgcgcgcagttggccgcggccgggccaggcagtgatggcttcctgccaccggagcactacgaccagatcttcaccgcgcatggcgtgatcatgatcttcttcgtggccaccccgttcgtggtcggcctgatgaacatcatcgtgccgctgcagatcggcgcacgcgacatggcgttcccgttcctcaacgccttcagcttctggatcttcgtggttggcgctgcgctgatgatgatctcgctgggcgttggcgagttcgccatgaccggctgggtggcctatccgccgctgtcgggcatcgagttcagtccgggcgtaggcgtggactactacatctgggcgttgcaggcctcgggcatcggcacattgctgaccggcgtcaacctgttcatcaccatcctgcgcatgcgtgcgccgggcatgaccctgatgaagatgccggtgttcacctggaccgtgctggtcaccagcgtgatcatcatcgccgccttcccgatcctgaccgtggcgctgggtgcgctcaccctggaccgctacctggacttcaacttctacaccaacacgttgggtggcaacccgatgatgtacgtgaacctggtgtgggcctggggccacccggaggtgtacatcctggtgctgccggcgttcggcatcttctctgaagtcaccgccacgttcgcgcgcaagaagctgttcggctacaagtcgatggtgggcgccacgctggcgatcggcatcctgtcgttcatcgtctggctgcaccacttcttcaccatgggttccggtgccagcgtcaatgccttcttcggcatcatgacgatgatcatcgccattcccaccggcgtgaagatatttacctggctgttcaccatgtacggtggccgcgtcgagttcagcgtgcccatgctgtggaccatcgccttcctggtcaccttcaccatcggtggcatgaccggcgtgctgctggccatcccgggcgcggacttcctgctgcacaacagcctgttcctggtcgcgcacttccacaacaccatcatcggcggcgcgctgttcggctacctggccggcttcgcctactggttcccgaaggtcttcggcttcaccctcaacgagcgcctgggcaagtggtcgttcgcctgctgggtgatcggcttctacctggccttcatgccgctgtacatgctgggcttcatgggcatgacccgccgcatgaaccagtacgacaacccggcgtggacgccgtacctgattgccgccttcatcggtgcactgttcgtgttcgcgggcatcatcctgatgctggtgcagatctacgtgagcgtgcgcgaccgcaagcgcaacctcgacctgaccggcgacccgtggaacgcacgcacgctggaatgggccacgccgtcgccgccgccgttctacaacttcgccgtggtgcccaaggccgatgagctggatgccttccacgaagcgaagaagcgcggcctgccgccgccgccgaagacgtacgccccgatccacatgccgaagaacaccggcgtgccgctgatcctcaacatctggatcctggtgctgtgcttcgccttggtctggcacatctggtggatggccgcagccagcttcatcgcgatgatcgtgaccctgatcgtgcggtcctacgatgaggacgtggattactacgtcagttccgaagaggtggcgcgcaccgaagcggccaaccttgccaagctgaaggaggtacgcgcatga

SEQ ID NO: 494804 - DNA, 636 bp, Stenotrophomonas maltophilia
atgaacctgttgacccgcccggagctggccagcgacacgcaggcgcacgaggaccaccacgagcacgaccatggccacgaacagggcggcatgaaggtgttcggcatgtgggtgtacctcatgtccgacctggtgctgttcggttccctgttcgcctcgtacgcggtgctcagcaccgcctacgccggcggccccaccggcaaggacctgttctcgttgccgttcgtgatggccgagaccttcctgctgctggtctccagcatcacctacggccaggccgtgctggccatgcatcgccacgacacctcggcggtgttgcgctggctgggcgtgactttcgtgctcggtgcctcgttcatcggcatggagatctacgagttctcgcacctgatccacgaaggcgcgggcccgagcaccagtgcctacctgtcggcgttcttcgcgctggtcgccacccacggcctgcacgtggccagcggcctgatctggatggcggtggtcatgcaccaggtctaccgccgtggcctgaccccgaccaacatcacccgcgtgtcgtgcctgagcctgttctggcacttcctggacctggtgtggatctgcgtcttcaccttcgtctacctgatcggagccttctga

SEQ ID NO: 494805 - DNA, 333 bp, Stenotrophomonas maltophilia
atggcccacgtcgaaacctcgcgcgccggcaatgcgcacggctccaccaagtcctacctgatcggtttcgtgctgtgcgcgctgctgaccgtggtgccgttcgcactggtgatgaatccggtgctgtcgcggccgctcacgctgttcctgctggtcggcttcgcagtggcgcagatcctggtgcagctggtctatttcctgcacatggaccgcaagtccgaaggtggctggaacctggccagcttcgtgttcaccctggtgatcctgttcatcgtcgtcgcgttgtcggtctggatcatctggagcatgcactaccacatgatgatcaactga

SEQ ID NO: 494806 - DNA, 681 bp, Stenotrophomonas maltophilia
gtgaaaggcattgcgttcccccatcgtggcctgcgcctggccgcaggcctgctgctcggcctgctggccggctgcagcgcgcagtcgcgcatggacttctatgcgaaggacatcgcctgcgaagaacttggccagcagtggtcgatgcccgacagccacggcaccgtgcgtggccccaaggacctgcaggggcaggtgacctatctgttcttcggcttcaccagctgcccggacgtgtgcccgaccacgatggtcgagctgagccaggtcaagcacctgatgggcaaggatgccgatcagctacaggtggtgttcgtcagcgtcgacccggcccgcgacacgcccgaggtcgcgcgcacctatgtggaagcgttcgatcccaaggcaatcgcgctggttggcaacgatgcgcagctggccgcgatggccagcgacttcaaggcgttctacgaaaaggaacccggtcaggtaccggatacctacaccatgagccacattgccggcggctacgtgttcgaccgccagggccgcctgcgcctgttcgcgccgtacggcatgccggtggaaaagctgttctcggacgtgcagcgcctgctgctcgagcccggccacccggccgccggcaacgacgcgctggccagctgccacctcaagcacagcggcacactggccgcgcggtaa

SEQ ID NO: 494807 - DNA, 579 bp, Stenotrophomonas maltophilia
atgatgaagaccaccattctgttgagcacgctcgccttcgcggcgatgaccttccctgcctgggcacagagctcggggcagacccctccggctaggaccctgtcgaccgtggatgctcaggaactgaaggcgtccgctaccggccgctcgttcgatgtgggcggcacgcgtttccagctgtcgccctcggcaacggtaaagcaggccagcggcggccagttcacgatcaccccgcaggcggcggcgaccaccagctcgcgtaccaagcgttcgctggatggcgccgcggcggcgcctgctgatgccggtgccggcaagttcgcggcggcggtctcccgtgacggagcgccggtggtggcgacctcgcgggtcaaggtgttcttcaccgatgcagcatcggcccagcgcgcggctacggccaccggtggcaccgtggtgaaggtctccaaggcgtcgggccaggcgatcgtggagtacccgtcggtgaacgcggcgctggatgcgagcaccaagctgctgtccaccgccggtatccgcgccaccgagccggacgtggtgcagtgggaagagaccaagtaa

SEQ ID NO: 494808 - DNA, 1767 bp, Stenotrophomonas maltophilia
atgaagcgacacacgcaacgctccgcgccaccgcgctctgcgcgcctggcccttgccactgccctggtgctgggcagcctggccgccaccgcgcaggcccaacaggccgatccgctggcgggtatccagtggcacctgctcaacaccgggcagaccgtcccggccgacaccctgccggtggccggcaacgacctgaacgtggatggcctgttccgcaacggcatccgtggccagggtgtcaccatcgccatcgtcgatgatggcctgcagatcgcgcatccggacctggcggccaacgtggcggcggtggccggcaagaacttcaccaacggctcgaacaaccccaccccgaccaacccggacgtcgacaaccacggcaccatggtcggcggcattgctggcgcggtgggcgccaacaacctgggcgtacgtggtgtggcgccggcggcgacgctgaagggcttcaacccgatttcgcgctcagccctgggcaaccagcagagcaacatcgagtacgcctggtgggacggcgcggagtcggccgacgtgcaggtgttcaacaacagctggggcgccggcccgggcaatccgaacctgccgctggcgtacagcgaaaacacgattcgttcgtatgagcaggcactgtcgggtacgcgcggtggccgcggcggcatctacgtgaagtcggcgggcaacaacttcaacaatgcctcgatcagccagacccaggatgtctgcaccaccgacaccaagaaccgcaacaccggctgcgtgccggccggacgcgatccgcgcaacaaccttttcaacgtgatcaccgtaggcgcggtgcgtgccgatggcgtgcgctcgtcgtattcctccaccggctcggcgctgtgggtgtcggccttcggcggcgaatacggcctgcaggcccagtacgcccccggcctggtggcacgcgcctacgacccggccatcgtcaccaccgacgtgaccgggtgcgcgcagggcagcaacaagaacaccaaccgccagaacacgctggacagcaacctgtcggccatcgacagcacctgcaactacaccgccaagatgaacggcacctcggcgtcagcgccgatggtctcgggcgtggcggcactggtactggaagccaatccgaacctgtcctatcgcgatgtgaagtacatcctggccaccaccgccacccgcaaccacccgaaccagccggcggtgacgctggccgacgggcgcacgctggtgccaggctggacggtgaatgctgccggccgtgcctacagcaactggtatggcttcggcgtggtcaacgctgcacgcgcggtgcaggtggccgagaacttccagtcgctcggtgcgctggtcgacagcggctggcgcaacaccacgcgtaccgtggccatcggcaacacctcggccgccgctgcacgcctgaccttccagttggccaacggcgcgcgcaacatcgaaagcgtgcagctgggcttccgggtcaaccaccgcaacacgcgccagctgcagttcgtgctggtgtcacccagcggtacccgcagcgtggtgcaaccggcgttcaccgcgatcggttcgggcacgggtggcgcgcagagcaacttcaccagctgggacctgctgtccagcaatgccttcctggatgagaacgccacgggcacctggacgctggaagtgaccgacatggggcaggccgcgaccgctgcatcgcgtggcaacctcgaattcttcaagatccgcgttctggggcactga

SEQ ID NO: 494809 - DNA, 441 bp, Stenotrophomonas maltophilia
atggtcaatccgctcgcccaggcccatcgcggcctcggcaccacgctgttcagcctgttgaacccgatacccttcggcttcttcgtcggtgcactgatcttcgacgcgatctacctcaacagcgccgaggtgatgtggggcaaggccgccgcctggctgatcaccttcggcctgctgatcgccatcgtgccgcgcctgatcaacctgttcgcggtctggcgccgcaacggcacggccacccgcatcgaccgcatcgacttcttcctcaacctggtcgcggtggtgctggccatctggaacgccttcgtgcacagccgcgatgcgtatgccgttgctgtgctgggcacgatcctgtcggcgctgaccgtggccctgatcgccctgggcctgatcctgttgtcattgcagccgccggtgctgcagggaggtcgtcatggctaa

SEQ ID NO: 494810 - DNA, 1311 bp, Stenotrophomonas maltophilia
atggctaagcacatcctgcccaccgtcgccgcgctggcactggccgtcatcctgtcggcctgcgcgggcaaggccgaataccatccggccgaccagtcgggcccgcagccgccgctgcccaagccggccaacttcctgatgccgccgatgcaggtacccaagggcgttggctgggctgatggacagacccccacggtggccgaaggcctgaagatcgagcgcatcgccgccaatctgctgcacccgcggcgcctgctgaccctgcccaacggcgatgtgctagtggtggaaggcaatggccctggcgaagagccggtcaccacgcccaagcagtggatcgccggcaaggtgaaggcgcgctcgggcaaggctggcaagggtggcaaccgggtcacgctgctgcggcgcacgccgggcaccaacacctggacccagcacgtctacatcgaaggcctgcattcgccgttcggcatccagttgatcggtgacacgctgtacgtggccaacaccggcaacatcatgcagtaccactacgtgcccggcgaaacccgcatgtccgacaagggccgcgagttcaccgacctgcccagcaccatcaaccaccactggaccaaggaactgctggccagccgcgatggcagcaagctgtacgtgggcgtcggctccaacagcaacattactgaaaatggcctggccgtcgaataccgccgcgcggtcgtgctggaggtggacgtagccacccgtggcagccgcatctttgcgtcgggcatccgcaacccgaccgggctggactgggagccgagcactggccagctgtgggccgtggccaacgagcgtgatgagatcggtgccgacctggtgccggattacctcacctcggtgaaggaagatggcttctacggctggccctacagctactacggccagcacgtggacgagcgcgtgcagccacagcggccggacctggtggccaaggcgatcgtgccggactatgccatcggctcgcacgtggcaccgctgggcctgttgttctacaccggccaggcactgccggcgcagtaccacggcggcgccttcatcggcgagcacggcagctgggaccgctcgccactgagtggctacgaagtggtctacgtaccgttcaaggacggcaagccgaccgggcggccgcagaccgtggtcagcggcttcacctcgaaggacgagaagaccctgatgggcgcgccggtgggcatggcgatggatgccgagggtgcattgctggtggccgacgacgtgggcgacgtggtgtggcgggtgtcggcacgatga

SEQ ID NO: 494811 - DNA, 681 bp, Stenotrophomonas maltophilia
atgaagttgaatcatgaaacgtccaacgtggccgcgttcagcaggaacctggaacgcgagctggagaacctggggcatagtgcctatatcgcgccaaccgaccatcaggatgttcggctgggtgcggacgtgcttgcctcagatggccggaacttctcgctgatagagttcaaggatgagaagcgtgatgcagccagtgaagcaagaaagccgcgcaggaagacgctgtgccgtcgcctggatgggtggtctgacatccatgcaagctgccatctgatcggctggcgatcgcgccaggggtccagtatcgagtttcccgtgaggagctacggaacctatgtctgtactcccgcgatcatccaacttcctcaggctgatatcaccttcagcagcaccatctccatccagtgcgagacggtccaggagtttgcacaggcgatggtgtcgcagaaggtcggagtcgactttcaggatttcagggactacgtgcgatggctgctgtcactggacgatgacaccgacgataaaggcgaaaatgacgatgccaacgacgtcgaactgctgatgtgttgtgtcgtagacggtaagctgtacaccaaggagttcgcaaacctcgccgaactcaagctctggatcgacaacgcgcccggccccagcccgcgtagaacctttgtgatgtga

SEQ ID NO: 494812 - DNA, 657 bp, Stenotrophomonas maltophilia
atgacctaccgtgcccccgaaaccgacgacagcgcccctctggcccagcagatcgagcagatgatcgacgagctgcccggcgaccaggtgagggtcggcaccctgctcagtgcgctgggcgatgaaggcctgttgctgatcgtgatcctgctgtcggccatcttcatcattcccgtatcgattcccgggctgagcaccgtgttcggcgcctcgatcctgctgatcggcctgagccgggtgcgcaaccgcccgctatgggtgccgcagaagctggcgcgccgcgagatcgccaccgacaagctgaaggccaacctgggccgtgcgctgaaatgggtgcaccgcatggagcggctgtcgcggccgatgcggctggcggtgatggtgcgctcgaagaggatgatgcgcctgaacaacctggcgctggtcgtggccaccctgctgctgatggcgccggccgggccgattcccttcagcaacacgctgcccgcactggcgctgatgtccttcgccataggcttcatccagcgcgatggcgctgcggtggcggccggttatggcttcgtggtggccacggtggtgtatttcggcgtactgctgggcggcgtcgggtttgctgccgagtccgtgttcaacggggtgcgtggcaactcaatctga

SEQ ID NO: 494813 - DNA, 834 bp, Stenotrophomonas maltophilia
atggacatgggccgcaggcaatcgaccatcgaactggtcgccatcgacatggatggcaccctgctggacccgtcgcaccagctcaccccccgcgccaggaaggccatcgcgcaggcgcgggcgctgggcgtgcacatcgtgctgaccagtggccgcccggttccgggcctggcgccgtacctgcacgagctcggcatcaccggcaacgacgactactgcatcgcctgcaatggcggcctggtgcagcgcgtcggcacgcgcgaaaccgtggtcgagtatccgctcagcttcgacgatttcctgttctgcgagcaggtggcccgcgaagtgggcgtgcacttccaggcgctggacagccagcgcatgtacacgcccaaccaggacatcagctactacaccgtggccgattcgcatctctcgcggatgccgctgtcctatcgccgcgtggaagacatggacccgtcaatgtccttcatcaagctgatgatgatcgacgagcccgaggtactggatgccgccatcgcgcgcctgcccagcgaactgaccgagcgcttcgcggtattgaagagcgcgccgttcttcctggaagtgttcgaccaccgcgccggcaaggggccgagcctgcagaagttggccgagcacctgggcatcgaccgcgccaacgtgatggccatcggcgaccaggagaacgacctcaccatgctgcagtacgccggtaccagcgtggccatgggcaatgccatcgatgcggtgaaggcggtggcgcggtttgagaccagcagcaatgccgatgaaggcgtggcgcgcgcgatcgagcgtttcgtcctgcagtag

SEQ ID NO: 494814 - DNA, 909 bp, Stenotrophomonas maltophilia
ttggttggcacacacaatcggcaagcgccgaccaaggtcggcctctaccaggccccattcgtcccggcaggtgccaaccttggttggcacacgcaggcggccagtgccgaccagggtcggcctctaccagaccccattcgccccggtagctgccaaccttggttggcacacacaatcggcaagcgccgaccaaggtcggcctctaccaggccccattcgtcccggcaggtgccaaccttggttggcacacgcaggcggccagtgccgaccagggtcggcctctaccagaccccattcgccccggtaggtgccaaccttggttggcacacacaatcggcaagcgccgaccaaggtcggcctctaccaggccccattcgtcccggtgggtgccaaccttggttggcacacacaaacggcaagcgccgaccaaggtcggcctctaccaggccccattcgtcccggtgggtgccaaccttggttggcacacacaaacggcaagcgccgaccaaggtcggcctctaccaggccccattcgtcccggtgggtgccaaccttggttggcacacacaatcggcaagcgccgaccaaggtcggcctctaccaggccccattcgtcccggtgggtgccaaccttggttggcacacacaaacggcaagcgccgaccaaggtcggcctctaccaggccccattcgtcccggtgggtgccaaccttggttggcacacgagcaccgaccaaggtcggcccccaccatgccggggctatacccacgtataacccacccatccccatcgccatcggcgctgtaccaccgcgcaatggcggatgcggcagcgcgatgcaagaattccgcacgtcgaaatcaccccaccgaatcccacggcagatgatcgtcttcgtctgccactga

SEQ ID NO: 494815 - DNA, 2319 bp, Stenotrophomonas maltophilia
atgaacaccccacccacgacgcgcctcgccctggccatcatcgcggccaccactgcacctgcctacgccgcagacacgcacgacgccgcgctcgacacgcccaccacgctcaacgccctgcaggtcatcgccacgccgcgcggcgcggccgtggcaccgacccaggtggtcggtcccaaccgctacatcatcaacgccgaggacctcgacgcgatggtcaccggcaacaatggcctggccatgctgaagcaggtgccgggcgcgagctataccgccaccgatgggctgggcctggatatctccgccaccagcctgttcgtgcgcggcttccgcatgaacgaaatgggcatcaccttcgaaggcgtgccgctgaacgacaacggcttcctctcgctcaccggcaccagcgtggtgaacgtgggcgtgcccgatggcatcggcgcgatcacggtcagccccggcggcgcaccggtcagcgtgttctccagcagcgtcaacggcggcagcctggaataccgcctgcgcgacctgcaggacacgcccagcctgcgcgtgaagcagggtgtgggcagcaacagcacgctggtcaccaccgtatccgggcagagcggccagctcggcgagcatggcccgaaagtgctggtcgacctgcagcgtgtgtccgccgacaagtaccagggcgagggcacgcagaacttcctgcgcggcgacctgaagctgcagcaggacgtcgcctggggcgatgtcaccgtgttcctgtccgacagcaaggccaaggtctggggttacaacaacatttccttcgacatgatcagcaagctgggctggaaggccgacatcttctacccggactacgcctgggcgtactacgtggcctcgccggagaacgcagacaaatcctgcggcgcctatacctgtggtgaactgtccgggctgattccctacgacaccggccagagcacgcgtgaccgcgtgtcctcgatcaaccaccgcttccagatcagtccggcgctgagcggcaacgtgcagctgtacaacgccaacagccacacccaggccacgctgaccgacccgaacgtgccgtcgcccaacggcgcgccgttctccgaacaggtgcagaccccgcgcctcaaccggctgggcggcatggtcaacctgcagttcgagaccggcgcgcacaccgtcaccgccggcttctggcaggagaagagcaaggccgccgccaagaccgagtggtaccagcagccgctgctgggcgagggtccgccgctgaaggccaccggcccgttcgatgtgtacggccccgcgttcaagaccgacaacgcatcgagctgggtgacccgctcgcgtcagttctacctgcaggacgacatcgtgctgaacgacacactgaagctgggtgtcggcttcaaggccgtggacttccgcaccagcggcggcggcctcggtgatgccaaggaccggccggtgaacggcacgctgcgcgcgaagagcaacttcctgccacatgtctcgctgttctggagcccgaccgaatccaccgatgccttcatcgacctggccaataccatgaacggctaccgcgtggcccagcgcggcaacatcggctacaccgcctcggcgtggaccatcaccgaccaggaggagttcgaccgcgtggccggcacgctgcgcccggagaagaactggaacctcaccgtgggcgcatcgcatcgtttcgaccggctgacgatcaccggcgacgtgttctacaacgacatccacaaccgcttgctgtcggccgccatcggtacccagttcgcgcagatcaacaccgtgcggctgatgccgaagatgcacgtgatcggcgctgaccttggcatcaccgccgacctgagcgaccacctgcagttctaccagggcgtggccgtggcccgttcgtactacgacagcgatttcgtggtgggtgacacggtgtacccgatcaagggcaacgcccagccgggctacccgcagatctcgctggtcagcgacctgtccgcccacttcggtgactggcgcttcggtgccaccagcacctcttacctgcgccaacctttcacctacgagaacgacatccgcgtgccgacgttctggcaggtcaatacctatgccgcctaccgcttcggtacggacagcgcggtgcccggcctggagctgcggctggacgtgagcaacctgttcaaccgccacagcatcggcaccgccaccattgccggctcgtcgttctcgggggattaccagaccctgcagcgcagcgcgccacggcagctgatgttcagtacctcgatggcgttctga

SEQ ID NO: 494816 - DNA, 390 bp, Stenotrophomonas maltophilia
atgttgctgggtcatcctgttggcatggcacagcacaacccgcgaaccccgttgttcggcatccggggcccaggacggccccggcaggcgctgtccgtggcgccggcgatcgatctgcagggcgagtaccagttctggcaggtctacgaacgcgtggtccgcccgctgcccggcggtgggctgcgccgggcctggctggtgtgccagaaggtgtaccgggaccgcctgcggttcccgcatgacacccgtgaagccgcgctggcgcgtgtgcttttcggcagcaacagcacgcccgagcgcgcagccgaactgcaggacctcttcggccttgtcagccgccgcatggcgtccgttgccgtccggcgacaggcgcccatcccgggaaagtga

SEQ ID NO: 494817 - DNA, 387 bp, Stenotrophomonas maltophilia
gtgttgctgttccggtatcacgatgaacaccacgctcccttctgggctacaccgggcggggagcttctgcccggggagggatatgcggacgccgcacggcgtgagctcagggaggagaccggattggatctgccgataggcgtgcggctggaaaagcgcgatgccgtctacgcggtcgcccgatcaacgcccgcgcgatggctggaagaatattttctggtccgcagccccaaccagcccgacatccagcgtgacgggtggacggaggaggaaaatgccacgatcagggcgtggaaatggtggcgcgtagaagagatgagagaacagcctgcttccctgttcaagccggaatggctgccggatctttttgaacgtgtgcccgcatga

SEQ ID NO: 494818 - DNA, 621 bp, Stenotrophomonas maltophilia
atgtaccatgctaccctaattccagagtggaaccgcagcgcgctggagaccctgcgcgagccgctggaatccggccacatccgcatcgcccgcgcggcacgcagcgtgcaatatccggcgcggttccagctggtggcggcgatgaatccctgcccctgcggctgggccggtgaccgcagcaaccgctgcctgtgcagcgacgagcgtatcaaccgttaccgtgcgcgggtgtctggtccgttgctggaccgtatcgacctgcatatcagtgtggcccgtatggacgcagtggagttgcgggagagcacgccgctgggggagcccagtgcggcggtacgtgcacgggtggaagccgcccatgccaagcagcaggtgcgtggcgggctcaacgcgcatctgccgccggcggcactgcgggcctgtacccgactgagcgaggcagatcaggacatgctggaacaggccatcgagcgcctgcagctgtcggcgcgggcgatgcaccggattctgcgggtggcgcgcacgattgccgatctggcgggttgcgaaacgatccagacggcgcatctggccgaggccattggctaccggcagctggaccgggggaaggcgagcacgtaa

SEQ ID NO: 494819 - DNA, 1122 bp, Stenotrophomonas maltophilia
atgcatctgctgcggacttcagagatcccgcttaccgagctgaacaagctcattccggcttctgcggcgcttgaagagactcccctcccgagactcgagccccgcttcccccttctggtttctgaagaagggcagcttcattggggggcctttgcgtttctcctggacacatttcgaatcgactccacccgtagcagggagaagacgctctccacttacgccgaagggctgaagagctggctggaattcgtcgaatgcaacggaggcgactggacgaggccgactgcattgctgctcagcgagtaccgtcgcttcttgtccacggcaccgaatcgaaagagaagactagctagcgaaacgatcaacctacggacgaccaccgttcgagagttctacaagtttctggagcattgggacggtgagggcctggcagactcaggcgggtcctgggagacggagccgatcaaacagttcctcgctcgaactagtcggctgcggcgggcaaaggcttacaagagaaaagtgcgtgccatgagtccggaggagacttcgctcatggcggcaaccctgaaaatgccttactcactgatgttcctttggactctcgggacgggcgctcgtcgcaccaccgttgcagatctcgatctcacacagcttccaaagaacgcactgaatgtcaactacatcgagactcggacgaagggcggaaaagtcatcaatctggtggtgacctcccgcttggcacaacgaacactcgattactgccagacaagtaggaacaaggcagctgcgaactccactgagaaaacaagccgggtctttctgaactcgagaggcaggccggtcacatcgaagtcctactaccaagccttcaggcgagctgcgaaagtgcttggcctgaacgtgacaccgcacatgtcgcgacataccttcgccgcgcatatgaagagtcgtctcgaggagatggagaggcgaggtgcaaacatcaactcgatcaaggtcattcagcatcttcttgcgcacaacagtgcagagacaaccgagctttacttggcctccgtcagctccatagattcaggcacgcttagggcaatccttgagacagaggaggcattgggatga

SEQ ID NO: 494820 - DNA, 1623 bp, Stenotrophomonas maltophilia
atgagtggcgtctcggaggccgtcttcgccggcgatgcgcctggcgacccagtcaacatctatgacttctcccggctaggccttccccgcaagcccactcacgcgttgctgaatgccttcaccggcgtgacctctacttacagggtgcagagtcgaaagcaagcatggggctcaatccgaaagttcgcaaactttctgaccgagctggacggcgacccgtggaagaatatgaggtcctctacgatctcgcagagatacgcggagtggcttaaggcgaagctcttgctaaagactgggggaagccattttaacctgcttcgacagatatatgcttggctcgccactaacgacaccgagaactcggtgacatggatgaacatatacttcccccgaggtcagttccagagggaagaggagtgttctcgagaaaacatcctttccgaagaggagatgcgtggcattctcatcgcttcaaagaaggggatcgatgaggtaagggcgcgtacaagggtgatggcgtcattggcaaatggagctgatgtgcaatgccttacagccaaggatagagctgacctagatggcatgcgtcgagggatggcccaaggcgtactcggaaagataaatctctgtgcggcgggctttacgccatacagcgtaaagtaccggcctctaaagaggtacctatttctagagatctgcgactacatcccatacctgctgtacatagcaatcgaaacgggcgggaatcctgggggtttgatggccttatgcgttgattgcatcagtgatcatgccgtcgacccattaaagaaagaattcacctgggataaattcagggcgactgagcagagctcggcttcagtcagtaccgaaggtgcgtacgccatcccaaaattgatcggcgaggtagtcgaattcacttcggtacttcgtatcgctgcgggtgctcgtgcggacacggtcttccttagtttgtgtcgtggcagcataggtcgcgtgtcgattcagtcatggcacaacgaactggcgctgttcatagaccggcatggcctacccgacttcaattttgttgacttgaggttgtccggcgcgaggctccttgggaatcgaggcgagaagattgagcgagtccaatccgagcttcagcacaagaattccaagaccaccggcctctatattaggtcgcctgagcgcaagggggccgcacaagcgaaattgttgggatttatggggaaggtagtccagtccgcaaaagcggtgggcttgcatccaagaaactacgagactacccagggttacgactgcaccgacgcgctctcaggtgaagcgcccgcatccaagaagggtcagaagtgcctggatttcctttactgcgccttctgccccaatagcgtagctgtgctggatagtccgcggcacgttgcacgcatgattgctgctcaacgggaacttgacgaaatcaagagactggcggtgacctctcgtgacgtggctgccaggtacaagcacgcgtacgagaattcgcacgaaatcctgtctgcgttgcttggcagggttacgaaagtggttcttcgtgaagcagagaagctctccgtatctgtccctgttattggtctggagtag

SEQ ID NO: 494821 - DNA, 1803 bp, Stenotrophomonas maltophilia
atgaaatccttgcgccaagccacgccgccggtcagcgaattgtctctcgacggtctcggtatcaacttcgaggatgatgagtggttcctcagacgaaacgttatcgacgggattgtggagacgcgaaggctcgatttctcgtgcatccctgatggctggaaagtgccgataaagatctatttggcacttgctatgcttggtaggctggaacgatcgacacgctatgctcttgtcctctacgaacgatttatcgtccttagaagctttgccgtttggtgttatgaggaaggcgtggattcgccaagcgatctgagtcccgagctcatttgcccatggaccgatgctagtcgcgcagtcggccgtgtggaggcgggtgctactcggatgcgggccaaattcatctgtgtcgaggattttctactcaacgtgggagatgtgtctgcagtagtgcgcgcagagatggtccgcgtaggaaaaaggatgtcgaaggaggcatcagttgcagctaagaaaagaaaggtggatgacgacctgagtgagcaggaatgtctcatgctcttggcagatgcaatcaagctaatagaggaagatgggcccacaatagaagccttcatgggtgaggtaatggcgatagaggctgggaggctgtgctcagcaggccgaaggatgaactccttctacatcgctaagcgatctttgcccttcaatggtttcaggtcaaaagctctagctaagttggatccaagagttggctatggcgagcaaataatgctgaagatcgctgagggagcggcgatcttcattatatctttgctcagttccatgaggccatccgaatctcgtcggctcacgactgcaagcgtaaagccatccaatgcgctcggtatgccggcgggtgcagagacctccgatttgatcgaaggggttctgagcaaatctggtaggccgcatgaatgggtcgcagcgccagcagtctctgacgcaattgcattcttggagcgattggggcgcccgattcgtgatcatgtcgggaccgccgcgctcttcgtgctgaatatgtatagaggacgcggaccggctgaagctcgagatgatcagcgtggtgctagagtcgatggctatgttgcactccgcaggagcatgagagcattcgctgaggctagtattcctgggcttgattctgagaaattgaactttcgaccattacgccgattcatggcgcgcttcattgcgcggcgcgaccgctcgagtttgggtgctctggcatatcagtacggacacttggaagccaggatcactgacacctactatgttggtctggatcgtgatctctcaactttgcttgaggaggagaacgcaaatgaggtagtgagcgctatggatgatttgattagtgctgagcacgtctatacgaacttgcctacacctgttatcgcggaaagcatttcacggatgaacggggtcttggagcgagcatcgacaaatcttgaagtgatgaggatgctgggtgccggtgtggtactcggtccttgcgactggggctattgcttctatcgcgaggcgcgaagtcgctgtgacggcgatgcgaatggcccaaatcccggcaagcgcactccttccacatgtgctggttgtctcaactttacggctacagccaagcacgccccttggtgggagttgcgaaggcaagatctgatcagtttcctcaagctgaggggaattcccgagcagtctcgtcgcattgctgaagagcgcctggcttcgacggagctgatcctgaagaaaatagggagtagcctctga

SEQ ID NO: 494822 - DNA, 384 bp, Stenotrophomonas maltophilia
atgcgccagatagttctagccgagactgaggcgcagattgctcgctggagggcgggtggccctaagcctacggtggtctccatcgcttccgcatgcggtatcagtagacaagctttctataaatcacacagagtggccttgggcaagctcaatgatgcggtatctgcgcaggatgctccgagcgcccgggcggctgatgctctgaagctggagatgttgagagtcagatatgaatctgagaaggcgaaagtgaaggtacttacaacgctgtgtggggagctggcctgcgagctgacagatgttcgcgagaagctcgcgcaggagcgtgcgcgtagtgacaggctcaagcggcgtaccgacaaaggaccgaagctagttcgatag

SEQ ID NO: 494823 - DNA, 1359 bp, Stenotrophomonas maltophilia
atgcggcttactagcgcgaccattcttgccagctccgtctttctgactgccgtttcgacgtcatacgccgaggacattctggtggaaggcggatatgtgatgacgatggatcccggcgtcggcgatctagaacagactgacgttctgataaagggaggacgcattgttgccatcggcagaggcctcaaggcgggcaccgctaggcgcatccaagcaaagggtgcgatcgtgttgccgggattcgttgacacccactcccatctttacgtcacgacaatgcgtggtcagttccggaacaaggaaggtcagttctttcctgtgagctcgaagcttgcaggatcaatgacaccacatgatgtcgaaaccgcaatgcatcttggtgcactggagctgatcagcagcggaatcaccaccacggcagactttttcgacaacgttattggccccgcgcatggggaggcgggattgcgcgcacttcagcgatctggaattcgtgggacgctgtactacgggggaccagataagaccacgaagcacccgatgaatctcgatcaacttcgctctattgcctctaggctggacaagagtgcccaagtgggcgtcggcttggcgtggcggctaccacgtaatcgtaccgatgctcgcaactgggccatgcgtcagcaagagttcgatacagcaaatgagctgggactgcctatccaggtgcatgtgagtggcgaacctggcccaatgcttgatgcactcattgagcgtgagtacctatatccaaacctgaccgtggttcatgccccggatgccagcgcggaacaactcagagttctagaggcagctggcagcagcctggccgtgacgcctatcagcgaacagcgcgttggatacgggttaacccgctttgatcagttcgcactcgtcagtaagcaagggctcggcatcgatggtaattcgctagctggcagcgcggagatgttcgccaccatgagacttgcatcccttacttggagtggcggggcacgtagcgaaacggcaccggatgcgcggtccttgcttgaattggcaacgataggcggcgcagaggtcgtcggtatggcaagcgaaattggcacactgtccgtgggtaagcgcgctgacctgcagatcatccgcttggactcgttgaatctcgcaggctttggcggcggagacccttcagccttgctggtccactcggcacacccaagcgacgttgacacagtgataatcggcggacgggtagtcaagatcgatggcgacttggtcgatgtagatcgacccaagcttctgcaggatgcggaaggatctgcgcgtgctcttacgtcaagggtagcggaacgcgattga

SEQ ID NO: 494824 - DNA, 1107 bp, Stenotrophomonas maltophilia
atgcacgggattgtaacggacagattagatcgtaaccgctctgtgatactgtcagattactttgttacatacggttgtatgaacgacctccaggctgctgcccactacctccagaacttactacccgacatggtcgcggagttcgagcccaggcctagttccaaggcgcgcttcttgccccactctctcaacagcatgttccgcctagccgagattgatctgctgggcctgcgggtgctgctggccaaggtcccgacacaggcggaacccacgccaccttctcggctgatcgcacaggtgcacctgctggctgaaaaggccggcttgagggtcgttctcgtgctctcgggcgtgtcgccatacactcgctccaggctcatcgagtctcgtgtggatttcgttgtgcctggcagccagctgttcgctccgagtttcctgatgagcctgcgcgagcgcgattcgtctccaccggtgcccctatccgttgggaagcacctgagccacccagcgcaagcagttctgatcgccgctctactgcggcccgattttgaggagcgcggcatccctgggagcgtcccgtgggtgccgctcgaacttgcgcgcgaggcaggctattcgcgaatgaccgcctcgcgggtagcccgcgaactggtggcggctaacttggtcagcgcccggcgcaagggacgggagacgagcctgcggttcctgcaaacgcgacggtccttgtgggaggcggcgctgcggcggctgcgctcgccggtgctgcgcacaaccggcatcggcaagggtggcttggccatgctgccggccgatgattgtcgtgctgcaggggaaaccggtctgtccgtgttcaccgaactggcagcgccagcgcggccggtcgcggcgattccgcgagactacttccgtgggcatccggaaccagaatggttccccgtggccggcgagggctacgcagatgtgcagcattgggcctattccacccgcttgggcggcgcgggcgccgccgtggaccggttgtcgctgtacttgtccctgcagggacagggcgacccgagactggacggcgcgctgcgggacctgctcgatgaggtcttcgcttga

SEQ ID NO: 494825 - DNA, 2169 bp, Stenotrophomonas maltophilia
atggaaaagctcaagctccaactggagaactgctacggaatccgcaagttggacgtcgtgctggacttcgccggcacggcagctatcgccatctacgcaccaaacggctcgatgaagagctctttggcatgcacccttcaggacatcgccaatggaaacccatcgcgcgacagaattttcccgaaccgcgcgacggtccgcgtggtcagcgatgagaacaatgccgacctcgttgctagcgatgtactcgtgcttaggccatttgaggatttcgccagcaatggaaacgccaccgctacgctcttggtgaatgccacacttcgtgaggagtatgaagcgctgcacactggaatcaccgctgcgcgagcagcacttgtcatggcgatcaagaccacctcgaaaaccaggcgctctgtggagcgcgagattctgtcaacgtttgcgcctgcagacggagatttcaacactgctttggttgagcttaaggatgagctgtcaaaggacttgaagccagacttcaaggatgtcccctacgacgtgctaaacgatgagaaagtcgtggcattcttgggccaaggtgatttccgcacggcgatcaacgagtacacgaagaagtacaacgagttgctcgccgcgtcgaagtacttcaagaagggaggcttcaactattacgcggctaccaacgtcgccaaggagctgaagatcagtggcttctttaaggcaaatcataccgttcgactcagcggagacgaagagaaggagatcaaatccgagacagagctccaagctcttgttgatgcagagcgcgccaaaatctctgaggatgctgctcttcggaggaagtacgaagagcttgaaaagcagatccagaagaacgcgcaggttcgcgagtttgaggcgtacatgcaggggcacgaggaactgctgcccgagctggccgatccagcggccctgaacaagaagctctggctgtcctatctgaaggcgaatcacgatctatacactgacctcatcaacaagatcgagaacgctgcggttcgctcagccaagattgaggcgcaggccggccaagagcacacacaatggcagggtgtgattgatatcttcaatagccgcttcatcgtcccgttccatctcgaggtggccaacaaggttcaagttgttttgggaacggagacagcaccgcgcctgggctttgtcttcaaggaggggggtgatcaagcacaagtcgaacgagacacgcttctacagacgttaagtactggagaaagaagagcgtttcacgtattgactatgttgtttgacattgaggtacgcggctcggcaggcaagcagacactcctagttgttgacgacatcgccgactcttttgactacaagaacaagtacgccatcatccagtacctttccgacttggctgaaggccagaatttcaaactgctcatcttgacccacaactttgatttctatcggaccatcgagagccgtcgtctcgttcatcggaagaactgcttcatggtgtcaaagacagccactgggataagtctggaggctgcccagggcgtgcgtaacgtcttcatcaatgtgtggaaacccgcatttttcaccgataaccgcaagaaaatctgctgtattcccttcatgcgcaacctgattgagtacatgaaggacgaacaagatccagactatcttctcctcacgtccctgcttcactggaaggccggtacagatcagatcaccgtggcggatcttgatggcatctactccaggctctttggcatcaacggacagtctggcaaccctggagagcgactcatcgatattctaggcattgaagtcgctacttgtctgcaggccccggatggaatcaacttcgagaataaggttgtgctggcgattgctacgcgcctgcaagcagagcgattcatggcggggaggatcaacgattcagcttggctggctgcgatcacaaccaaccagactcaggcgctactgaagcgctatcggaacgactttcctgccgaacttcccaacattggcgtcattcagcgcgtcctactgatgacgccggagaacattcatctgaactctttcatgtatgagccaatcttggacatgtccgatcagcatcttcgccgcgtctacacggaagtcgccgcattggtctag

SEQ ID NO: 494826 - DNA, 501 bp, Stenotrophomonas maltophilia
atgagcggggtaagttttttcgctgaaagcaaacatcgcttgttcggaggcagcacactggtgtgcgtgcccctgctttactgctcgacggagtacacacctaccggtgatcacatcgtctatcggcatacctacaaacggccactgttcactcaagaagagcttgagagaattaaaaagagtggaaccgcagaagagcaagttaaggcgtttgttttcaccaaaagccgtatcggctacgagacgatcaaaggcatgagctatgtcggccgatctcggcgctcgtggcagcaaagatacatggagcacgttgaagaagcgctggaaaagaactcgaaccgccgctttcacgaggctatgcgggggatgcagggccagaacgtgatctgtgtgcacgacatctcggcttatgggatccctgaggcctcagccaaaatgatcgaaaggcaactgatcaagacttccacgttgtatccgatgggactaaatatgcggatctag

SEQ ID NO: 494827 - DNA, 780 bp, Stenotrophomonas maltophilia
atgaaatcgttgttgcagtgcgttgagtgcaccaagtcgggcagcgtccaaccgtacctgtttgtaggcgactactacgatggacacacggtcgaggccacatgtccgctcggccacgcagcattctccatcgtccagaacccaaagttcgaaacgctgctgaccgctgccgcagacgcattgatccatgatcagacgcttcaagctgtcgcatgcctggctgcgtcgcgcgagcgacttttcgagcttgcgatccgtgtcttcgcccggtccagcggtgttgatccgggcaacttcgaggcttcgtggaaggaggtggcctcgcagtctgagcggcagttcggtgctttcttgtttctctatcttgctgcgaccggaaagccctacgagttcgacaagaaactggctactgcccggtacgcggcgctccacaaaggcgagattccaacgacaggcgaagcattcgattacgcaggcaaggtctaccaagagatctcgaacttggcgaactacctgcggactgatcacaaagagtcgctgcgtgccgtgctccacgaagagaacatgcgtaaagccggccgagctcccaagggtgttccagtaggaaccattgcactcttcagcatctacggaatcgaggcagaagagaacagggcaaatttcaaggaagcgttcgatcagtacagagactggttgcccgcgctaccggaagttgcggaatcgacacaaaaggcttctggcgtgcatacgacaaggagtcatccgccgcactccgaatag

SEQ ID NO: 494828 - DNA, 804 bp, Stenotrophomonas maltophilia
gtgcgcctctgcaattctgtcgagccgcccatcgaaggggtggttttatttgcactggcccctgttttcgagccagcagccattgaaaccgcccgaaggcggtttcggctgtctacgcctgccgagttgcctagccgggcagctttgccgcaagcacctctaccttctcgatggtcggcggctcggagaataattccccggcctttgccatcaaggccgccgcaaccttgccggagagatgggctttgccaaacgtcatcccgacatcatgttggtgtgcgcttgtctgatcgcatcagcaatgcggtcgacgacaagatcgatgtcggggtcagggtcgggttcatgcgcgacagtcgtttcgtcgcgcgcaaggctgccgatatgcgccttacaatcgttgcagctccgcgtctgaccaagaaggtgggaacaccggatggagtcgatgaactggccggttctccggtgacagcggccatcgacatcattaccgggcgaccgtggtcctggcacttcagtgcaggacgccagtggacgcctgtgtcgccagccttcatcgcggacaacgccgacatggaaatgggcgccgcattggccggaattgcgtttgctcaattggcggactacatggcggccccctatatcgccagtggaaaactggtgcgggttctgcagaaggaagagcccccggcttggggcttgtatgtctatcggcctcagcgcgcccctgtgccagcgagagtccgggtcgtgttcgatgaattgcagacagctattgggtcgttgccggctttgccttag

SEQ ID NO: 494829 - DNA, 333 bp, Stenotrophomonas maltophilia
ttgagaggatggagccatgagaaagtcgaagtttcccccgaggtacaggagcgggccgtccggatggtgctggagcaccagaaggaccacgactcgcagtgggccgcgatcggttcgatcagcggcaagatcggctgcacggccgagacccttcgtcgttgggttcggcaggccgagcgtgaccaaggcatgcgtgccgggccgacgacgtcggatctggagcgattgaagcagctcgagcgcgagaaccgcgaactgcgccaggcgaacgagatcctgcgcaaggcgtcggcgtattttgcccaggcggagctcgaccgccgcaccaagtga

SEQ ID NO: 494830 - DNA, 717 bp, Stenotrophomonas maltophilia
atgcgctcgttcgtcgacgagcaccgcgacgtctacggagtcgagccgatctgccgcgttctgcagatcgctccgtcgtcgtaccgggagcatgctgcgcggcgccgggacacgctccgggcgtcgccgcgcgtccggcgtgaccttgcgctcatgccggagattcagcgtgtctggacggagaaccacgaggtctacggggccgacaagacgtggcgccagatgaaccgcgaggcgattgaggtggcgcgatgcacggtcgaacgcttgatgcgaaaactcgggattgccggggttgtgcgcggaaagtcggttcggacgacgcatccggatccggcccgaccctgtccgctggacctggtgcatcgcacgttcaaagcggaccgtccggaccaactgtgggtcagcgactacacctttgtttcgacttggcagggattcgcctacgtcgccttcatcatcgacgtctacgcacggcgaatcgtcggctggaagctgtcgtcgagccaacagacccaattcgtgctcgatgcgctcgaacaggcgcttcacgcgcggcgtccgggcgacgcgctggtgcatcacagcgaccgcggatcgcaatatgtgtcgattcgctacaccgagcgcctggccgaagccggcatcgagccgtctgtcggaagcgtcggagacagctacgacaacgcgctggccgaaacgatcaatgggttgtaa

SEQ ID NO: 494831 - DNA, 303 bp, Stenotrophomonas maltophilia
atgaccaagctcgctctgtttgttcgcctcgaagccaaacccggccaggaggctgcgcttgccgacttcctggccagcgcactgccgctcgccaacgccgagtccggcaccacggcctggttcgcattgaagtttggcccctcgacgtttggtgtgttcgatgcctttgccgatgaggcaggtcgccaggcgcatctgaacggccagatcgccgcggccttgatggccaacgccgtgaccttgctcagttctccgcccaatatcgagaaggtcgaactgcttgcagccaaactgcctgcatga

SEQ ID NO: 494832 - DNA, 963 bp, Stenotrophomonas maltophilia
atgaaactccacatccttgtttgtgatggcgtgtttgatctggggcttgcggcgctcactgacacagtgggcttggccaatgcgatggcgggctcgctgccacaggctcccgcgcacatagagctcacgctggtgggcgtgcggcgtcgcatccgaactgcgcaaggcttgacggtccccgtggtcactgcgcgtggtatgccggaaccagacgtcgtgcttgtgcccgcgtttggtgacaagatgcctgacacgctctcggctcggctcacacgccccgacgtgcccgacgcggtcgcggcgctacagcagtggtccaccgctggcgcgcacctaggtgccgcttgctccggtagtttcttgcttgcagagagtggcctgcttgatgggcatcgtgcgacgacgtcatggtggctggggccgatgtttcggcagcgctatccgaacgtcacgctggacgagtcacgcatgatcgtgaactcgacacgcttcaccaccgcgggtgccgctttggcccacgtcgacctggccttgcgcatcatccgggagcgcagtccggcgctggcggccctggtggcacgctatctgctggtcgagacacgcagttcgcaagccgagttcgtgattcccgaccaccttgcgcatgccgacccgatggtggagcgcttcgagtgctgggccagacgtcggctcgcgaaggggttctcgctcgccgaggcggccagcgccgcgggcacaagcgagcgtaccttggcgcggcggctgcaaagcgttttgggcaagacaccgctgtcgtatttccaggacctgcgcgtggaacatgccgtgcatctcctgcgcaccggaaacgcgagcgtcgaccaggtcgccgcacaggtcgggtactcggatggggtgaccctgcgggccctgttgcgccgtaagctgggccggggtgtcagggagttgcgacgcggtggatga

SEQ ID NO: 494833 - DNA, 1065 bp, Stenotrophomonas maltophilia
atgctattcaatccacttcaagtaggttctctcaacctgcccaaccgcatccttctggcaccactgacacgcgcccgtgccgacgctggccacatgcccaacgcgctgatggccgagtactacagccagcgagccaccggcggcctgctgatttccgaatgcaccatggtggcgcccggtacatcggccttcgtcaatgagcctggcatctacaacgacgcgcagattgcagcctggaggcaggtgaccgacgcggtgcacgccaagggcggacgcatcttcatgcagatctggcacgctggccgcgcagcctaccctggcgctgccgatggcgcccccattgtctccagcagcgccaccgctattgagggtgagatccacacgccccaaggcaaggtgccgcacgcggtgccccgccccctggccgtcgaagagattcccggcatcgtggctgcgcttgctcaaggcgcacgcaacgccatttccgccggctttgatggtgtggaagtacacggcgccaacggctacctgattgaccagtttctgcgcgacacgcccaaccagcgcaccgatgcttacggcggatcgccggaaaaccgtgcacgtttgctgttcgaggtactcactgccgtgacccaggcgatcggttccgaacgtgtgggtctgcgcctgtcgcccctcaacagcttcaacagcatgaaagacagcgacccgctggccttcatcggcttcgtggccgataggctcaatgccttcaagctagcctacctgcacgtgatgcgcgccgatttcttcggcgtgcagaaggccgatgtcatgcccgtagcgcgtgaaaagtacaagggtgtgttggtgggcaatatgggttacagcgctgatgaggcagaagcagctattgccgaaggtaagcttgacgctgtggcctttggcaccgccttcctggctaacccggacctgcccgcacgcatcagggccaaggcaccgctgaacgcgcctgactccaacacgttctacgcaggtggcgccaagggctatacagactatccgacactgcaggtcgcgtaa

SEQ ID NO: 494834 - DNA, 2652 bp, Stenotrophomonas maltophilia
atgccaaacaattctttcggtgaatcctcttgtgccgctgcggccagcggcctcgtgcaggtgcgtggcgcgcgcgagaacaacctcaaggaggtggacgtctccatcccgcgtaacgcgctggtggtgttctcgggtgtctccggctccggcaagtcctcgctggcctttggcaccatctatgccgaggcccagcggcgctacttcgagtcggtggctccctatgcgcggcgactgatcgaccaggccggcgtgccggacgtcgatgcgatcgacggcctgccgccggcggtggcgctgcagcagcagcgaggctccagcaacgcgcgttcctccgtgggcagtgtcaccaccctgtccagcctggtgcggatgatgtattcgcgtgccggcgcctatccggccaaccagccgatgctgtacgccgaggatttttcgcccaacacgccgcagggagcgtgcccgacctgccacggcctgggccatgtgtacgaggtgaccgaggcgaacatggtgcccgacccctccctgagcatccgcgagcgggcgatcgcctcctggccccccgcctggcaaggccagaacctgcgcgacatcctggtcagcatgggctacgacgttgaccgaccgtggaaggacctgccgaagaaggatcgcgactggattctgttcaccgaggaaacaccgacggtgccggtgtacgccggcctcacgccggccgagacccgcgccgcgctcaagcgcaagatggagccgagctacatgggcaccttcaccggcgcccgacggtatgtgctgcagacctttgccaacacccagagcgcgctgatgagaaagcgcgtgtcccggttcatggagggcaaaccgtgccccacctgccacggcaagcggctcaagcccgaggcgctgtcggtcacgttcgccggcgtggacatcggcgagttcatgcaggtgccgctggaccagttggcggccttgctcgaacccatcgcccagggcgatttccgcgcccatgcagcgggggcggctacggacaaggaagcgaccctacgcgaccgtgccgaacgcgcggcctccggccgcgccgtccatgcggtatcgcccgacgtgcgccgcacctcggcgctatcggaagaaaagcgcctcgccgcgcagcgcctggccggtggcgtgatggcgcgcctgcgtcaactgcgtgggctgggtttgggttacctgacgctggaccgagccacgccgacgctttcagccggcgagttgcagcgcctgcggctggcgacgcaattgagttccatgctgttcggtgtcgtgtacgtactcgacgaaccctcggcgggcctgcacccctccgacagccaagccctgtacgacgcgctcgaccgtctgcgcgaggccggcaactcggtgttcgtggtggagcacgacttggacctgatgcgccgtgcacaatggctcgtggatgtcgggccggatgccggcgagcgtggcggccgcgtgctctacagcggcgagccggatggcctgcgcaagattgccgaatcgcgtactgcacgctacctgttcgatgagatccccgcgccgggaagccgggcacgcgaagcgaccggctggctggagctgcaggacattcaccgccacaacctgcatggcgtgaatgcgcgcattccgctgggcgtgctgacggccgtcaccggcatctccggctcgggcaagtccagcctcgtcgcgcaggccctgccggagctggtgctgctgcacctgggccacgagccggaagacgatgcggccgaaaccgccaccagcgaagggccgacagtgatcgaagcgactggcggtcgtctggcaggcgacgtggacgccatacagcgaatggtgcaggtggaccagaaaccgatcgggcgcacgccgcggtcgaacctggccacctacaccggcctgttcgaccatgtgcgcaagctgttcgctgccacgcccgatgcgcgacgccgccgctatgacgccgggcgcttctcgttcaacgtcgccaaggggcgctgcgagacctgcgagggcgagggcttcgtcagcgtggaactgctgttcatgcccagcgtgtacgcgccgtgcccgacgtgccatggcgcacgctacaacgaggccacgctgaaggtgcaatggaacgggcgcaacatcgccgaggtgctgcagatgaccgtggacgaagccagcgaattcttcgcgggtgaagacgctgtggcaaggccactgcaactgctgcgcgatatcggactgggctacctgcgcctggggcaaccggccaccgagctttccggtggcgaggcgcagcgtatcaagctggcgaccgagcttcagcgcagccagcgcggccgaagcctgtacgtgctcgacgagccgactaccgggctgcatgcgtcggacgccgaccggctgctggtacagttgcagcgcctggtcgatgccggcaataccgtagtgatgatcgaacacgatatgcgcgcggtggcccaggccgattgggtgatcgacgtggggcctggtgcaggcgctgccggcggcagcatcgtggtggcgggctcccttcagcaggtggcccgaacgtctggcagcagaaccgctccgttccttgcacaggagttggcgcgggccgagtag

SEQ ID NO: 494835 - DNA, 3234 bp, Stenotrophomonas maltophilia
ttggccgatctattcacgacaaagcccaagcctcccttggccgaactcctgcggcccaaggcgctggatgaattcgttgggcaacggcacttgctcggccccggcaagccgctgcgtctcgcgttcgaggcgggcaagttgcactcgttcatcctctgggggccgccaggcgtgggcaagaccaccctggggcgcctggccgccagtgcgaccaacagccgattcatcgccatctcggccgtgctggccggggtgaaggacatccggcaagccatcgacgaggcccaggctgaactggacaaccatggtcgatcgacggtgcttttcgtcgatgagatccatcgcttcaacaaggcgcagcaggatgccctgctgccccatgtcgagtccggtctcctgaccctggtgggggggacgaccgagcatccggggttggcggtcaattccgcactgctctcgcgcgcacaggtctataccctcgaaccgctgtccagcgacgaactgaaccagctctacgaacgcgcactgccgcatctccagggcgtcacgctggacgcggacgcgcttgacctgctcaagggctttgccgatggcgatggcaggcgcttcctcaatctgcttgagcaggtgacgaatgcggcgtcgggcgctggcaagaccgtggtcgatggcgagtttgccaggctgtccaccagtccatcgctgcgcaggttcgacaagggcggtgacgagttctactggcagctctcagccttccacaagtcgctacggggctccgaccccgatgcggccctgtattggctggcccgcatcctcgacggcagcggcgacgtaagccaggtgacccgccgcatggtggtgatggccagcgaagacatcggcaatgccgacccgcaggcgctgcaactggcactcaatgccgcgctggcctacgacaggctgggctcacccgaaggtgagataccgctggcccaggcggtgacttacctcgcactgacccccaagtcgaatgccgcctatgcggcctgggatcaggccaaggcattcgtcaagcgcagcggttcccagccagtgccactccatcttcgcaatgcgccgacgaagctgatgaagcagatgggctatcgcgaaggctaccgctacgcgcatgatgagcccaacggctatgccgctgggcaaacctattttcccgagggcgtggcgcggccgggctggtaccagccaacggacagggcgtcgagcgaaggctgggagaaaggcttgcttggctgcgctcgctcgatgacgcgacgccgccaagcccggacgcttgaccgacatccccccgaaatcggcccattgctacctcacgaactacaggataagaatatgccagacgcttctctcggtgaatcctctgcgaatatcagacggagtcgagttgcccgctatctacgcacggagtctggggcggcggtgctgctggtgatcgtcacggttgtggcgctggcgtgggcgaactcgccgctatccgatgcctatttcgggttgtggcacctggacgtcgggttcaactttgggccgctgggcctgcacatggacctgcatcactgggtcaacgatggcctgatggtcatcttcttcttcctgatcggcctggaggtgcgtcaggaattcgcccacgggtcgctcagggaccccagccgtgcccgtctcgccctgatcgcgggggtcgcgggtgttgtgcttcccgcgctggtgtacgtcctgctcgtggggctggccggaggtcagggcctgcacgggtggggggcggtggtcggcaccgatacggcgttcatgctgggcaccctggcgatcgtcggtccgcggctgtctggtcaattgcgtgtgttcctgctcaccctgaccgtggtcgatgacttcctcgccgtgtccatcatcggcatcgtctatagcgaggagatccgcgtcgtcccgttgttgatcgcccttgccagtctcgtcgggttgtggttgctggggcgcacccgccagtggcgggcaatgccgtatgtgctgatcgtgatcgtgctgtggctcgcaaccgtgtattccggcatccatgcctccctcgccgggatggccgcggggctgctgatccccgcctatgcgacgcaacgtcacggggtcgttgcggcaagacagttgttccgtgacttctggcagtctccgagtgccgcatcggcccgcgcggtggactacgggctgtcccggggtatctcggtgaacgagcggctgcacgagttcctgcggctgccgacggcgctgctgatcgtgccggtgttcgccttggcgaacgccggggtggacctgcgtggcgggctgctcgccgaggcctttggctcgccagtcacgtggggcatcatcgcagggctcgtgctcggcaagctcctgggcatcgggctcaccacgctcgtcgccatccgtctcggcctgggccggctgcccgagggcgtcggggtggggagcgtgttcggtggggcggcgctgtccgggatcggctttaccgtgtcgctgctgatcatcgggctcgcgttcggcacgacctcggacctgggccgccaggcgacggtcggcgtgctcgtgtcgatggtgttcgccacgttgctcgggtggctcatcttcaaggtcgccgcccagcggtggggtgagaagaccgcggacctgccgatggtgcttgagccgccggtcgatccggagatcgatcacatccgcgggccggaggacgcgcagctcacactcgtcgagtacgtggacttcgagtgcgagtactgtgcgcacgccaccggttcgtgggacgatcttcgcgcccacttcggtgacgacctgcggtatgtggtgcgccatcttccgcaccacccgcacgggccgattgccgcgcgtgcgtccgaggcagcggcgaaccaggggatgttctggccgtggctggacttcgtgttcacccgtcagcacgcgctggagcgcgaggatctgatcggctacgccgcagagcttgggctcgacgtcgatcggttcatcgccgatctcgacagccctgcggtgatcgagcgtgtcgagcgcgacctcgccagtgcggtcgccagcggtgcgcacgccacgccgacgttcttcgtcgagggtcgccgcctgcgcggcagctacgacgcccgctctgtcaccgcagcactggaagccagccgccgcggcacccgaactcaggaagtcccgtcctga

SEQ ID NO: 494836 - DNA, 528 bp, Stenotrophomonas maltophilia
gtgaaagagccggccaacatcaatacgacgaccgtacaccccactgcgaccgccaccgtgtacggcatgccggcctataccgatcgtgctgccgccgcgggtgaagtgcacgcgcgcccgcatctgttgattcaggccccccgcggcatattgcagctcgctttcatgaccgaaggcgaccaggccagggatcagatggcgatgagcgagttgtcccatcgcttcggcgttgccgaacccgaccatgctacgccgcttcacggcgtgacatgggatgaaggagacctgcactgcgaaaagcacaccgagttctcgacgtatctctggtgcgcttcgctggattccgagacgggagagccgtgcggcgaaaatccgttcaagcatggatttgttcctcccggcccggtcgtatccggcatccgtttgagacttcttccgtggacgcaggaaacggagaaggaggtcgatcgcttcgatcctgccagcctgtgctactcgctggtggagaacggctcagcgtcgctttga

SEQ ID NO: 494837 - DNA, 399 bp, Stenotrophomonas maltophilia
atgtccaatcctgtcatttccggcgacggcatcttctcgcacgtcttcgtcggcgccgccgacctccaggagtcgaccgcgttctatgacgccgctctgggtgctctcggcatcaagaacctcggtcctttcggcaacggatgggtgcttttcggtcgcgaaaagccggctttcatcatcgcccgtccgggcaatggtgaagcgtcttccagcaacggcgtgacggtcggctttgcggccgccactcccgccgaagtggacgccttccacgccgccggccttgccgcaggcggtaccgacgagggccagcccggcccgcgtggccacctgccgggtgcctatgcggcctacctgcgtgatccggcgggcaacaaggtctgcgcgtacaccttcgtctga

SEQ ID NO: 494838 - DNA, 1110 bp, Stenotrophomonas maltophilia
atgaaatcacgtgcagcagtagccttcgggccaggaaagccgctggaaatcgtcgagatcgacgtcgagccaccacgcaagggcgaggtgctcatcaagatcacgaataccggcgtttgccataccgacgccttcaccctgtcgggcgaggaccccgaaggtatcttcccggtcgtgctgggtcatgaaggtgcgggtatcgtcgtggaggtgggtgaaggtgtgaccagcgtgaagcctggcgatcacgtcattccgctctacaccgccgaatgcggcgagtgcctgttctgcaagtccggcaagaccaacctgtgtgtcgcggttcgcgcaacccagggcaaggggctgatgcccgatggtacgactcgcttctcgtacaacggtcagccggtttaccactacatgggctgctcgaccttcagcgaatacacggtcgtcgccgaagtctcgctggccaagatcaacccggacgccaaccacgagcacgtctgcctgctgggctgcggcgtgaccaccggcatcggtgccgtgcacaacacggccaaggtacagcccggcgactcggtggccatcttcggcctcggcggcatcggtctggctgcgattcaaggtgcacgccaggccaaagcggggcgcatcatcgccatcgataccaatccggcgaagttcgaactggctcgtaccttcggcgcgaccgaatgtctcaacccgaaggacttcgacaagccgattcacgaggttctgatcgagatgaccggctggggtgtcgatcacaccttcgagtgcatcggcaacgtcgacgtgatgcgttcggctctggaagctgcccaccgcggctggggccagtcgatcgtcatcggcgtggctggtgctggcaaggaaatttcgacccgcccgttccagttggtcaccggtcgcacctggaagggttcggcgttcggtggggtcaagggccgcactcagcttcccggcatggtggaagacgcaatgaaaggcgagatcgatctcgccccgttcgtcacccacaccatgggcctggacgacatcaacaaggccttcgacctgatgcatgaaggcaagtcgattcgcacggtgatccactactga

SEQ ID NO: 494839 - DNA, 891 bp, Stenotrophomonas maltophilia
atgaaagtagcagttgcgaaatacgccgtgggtcagcccacggacttcgaggcattcgcagcgcggcagcggcaggttctggaggaggcgagccgtgccggagcggaactggccgtgttgcccgaatatctgtccctcgaactggctgcgatgttcgagcctggcatccgccaggatttcaacgcctcgctggccgcgctgcaggccttgcagcctgcgtggctggacctgtacaccgacctggcgcgcgagctgcgcatgaccattcaggctggtacgttcttgacccgggttggaccggatcgctatcgcaaccgcgcgtggtggtttgcgccggacggcacgcgtgattaccaggacaaattgcagttgacggggttcgagaaagacactggcgtcatcgaggggggcgacgaactcaaggtgttcgacctgaatggcgtgcgtgccggcatcgctgtttgctacgacagtgagtttccattgcccgtgcgagcccagcgagaggcgggtgcacgcctgctgttggtcccgagctgtacggacacgagggcaggtgcaacccgggttcgtgtgggctgcatggcgcgggcactggagaaccggatgttcgtcgcacaggccgtgacgacgggagccgctgactggagtccggcgctggacacgaacactggcgaggccacgatctatgcacccatggatcgtggattccccgaggacggcattctcgcgactacttgcggcacgcagacatgggcgatcagtgatcttgacgttgaggcactggaacgaaaccaagaacaggcccaggttgcggtcgatcgtgactgggacggacagatgttgcctgcactgcggaaagctcgccactcgggtcatcaggtcgcctag

SEQ ID NO: 494840 - DNA, 609 bp, Stenotrophomonas maltophilia
atgaccagcgacgtgcaggtgctggttcgtcgtggtccggacattgccgaatggttcgatgccgtggcaggcctgcgggcgagcgtcttccgcagctttccttacctgtacgagggcgacaccgaatacgagaagcactacctcgctatgtacgcccgttcggcagacagcctgctggtactcgcgctcgctgatgacgtggtcgtgggtgcgtccacgggattgccgctcggcgatgcggagccggccttccacgtgccgttcgccgatcgaggaatcccgatggagacagtgttttactgcggcgaatcagtcctgcttccggccttccggggccttggcctgggccatcgcttctttgacgaacgcgaagcgcatgcccgttcgttggggggcatgcagtggacatcgttcgcgtcggtggatcgagcagacgacgatccccggcgtccttccaactaccgcagtaatgatcccttctggacccgtcgtggctacgtgcggcagtcggacatgaaggttacgctgccctggaaacaggtgggtgagccgagcgaaaccgagcagacgctcacgatgtggctgcgccccctggagaacgcgaaatga

SEQ ID NO: 494841 - DNA, 408 bp, Stenotrophomonas maltophilia
atgaacgctgccactctcatcactgcctactacgacgccttcaaccgcggcgaccgcgaggccatgctgtccatgttgaccgatgacgtcgcgcacgacttgaaccagggcgctcgtgaggtcggtcgcgaagccttccgcgccttcctgcagcgcatggaccgctgctatggcgagcaactgcgcgggatcgtggtgatggtcagcgccgacggcctgcgcgcaggcgcggagtacgtggtgcatggcgaatacaaagtgacggacgacgggctgccggaagccaagggccagcgttacgtgctgccgggtggcgcgttcttcgacatccgcgatggcaagatcgctcgtgtcaccaactactacaacctcggcgactggatcgcacaggttggaggggacgcctga

SEQ ID NO: 494842 - DNA, 906 bp, Stenotrophomonas maltophilia
atgaacaaggaaatggaactactgcgtatctttcgggtggcggccgaaagcagcagttttcgcgatgcggccgcccggctggggacttctccgcaaggtgtaacccgtgccatccagcaactggagcaacactacggcgaggtgttgtttcatcgaagcacgcgccaggtgcgcatcaccgccttcggcgaagggctgctagaccgagtgcgccccgcattggagcagttcgaggatctgtggcgaacgcctggctccgaccagcaggcctctctgtccggtacggttcgcatcaccgcaccgcacagcctgggcaccagagcggtgctaccggcactggagcgcgtggccgagcgtcatccgggcatcacgctggatgtgcgcctgtccgatcgcatcagcaatacggttgacgaagggattgacgtcgggatcagggtcggattcatgcgcgatagccgcttcgtcgcacgcaaggccgccgacatgcgactccccatcgttgccgctccgcgcctgatcaagaaagtgggcgtacctgcaaaaatcgatgcgctaagcagcctgccagttaccgtggccttggatatcaataccggccgtccctggccttggcacttcaaggcgggacgccagtggacacctaccgcacccactctcgtcgccgacaatgccgacatggaaatgggagcggcgctggccgggatcgcgttcgcgcaactggcggactacatggccgccccctacattgccagcgggaagctcgtgcaagtgctggagaacgaagaacctccggcatgggggttgtacgtctatcggcctcagcgtggcccaattccgggaagggttcgagcggtatttgatgaaatgctggtcgccgttggatcgttgccagctttgccctga

SEQ ID NO: 494843 - DNA, 630 bp, Stenotrophomonas maltophilia
gtgagccacacgacggtctaccggtatgcacgcgagctcggcttgcactcgcacttgcggcaaccgaagcggcgtcgcggttacggccagcgccgcacgggccgcttcgccgaccgcaagccgattcaggctcgaccgcctgaagtcgccgagcgaagccgcattggcgactgggaaggcgactcggtgcgtcccgcacgcggcacgggcgcggtgatcacattggtcgagcggcgaagcggcttcgtgcgcctgacctggagtccggacggcaccgccgatgccgtctcgcaagccatcgagtgccgcatggatcggctggccgactacatccacaccatcaccttcgatcgaggcagcgagttcgccgaggaccgcaggctggagagatcactcaaggctgcgatctacttcgccgatccgcacagcccgtggcaacgcggctgcaacgagaacctcaacggcctgctgccacagtatttcccgcgcagccgcgacttctcgaccatcaccatggaagagctacaagccgccgaggatcgtctcaacgacaggcccagaaagaggctcggctacctaaccccaagcgaggtattcttcaaccccaaccacattgcacttcaacgttga

SEQ ID NO: 494844 - DNA, 780 bp, Stenotrophomonas maltophilia
atggcgaaatacaaacccgccgatgaggttctcaacatgagcaataacatttctggaaaagttgtcgttatcaccggcgccagcagtggcttgggtgaagcgactgcacgccaccttgctgcgcttggcgcgcgcgtagtgctggccgcacgccgcaaagataaactcgacgcattggtgactgagctgaccaatgcaggtggtcaggcaatcgcgtatcagaccgatgtcacctctcaggaagaagtcaaagcgctcattcaaggtaccgtggacacctacgggcgcattgatgtactggtcaacaatgccgggctgatggcgattgcaccgctcagtgatgctcgcactgacgagtgggatcgcatgatcgacatcaacatcaaggggctgctgtacggagtcgcggctgcattgccggtcttccagaaacaaaacagtggccacttcatcaacatcgcatcggttgcaggcctgaaggtattcagccctggcggcacggtgtacagcggcaccaagtttgctgtacgggccatttccgaaggactgcgtcacgaagtcggtggcagcattcgcaccacgactatcgaaccgggtgctgtggactccgagttgaaattcggcagcacccaccaacagagccgcgatttcgtggtggacttctacaagcatgcaattcccgctcaatccgtcgctcgggctatcgccttcgcaattgagcagcctgctgaagtggatattaacgagatcgttctgcgcccaacggtgcaggaattctaa

SEQ ID NO: 494845 - DNA, 990 bp, Stenotrophomonas maltophilia
atggcacgcattgtcagaatccatgaatacggtgacgccagtgttctgaagctggaaaatttggacgtatcggcaccggcggcaaacgaggtgcagattggcgtcaaagcgattggcttgaaccgagccgaggtgatgtttcgcaatcacgcatacctacaggaagccgagttccctagccgcctgggctacgaggccgcaggcatcgtggttgcagtgggtagcgcagtaaccgggatcaaggtgggtgatgcagtcgctctcatcccgcctctggacatcgcccgttggggcacctacggagagctggccaatgtacctgctcatctggtggtgaagagccccgagaggttgtcctttgaagaggctgctgcgtcctggatgcagtacgtcaccgcctggggtgcactcatcgagcaggccaaactcgggcaacacgactttgtccttgtcaccgcggcatcaagcagtgtcggtctggctgccttccagatagcacgcatggtcggcgccacaccaattgcaatcacgcgaacccgtgcgaagaaacaggcccttctggatgctggtgccgcgtatgtgatcgtgagtgacgaagaggatatcgtcgagcgcgtgatggagataacggccggacaaggcgcccgcgttgtgttcgacccggttggcgggcggtccttcgagcccctcacgcagagcatggcccgaggtggcattctgctggtatacggtgcactcagctcggaaccgacgccattcccgctgtttaccgtgctgggcaaaagcctaaccctcaagggctatctctatgcagaaattgtggccgacccagaagtccttgaacgtgccaaggcgtttattctgcaggggctggagtctggagcactgagcccgataatcgccaagaccttccctctgagtgacatccaggaagcccatcgtttccttgaggccaatcagcagattggaaagatcgtggtgacagtctaa

SEQ ID NO: 494846 - DNA, 1479 bp, Stenotrophomonas maltophilia
atgtctgcaatttatcccctgcgccagcaatggctcggtaacatccgtggtgacctgctgtcgggcattgtcgttgcgctagccctgattcctgaggcaatcgcgttttccatcatcgccggcgtcgacccaagggtaggtttgtatgcctcgttctgcatcgccgtcatcatcgccatcgccggtggccgccctggcatgatctcggctgcgaccggcgccatggcgttggtgatggtcacgctggtgcgcgagcacggcattcagtatctgtttgccgccaccatcctggccggcgtcctgcagatgctggccggcgccctgcggttgggctcgctgatgcgctttgtgtcgcgctcggtggtgaccggatttgtgaatgcactggcgattctcattttcatggcgcagcttcccgagctcatcggcatgccgtggatggtgtatgcgatctgtgctgtgggtctggcaatcatctacctgctgccgctgctgaccaaagccgttccttcggcattggtggcgatcgtggttctcacggccgcttccatgtatttcggcttccaggtacgcaccgtaggcgacatgggggcgctgcctgacagcctgccgtcgttcctgattccggatgtgccattcacctgggaaacactccagatcctgctgccggtttcggcgactttggcggtcgttggcttgttggaatcgctgatgaccgcgcagatcgtcgaagacatgaccgataccccgagccagaagaatcgcgaatgtgcgggccaaggcttggctaacaccgtaacgggcttctttgggggcatggcaggctgtgcaatgatcggccagtcggtgatcaacatcacttccggtggccggggccgtctctcgtgccttgtggccggcgtggttttgctccttctggttgtttatgggtcaaacctggtgagtcagattccaatggccgcactggtcgcagtgatgatcatggtcagcatcggcaccttcagctggcgctcgctgcgcgagctggccattcatcccaagagctcttcggtcgtgatgattggcacggtcatcgtgaccgtggctacccacgacctcgccaaaggcgtgttgacaggcgtgatcctgtcggcggtgttcttcacccgcaaggtcggcaagatgctgatcatcgacgacacccaggtcgagaccgactcgcgcgtctacgttgtgaaggggcaggtgttctttgcgtcttctggacagttcgtgagtagcttcaactatctggatgtccccaaggaggtcatcatcgatctgaaggacgcccacttctgggacgtgaccgccgttgatgcgctcgaccgggtagtgatgaagctgcgcgagcacggcgcgaccgttgaggtgttcggtctcaacgatgcaagtgagaccttggtagaccgcttgggaaagcatcgtacgccaggcgccacacggtcgtcgggtcattga

SEQ ID NO: 494847 - DNA, 534 bp, Stenotrophomonas maltophilia
atgcgtcccctgaatgttctgttcctttgcacaggcaactcggcgcgcagcattcttgccgaagcactggccagccatttagggcgcgaacgtatccgcgcttacagtgcgggcagtcatcccaagggcgtagttcatccggtggccctgcaggtgctctcggagattggcttcgacgttgccggactgtcgagcaagccgtgggatgcattcgcaggtccggaagcaccgcagatggatctcatcgtaacggtgtgcgatcgtgccgcgggtgaagcgtgtcccgtgtggccgggccacccggctaccgcccactggggcatccccgacccggccgcagtgcagggcagtgctgatcaggtccataaggcgttcctgagcacgcttcaccagctccagcaccgtctcggattgctgttggcgcttaagcctgaagcgctggaccgcatggccctgcaatcgcaggtgcgggcgctgggcaatggcgccgaggctcacgcgccagataacaccggagaagcctccccgatgtag

SEQ ID NO: 494848 - DNA, 1086 bp, Stenotrophomonas maltophilia
atggacagcgtcgatgtcgtggtgatcggaggtggccaggcgggtctttcggctggctacttcctgcgtcgcagcgggctgtcctatgtgattcttgatgccgaaacgtcacctggcggggcgtggcagcatgcgtggaaatccctgcatctgttctcgccggcgggctggagctcgattcccggttggccgatgcctgctacccgggaaccgtgcccgtcgcaggcggaagtgctcgactacctcgcgcgctacgagcataagtatgcgctgcccgtcatccgtcccgtgcaggtgaaacgcatcagccgctcggggagccggctgcgggtggaagcagatgacggccggcagtggcagacacgtgcagtgatcagcgccacgggtacgtggcggcatccctgcacgcccggatatgaaggtctggacgctttcggcggcgtgcagctgcactcggcccactacagccatcccgaacccttcgccggaatgcgcgtggccatcatcggcagcggcaactcaggcgcacagattctggccgaggtctccaaggtggccaagaccacgtggatcacccagcgggcgccagccttcctggccgacgatgtcgacgggcgcgttctgttcgcacgcgcaaccgagaagtggagggctcagcaggaaggacgtgagccggatattcagcgggatggttttggcgacatcgtgatggtgccgccggtggtggacgcacggcgccgcggtgtactggtctccatgccgccacccgtccgtttcaccgccaccggcatgcagtgggcagatggcagcgaacgcaacttcgacgcggtgatctggtgcaccggcttccggccggtattgtcgcacctggaaggactgggcattgtcaacgctcgtggtcggatcgacgtggatgacacccaggttcggtcggtcgcagcgccatcggtttggctgctcggctatggcgactggaatggcgcagcatcggccacgctgatcggggtgacccgatacgcgcgcgaggcagtaaggcagatcagcgactacatcggggaggcttctccggtgttatctggcgcgtga

SEQ ID NO: 494849 - DNA, 1059 bp, Stenotrophomonas maltophilia
atgaccactgatacctcccgcctgtccttcctggaccggtatctcacgctctggatcttcgccgccatggcgctcggcgtcggcatgggggcgttgttcgaaggtgtacccagcgcgttgaacagcctctccatagggtcgaccaacatcccgatcgcgattggtctgatcctgatgatgtatccgccgctggccaaggtgaagtacgaggaactgccgcgggtcttcgccgacaaacgggtactgatgctctcgctgctgcagaactggatcgtcggtccgttcctgatgttcggcctggccgtgctgttcctgcgcgattaccccgagtacatgaccggcctggtcctgatcgggctggcacggtgcatcgccatggtgctggtctggaatcagcttgcccgcggtgacggccagtacgtcgccgggctggtggcattcaactcgatcttccagattgcgctgttcagcgtctatgcgtggttcttcctgtcctggttgccgccggtgttcggtctgcagggcagcgtcatcgatgtcagtttctggaccatcgccgaggctgttctgatctaccttggtatcccgttcctggcgggcttcctcacccgccgatggttgaaggcgcgcaagggcgtgcaatggtatgaagagacgttcctgcccgccatcagcccggtaaccctcgccgcactgctgtttaccatcgtggcgatgttcagcctgaagggaggcgatgtgctgaggattccgatggacgcggtacgcatcgcgatcccgctgacgttgtacttcatcatccagttcgtcatcagtttcttcatgggcaagctgatcgccaaagactacccccgcaccaccgcgatcgcgttcaccgcagcaggcaacaacttcgaactggccatcgccgtggcgatcgcggcgttcgggctggcttccccggtagccttcgcggctgttatcggcccgctggtggaagtgcccgtgctgattctgctggtccacgtcgccctgcgcctgggcaaaagctactttcctgccgatgcacggagccgctga

SEQ ID NO: 494850 - DNA, 492 bp, Stenotrophomonas maltophilia
atgacccgtcgcgtcctgttcttgtgtaccggtaattccgctcgcagcgtgttggccgaatcgaccctgaaaaagtggggccaaggccgctacgagtccttcagcgccggcagccagccggccggccgcgtcaacccgtttgccattgctcagttgcagcgcgagggtttcccggtggacggccttcgcagcaagtcgtgggacgagttcgccgaagcggatgccgcgccgatggatctgatcgtcaccgtctgcgacagcgcggcggccgaggcatgcccggtagtgttcggcgactttgtacgggtgcactggggcctgttcgatccggccggcgttgaaggctcggacggacagaaagccgaagcgttcgatcgcgcgcaccagatcatcaaggcgcgcctgaaggcgtttctggagatctcagacagcgtctgggatgacagcgaggccctcaaggcccggctcgacccgatcgcacagatcaactga

SEQ ID NO: 494851 - DNA, 315 bp, Stenotrophomonas maltophilia
atggaacataacgctgcaacccacgctcttgctgccttgggccacgccacccgcctgtcgatcttccgcctgcttgtacaggccggcagcggcggcaagctggccggtgacattgcccagacgctctgcttgcctggtgccacgctctccttccacctgaaggaactgttggctgcgggcctgatcagcgccgagcaacatggtcggacgatctgctaccgggccgagttcgaggcgatgaccgcattggtggcctatctcacggagaactgttgtgccgacgaacaggcctgcgaacgacccgttggctgctga

SEQ ID NO: 494852 - DNA, 741 bp, Stenotrophomonas maltophilia
gtgcagcagatccccaacttggtcccaggtgccttggacatcccgacggccaccaagctcaacgacccggccgcgcagccgcaccgcccgcgcatcctgatcctgtacgggtcgctgcgacctcagtcgttcagtcgcaagctggcgctggaggcgcagcggctgctggaacagctcggggcggaaacccgcctgttcgatccacatgagctgccgatgcttgactcggtgccagccacccacccaaaggtgcaggagctgcgccaggcctcgctgtggtcggagggacacgtgtgggtcagcccggaacgccatggcacccttaccgcggtattcaagaaccagatcgactggctgccactggaagagggcagcgtgcgccccacccaaggccgcacgctggccgtgatgcaggtctgcggcggttcgcagtcgttcaacgtcgtcaacgcgctgcgtgtgctcggccggtggatgcggatggtgacgatccccaaccagtcctcggtcgccaaggcctggcaggagttcgacgacgaaggtcgaatgaaaccctcggcgtactacgatcgcgtggtggacgtcatggaggaactggtcaagttcaccctgctggtacgtgggcgcaccgactacctggtggaccgttacagcgagcgcaagggggccatcgaggcggcggcgctcgcggccgctgcaggggtggtggaaactgttttgaacgaggaggaaagtgcgtga

SEQ ID NO: 494853 - DNA, 450 bp, Stenotrophomonas maltophilia
gtgaacgcggtcatctaccacaaccccaagtgcggcacctcgcgcaacaccctggcgatgatccgcttcgccgggatcgagccggaagtgatcgactacctggcccacccgcccagccgcgcgcgcctggtcgacctcatcagggccgcgggcttgagcgtgcgcgacgccctccggcagaagggcactccttatgacgagctggcactgggcgatgcggcactgagcgacgacgcgctgcttgatgccatgctggcgcacccaatactcatcaatcgtcctttcgtgcaaaccgataatggcacgcgcctgtgccgcccttccgaactggtgctggatcctgccgaagcttcccggaccattccggaaggaagatggagagttggtggccgagcacaggggaagcccggcgacctagtctgggtgctgggccgggctggccgcctttga

SEQ ID NO: 494854 - DNA, 1203 bp, Stenotrophomonas maltophilia
atgccgacgctccatcccgcaaaaagcgaaagtgcgtggcgtgtcttcctggtgttcctacgactgggactgacctcgttcggcggcccgatcgcccatctgagctacttccgcctcgagtttgtcgagcgccgccggtggctgacggaccgtagctactcggatctggtggccttgtgccagttactgccaggcccagccagcagccaggttgggatggcgctgggcttggctcgcgccggctggcttggcctgctggccgcctgggcaggttttaccctgccatcggccgtactgatgatcctgttcggatttggcgttgctcgataccaaggcatcctcgaatccggttggctgcatggcctgaagatcgttgcagttgccgtggtggcgcaggctgtatggggaatggcccggaccctatgcccggaccgcctgcgggcagggatggcgcttgtcgccgccgtattgacgctagcactgccctcggtcttcggccagatggtggtgatcatctgcagcggcctgctcggtcgctgggcgctgaaaatcgagcctgcccagggccagttcgcttgcagctatcccgtctcgcgaagaacgggctcggtagcgctgatgctgttggtgctgccgcttgttctgctgcctgtgtgggtggtggctagtggctccccgttggctgtgctgttggaggggacgtaccgtgctggtgccttggtctttggcggcggccatgtcgtactgccgttgctgcagaccgcggttgtccaaagcggcacggtgaccactgcggatctgctcgctgggtacggtgcggcgcaggcggtgccaggccctctcttcactttcgcggcgtacttgggagccctggccaaggggccgctgggtggctggcttggaggccttgtgctgttggcagtcattttcctgccagcctttcttgtgctcgtgggggcgctgccgttctgggaggccctgcgccaccgaaaggctttgcaagcttcgattgctggcgtcaacaccggggtggtcgggattctgctggctgcgttgtacaacccggtgtggacgagtgcgatccatgaccgatgggatgccgcgatggcgctggttgcgttcgggctactggccctcgcgcgtacaccgccgatcttggttgtgttgctggctgccatgacgacctgggccctgccacggtaa

SEQ ID NO: 494855 - DNA, 1173 bp, Stenotrophomonas maltophilia
atgcaagcgatttcgaggattgttcgaaacgggcggtggctcaactacttcgtattgtccgtcgtgttcttggctgccggctgcaagggcgagcatgtgccggcaaaggatctcggggcggacctcgatgaggtggccgcaacactgatacagcagccgttgctccactcaacctcgatcgcagtcgtatatcggggccaggaattcatccgtcatcgcggcaacatggaagccggcaggctgagccctccgaccgacgcgaccctctacgaaatcggttcgttgagcaagaccatggcagggaccctgatggccaatgccgtcctggagcgcaggctggggctggacgacgatgtccggaagtatctgcacggcaattatccgaacctgcagtacaagggcgaccccatccgcatccgtcacctgctgtcgcatacgagcggtcttccgaacatgttgccggaacgcgcgaacacggtgctcgcggacttcaccgatcagcgtacgcctcgtgaactcaatgccatttacgccggctatggcaaggcggatttcttcagggacctgcatgccgtcgagcttcaccaggtgcccggaaaggattacgcctactccagtgctggaacccaactggcggcgcatattctggagacggtttacaagagcgactatgagtcgctgttacgcgaattcttccgcgattccgcggcaatggcggacctcagaatcaggctgggcgatgctgaggcgccccggcttgcggtcggctaccacagtgacaacgcggtaccgacctcgcccatgccggagttgccttggggagcatcggggaacgtaaaggcgaccgttccggaaatggtgaagttcctcaagttccagctggccggtgggcccgtcgtgacggaatcacaccgtactcttgtcgaattcgattccgagttcagcatcggctatttctggaacatcgtcggcggcgaccgcttgaagggcacctactatgcccatcatggtggtgtgccccgctcgcagtgctatatctacatcatgccgaagtatgaccttggcattttcgtcatcaccaaccagagcggcgacaagactgcccacgccatggaggcggcgatcaatacactggtcgagagaatagccgcgcgagataacatctctagctag

SEQ ID NO: 494856 - DNA, 1116 bp, Stenotrophomonas maltophilia
atgctgcctgcactcttgcgcaccgccttgctgaccgttgccctgtcggcatggcttccagcccaggcgcttgcggccggttctcttaaggaagccaacagcaaggccagggccttcatccagcaggccatgcagaagcagcggattccgggcctccagctggcagtggtgcaaaacgggaaagtagtgctgctggagaactacgggttcgccaatgtcgagaaccgggtgcctgttaccggcaagacgctgttcccgatcaactcggccaccaagtcgttcaccggcgtagccatgatgcaactggtccaggacggacgggtggatctggacgcccccttgtcacgctatttggacgatgtgcccgcgacctggcgtggggtgcggatccggcagctgctggggcatacatcaggccttccggagatcatcgactcgcagggggcctttggcggtgcgacggagccggaggcatggagcgcggtcgaggctcggcctctggaggtatcgccaggcgaacagttctcgtacaaccagaccaactacggcctgctgtcgcggatcatcgtcaagttgagcgggcaaccatacgagcgattcgtgacgcagcgacagttcgatgtggcgggcatgccctctaccacgttcggtgacagctatgacctggttgccggagccgccacgatctacagctggtcgccgcggggctcgctggcaccggacgatggtgagcgcctgtcgcattggatttatgaaatgccctacagcctgtgggcgggtggcggaatccagacgacggccgaagagctgtcgcgctggatcattgcgctgtcgcaggaccagttgattgatgatgcacatgtccagcgcatgtggcagcaagagccactgaacagcggggcgaaaagcgattgggccttaggctggccggttttgaaggctgatcgcccgcgccaggtcgcaggcattggcggtgcccgcgcggcattcgtcgtctacccggatgaagacttggccgtgatcgtgctgaccaatcttgccggtgcgaacccgcagcggtttgttcgacgcatcggcgagttctaccagtcgcgggcgaacgactccacccattga

SEQ ID NO: 494857 - DNA, 369 bp, Stenotrophomonas maltophilia
atgactattgatatcagcggcctttctgccaaggaacttcgctcactgattgctcaggcggagaagcagcagtccaaagtgctgtcacgccctaaggccacagcgatgcgcgccaagatcaacaagtacgtcaaggatcatggatacacgatagaggaactctacggcgcttcagtgatcgtgccctccgaaaccgccaagaagcgaggtgatcggaggcctgccaaatcgacagtgcccaagatcgctcccaagtaccgcaatcctgcagtgcgcggccagacgtggtccggtcgagggcggcaaccgcgatggatagccgagctggtagcaagcggaaaatcactgaatgacttcctgatcaagtag

SEQ ID NO: 494858 - DNA, 1098 bp, Stenotrophomonas maltophilia
gtgagatcaattcccttcattgtcgctgccgcgttggcgggaacttcgctggctgcagaggcttctgaggataacctccatagagatccttactttgatccaggaggcgccgtcaggttcaactatggctggctcgactacgggccgaccagccgcctgcagcttgaactgctgcgtgcagaccttgacgctggaaccggaccgttttccttctctgcccaataccgctggtacgatggcttcgacgccgtgcatcacgcctacgcgggctggcagttctccgatgctacccagctcaaggcaggtatccagcaagtcccgttcgggctgctccctaccgtttcgcagagcttctggttcggctccggctactacttgggcattgaggatgattacgatccgggccttgtagtgattcaccgcaccggcagcacgacctggcatctcggctggttctccggagacgaatacgggtccggggctcgctatgatcgctactcctttgatgtcgcgcagaccgaggcgttgccgtatcgtgagcggcaacgactgcatgcacgcgtggagcgcgcgcgcgcctggggcggcggcgagctgttgctgggcgcatcagcgtttgctggcaaggtgcagaacactcagacacggcgtcactacggtcatcagggcgcggccctccacgcacagtggcagcgcgatggttggaccgcgcagttgcagtgggcgcggtaccggtatgccgtgcccggagatcgcatcgcaatgtcggcgttccaatcccccttccaggttgcagcgcaggcggatgtgccaagcgccaacatcgcctattcgttcggccagaagggctggctggatgacatcacctgctataacaacctcagcatgacccgcccggtcgggcaccgcgcgggccttcgtgattcgtggcagaacgtgaccggttgcagcctgcagaaaggcatcatgctcacctatgtcgactggatcgctggccgcaacatgtggtttgccggtggtgatggtatcggcatcgacgagggaggtccttcccgctggcattcacggctgaacttcaacatcggcttctacttctga

SEQ ID NO: 494859 - DNA, 1980 bp, Stenotrophomonas maltophilia
atgcagagcacggctccgcaacatccccccgttcgccagcggatccttccgcaggtgttcattcccacggcagccatcgtcatcgcgctgctggcgcttgctgccatcgcgcccgatatagccacgcggtggttcaccgcggccaagtcatgggctgccaatgatgcaggctggttcaccatccttgcggtggccggcttcctggtcttcgtcgtcggcgtcgccatcagcagttacggccgcatcaaactcggccctgaccacagtacgccggactacagctacggctcctggttcgccatgttgttcgctgccggcatgggcatcggtctgatgttcttcggcgttgccgagcccatcatgcactacgccacgccgccggtcggctcgcccgagtcggccgcagctgcccgccaggccatgcgcatcaccttcttccactggggcatccacgcatgggcgatctacgcagtggtagcgctgtcgctggcgtactttgcctaccggcacaatctcccgctgcgtgtccgatccgcactgtatccgctcatcggcgatcgtatccacggcccgttggggcatgctgtagacacgttcgccgcgctgggtaccatcttcggcctggccacctcgctggggctgggcgtcatgcagatcaacgccggcctgaactacctgttcggcctggaggtcagtacgctcgtccaggttggcttgatcaccgtcatcacactggtggcgaccggctcggtcgtggctggcctggacagcggcgtacgcaggctgtccgagctcaacatgatcctggcggcagcgttgctggccttcgtgctggtctgtggacccaccgtgcacctgatgcaggcactggtgcagaacaccggcatgtacgtttcccagctgttctcgatgaccttcaacctttatgcctacgaacccacgggttggctgggtggctggacgctgttctactggggctggtggattgcctggtcgcccttcgttggcatgttcatcgcgcgcatctcacgtggacgcaccgtccgtgagttcgtggtgggggtgttgcttgtgccgcttggcttcacattcctctggatgaccatctacggcaacaccgcgttgcacatggtgcgggcggagggcatccagcagttggtgcaggcggtctcaaccgacagctcgatggcgctcttcgagtttctggagcacctgccgctgaccatgctgacctcttcgctggcggtcatcctggttgcgctgttcttcgtaacctcagcggactccggtgccctggtaatcgacatgcttacctcgaagggtgagcaggaatcgccggtcttgcagcggatcttctgggcgctgctggtcggcggccttgcgattgccctgctggtggccggcggcttggaatcattgcaggcggccaccattgccagtgcgttgccatttacgatcgtcatgatcctgatgtgctggggactgctgaaggccatgcatctggatgcaaccaagcgctcgatcctgcgcgaggcacgtatcttgccgggtaccagcgaggattggcgggcgcgcctgcgcctgctggcgcacaatccgttgaagatcgaggtgaccggcttcatcgagcagcgtgtcatcccagcattggaagaggttgcggctgagctgcgcaagcaggatctgccggtccaggtctccaagggggaggatggtcgtgcgtggctgcaggttggccatggcgaggagatggacttcttctactcggtacggccccagccctatgagccgccgacgttcgccctgcaggatccccgtcggccggtcagcgagggtacccgtcattaccgtgcggaggtctatctgcgggagggcgggcaggactacgacgtcatgggatggaccaaggttcaactcatccacgatgtgctcgatcaatacgagcgccaccgtcagttcctggacaaggtgcgctcgtag

SEQ ID NO: 494860 - DNA, 1272 bp, Stenotrophomonas maltophilia
atgctcaccagattgaggcttgcagccagcaaagttacaaagcggatgtggttccgttcgaccctgtatggcgccctaggcatcatcacggcgttggcgggcgcgttcctgaagttcctcattcccgtcggccttgccgcgcggatcggcgcagattccgtcggcaacattcttggcattcttgccgcgtcgatgctgacggtcaccaccttctcgctgtccaccatggtctcggcctacgggtccgcgtccagcagcgccaccccgcgcgcggcccgcctgctgatcgaagacacccgggcccaaggtgcgctggccaccttcattggtgccttcctgttctcgatcgtgggcctcatcgcgctcagcaccggcatctacggagatagcggccggcttgtactgttcggggcaactatcgcggtcatcatcgtcatcacagtgacgttgctccgggctatcgagcagttctcacgctttggccgcgtcggcgaaaccatcgatctggtggagcgggcgacccaagtggcaatgaagcgccgcgccgaggagccttcgctcggcggagccagtgcggttcgggtaggagagggggcggtgcagctggtcggcgatcaggtggcctacgttgaacacgtggatgtcgggcggatcaacgccattgcgcaggaacatgatctacgcgttcatctgctctgccagccgggtacgttcgcaaccccaacccgtccgttgatagccatcgagggaaatctacttcctgaagtacagagtaaagtgatctcagccatttcctttagcgacgcgcgctccatcgaaaatgacccacggttcgggctggtcgtgcttgcggaaattgcccagcgagccatgtcacctgcggtgaacgaccctgggacctgcatcgacgtcatcgggacatgtgtcaggctgctctgtgcatggtccagccacggaggggacgctgcgacaggcgaggtgctgtatccgcgcgtgcacgtgcagtgtctcgacgtacgcgacatgtttgaggacgcgttcactccgattgccagggatgccgccgcgtccctggaggtcagtatccggctgcagaaggccttcgcagcgttggcagggtcctcgaatgaagcgacaagagtcgcatcacaggcgcatgcccgcatcgcgttggagcgcggcctattggccatggatttcgaagctgatcgcgaggcgcttcgagccgtcgcatcttatttgactctggaggatgtggaccaccgttcgtag

SEQ ID NO: 494861 - DNA, 777 bp, Stenotrophomonas maltophilia
atggaagcgctatctctgctgcagttggttctgggcggcctgtctggcgtcctggtcggcttcgtcctgggcgtggtcggtgggggcggatccatcctggcggtaccactgatgctctacgtggtcggagtgggagatccgcatgtggctatcggcaccagcgccctggcagtagcggtcaatgcggtgtcgaatctggtgatacatgcccgtagagggaacgttcgatggccttgtgcctcggtcttcgctctggcggggatcgcgggcgcatacctgggttccagcttgggcaaggcgttcgacggcaggagcctgttggcgctgtttgctgtggctatgatcgttgtcggcatcgccatgcttcgcaggcgcaacacgcctggactcacggacgctcggctcggcagaggcaacgcgcccgcgctgattgggctgggcaccaccgccggcgggctttctggcttctttggcattggcggaggctttctcatcgtgcccgcactggtggccgcgacgggcatgccgatgatcgccgcagtcggaagctcgctcgtcgccgtcgccgcatttggcatgaccaccgcactgaactacgcgcgtacaggtctggtcaactggaagctcgcggcagttttcgtcgttgccggcgtggctggcggtattgcaggtgcagcaacttcgacgaagctggccaactatcgtggagctctgaacacggtatttgcagtactgatcttcattactgccgcatacatgctgtggaaggtgagctga

SEQ ID NO: 494862 - DNA, 438 bp, Stenotrophomonas maltophilia
atgaacctcaagccactctccgccagcctcaaggtgtccggccagctcctgccaaaggacattgaagccctgaaggagcagggctttgcgagcgtgatctgcaaccgccccgacgatgaacagccggagcagcccagtcaccatgcgctgcaggccgcctgccaccaggcgggcatgcagtttgcctatcttcctgcgctgcctggcgtcattaccgatgatcaggtgcatacctttgccaggttgatcgaagcgctgccaagccctgttgccgcgtactgcagaaccggcacccgtgctgcgatgctttgggcgctgtcggaagtcgttcacaatggagcggcgtttgaccacgtcctgtctgttgcttcggatgcaggctatgacctttcttccatcgcagcacggctgcagcaaggcccggcgtccggcgactga

SEQ ID NO: 494863 - DNA, 432 bp, Stenotrophomonas maltophilia
atgatccgtctagccgcgttcctgtgcggcgcactcttcggattgggcctggtcgtatccgatatggccaacccagcccgcgtgcttgctttccttgatgtgagcgacgcctgggacccctccctggcgctggtcatgctgggcgcactgatcccttccggcgcagcctacctgtggatacgcgcccgcagaacgccgctgcttgccgtatcgctgcacattcccgcccatcgcatcatcgatcggcgcctggtgatcggtgcggcgatattcggcctgggttggggtctggccggactatgtcccggcccagccatcgcgttgctgggaaccggccagcccttcgcgatcatcttcgccacggcaatgatcgctggcgtgctcctgcatggcctcattcaccgccccactgcaactacgggaaaaccatga

SEQ ID NO: 494864 - DNA, 942 bp, Stenotrophomonas maltophilia
atgatcccatccgtagcggtagacgcccccttggaccaggctgtgcgcctggtcagcgatgcgcgtgccggcctgcttccctcaccttccgtgaagacgttctttgaccctgctacgttcactgccagccacgtcgtacgcgatccaacttcttcagcgtgcgccatcatcgacagcgtcctggacttcgacatggccgcaggccgcacgtccacttcctccgcatcggcgttggtggactacgtgcgtgccgagcgcctgcaggtgcagtggttgctggaaacccacgcgcatgccgaccacctgtccgcggctccatggctgcaggagcaggtgggaggcgcgctggctattggcgaacacatcaccgcagtccaggaaaccttcggcaagctcttcaatgccggtactgcattcaagcgggatggcagccagttcgatcacctgttcgccgacggtgcctccttccgcatcggtaatctgcaggcgatgtcgctgcacgtgccaggccatactcccgcttgtctggcgtacgtgatcggcgacgccgtatttcctggcgacacgctgttcatgccggactacggcactgcccgatgcgacttcccaggtggctcagcgcgccagttgtatcgctcgatccagcgcctgctgttcctgcccgacgccgctcgcgtattcctgtgccacgactacaaagccaccggccgggaccatttcgcatgggaaactaccatcggtgccgaaagggcaacaaacatgcatgtgcacgagggcgtgagcgaagccatgtttgtggaactgcgggaggctcgtgatgccacacttccgatgccacggctgatcctgccgtcagtgcaggtcaacatgtgcgccggccatctgcccgagcccgaggaaaacggcgtgcgatatctcaagctgccggtggacctgctatga

SEQ ID NO: 494865 - DNA, 294 bp, Stenotrophomonas maltophilia
atgaaggagcgcgtgcctgaagtggccgagttgctgcgcttcatggccaccccctcgcgcctgttgctgctatgccagctcgcgcaaggtgaaatgacggtgggcggactggaggaagccaccggcattcgacagccggcgctctcccagcaactggccgaactccgtcaacgaaagctcgtagcgacccgacgggaatcgcggtcgatcatctaccgcatggaagacccgcgcgttgcagcactgctgggcgcgatgcatgggattttctgcgtggacgatgcatcaacttga

SEQ ID NO: 494866 - DNA, 129 bp, Stenotrophomonas maltophilia
atgagggagggggtggctgtctgcttctggtcggaaacggaccccgcacatggtgactatgtgaaacgcagtgagtactccctcttcccgtcagaagccgacgtgttgtcagtcaacttgacgacctaa

SEQ ID NO: 494867 - DNA, 927 bp, Stenotrophomonas maltophilia
atgagcctggcgctggtccacagccgtgcccgcgccggggtcgatgccccgctggtgcgggtggaagtgcacctctctggcggcctacccgccacccagattgtcggcctggccgagaccagcgtgcgcgaatcccgcgagcgcgtgcgtgccgcgctgctctgtgcacgcttcgactttccgcagcggcgcatcacgctcaacctcgcgcctgccgacctgcccaaggaaggtgggcgctacgacctggccatcgcgctgggcattcttgccgcgagtggccaggtcgatccgcagtcgctgctgcaatacgagttcctgggcgagctggggctgaccggcgaactgcggccggtggccggagcgctgcctgctgcgattgcggcggctgatgccggccgcatcctggtggtgccgcccggcaatgccgccgaggcggcgctggccgagcacgcggatgtgcgcgtggcgcgcacgctactggagtgctgtgccggtctgggcaatccgcgcctgctgccgcccgtggagcgcgtggacacgacaccgttgcccctgcccgatctggccgacgtgcgggggcaggcgcatgcacggcgcgcgttggaagtggcggccgccggtgggcaccatctgttgttgatcggcagccctggctgcggcaagacgctgttggcttcgcgcctgcccagcctgttgccggataccgaggaagccgaggcgttgcagctggccgcgattgcctcggtgagtggcgaagggctggaccccagacgatggcggcagcggcccttccgggcaccgcaccacagtgcgagcgcggcggcattggtaggcggcggcaatccaccctgccccggtgagatctcgctggcccatcacggtgtccttttccttgatgagctcgtccttaggtcgtcaagttga

SEQ ID NO: 494868 - DNA, 342 bp, Stenotrophomonas maltophilia
atgcagtgcattcgagtactgatggccctctcgctcgccatgggcctgccggggtgccgggatgaggtggagagttcaacgtatcccattggccagacgggagagacgtgcacagcctacaagggcttcgaccgccagcctcctgaagtagttgtggccgagcttgccaagcgagggttggatcgcagccgtttggtgcataggacagtctgcggcccgatcacaagttgggacattctccccgcaggggcgtcgatcgatcggacacctccgccagacgcatatgtaagcgtccacctgctggaagacggctcggtttccgtcagtacagaccgcccctga

SEQ ID NO: 494869 - DNA, 387 bp, Stenotrophomonas maltophilia
atgtacagattcaaggccgaagtcgtttccatggaggaagatgactactgcatcgtagttggcttggccgacagctcgacgaatccgtctcgttacgtggtattgcagaacgcgaaggcgtatgacgaccaggacgaagagttgggcatggcgcacgcccatatcgaggtcggtggaggtcttgagccttgctatggcggtctggtgcatatctctctgcggcgcatggagcttgagctgtctctctccgaaagtgcacagaggaagcttgggatcactggtgggattgcagtgacactgaaaacgttggaaaacggcagcaagctggaggccgcgttgcggaaaatctgtgttgcggagggtattccgtttgatctgaaatggtga

SEQ ID NO: 494870 - DNA, 558 bp, Stenotrophomonas maltophilia
atgaacacacgcagactcatcttgattgcgctgggcatgttgcctgcagctgcaggcttccccgcagggagtctacgtgtggactttgtatcggaagccttccgcgatggaagtttcatcccgcatgtctacagcgagcgggatgtcctgcgccgctatggtgatggcgaaatggtcgcggacgcggcagggctgatacggcgtagatatctggatccaactacccgattggaggtgctgatgacctccaaccctgacgtcgctccggagttccgaaccatcgatgagatccgcgtttcatcgatcagcgcggggcaacccgctgcaggcagaaccgagagcttgcgcggcgtgaagctgaaaggcgttgccatgggtgacccggcgtccaaggctgccagcgcagcaggcgggtatggcccgagggacacagagcaggcaacgctggggggcttcaaggtcgagcgcacctgtgggttctcggaaggtggatcgagcatttgcttctacgtccgggatggaaaagtggttgcgatggcactggggtttggcccttga

SEQ ID NO: 494871 - DNA, 531 bp, Stenotrophomonas maltophilia
atgaagatgcacggcctggccgctgcggtggtgtgcatcgcagtgatcggcgcgatgtgggtggagtggtccgagcccgcgggcgatcaggtgtgggcctaccagaagctgcagccggccgattaccgcctgctgcacagtgatgcgcgcggcttcgtgaccgcgaaggcccacgagggctttgaactgcacgcgcgccatgccggggcgacgtccttcgagatccgctgcaagggcgtgctggtgatggaggtggagaacgcgccctcgcgcgtgctgatccgcatgcctgccgatgcccactggcgggcaccggatatcgaacgtctgcgcatcagcttcgagcgctggctggatctgcaccagagccaggggcggttgctggtggaaagtgcggggccttcgtgggttgagacgcggtttgggcgcttcaatgggttggtgctggatgagcagcggtgcctgcttggggccccaggccgccgccagcccgatcccaccaactacttcagcgctgaagtgccatcgtag

SEQ ID NO: 494872 - DNA, 357 bp, Stenotrophomonas maltophilia
atgaccacgccgcactcccctcccccgcgcccgatccaggaagcgccgtcacgcgctccgagccctgaccccaacagcctcatcgccatcctgcacgccattggcgcaggcgctgcggccgatggccagccctggcccgagcggcatcatctacgcagccggcagatgcagttgtccgacgccgactgcgcactcaccggccagcgcatcgtgcaggagatcctgctggcggccgagcgcacgcgccagaacggtgagcccgagcagtacgtcggcgaccgggtgatggaggggctggtgatggccgatctggcgctgaccgccttcatccacgagcggatgcgacccaaggactga

SEQ ID NO: 494873 - DNA, 603 bp, Stenotrophomonas maltophilia
gtgttacgccgcaatcgacttcttctgtctgcgggtctgatcccgcttccgtggttcctgttctggaccagcgttgccgccgtgtttgcgccgggcttcaacccgcttgcgcagcacgccagcgagctgctgcaggcgccgacgctcgcaagcatctgcggcaggatcgccgccatcggctccggtgtcggcttcgtggcgttctccatcggggtatggcgggagtccggccgccggcttgcagtaggtgcaatctgctggttggtctttggcatttccatgctgaccaacgggctctggcccatgggccatccgatgcacggcttctacaccatcggtatcgccaacatcattgcaccggcgatgtcacacatcgagttgagcgcgtggtctgccaaccgaagggcgtacgccgtgaccgctgtggtgagcatcgggggcatcgtctatctctggttgaacgtggtgggggcggatccggaggggttcagggggctgacccagcgcgtgttctcttcgatcaactcgctgtggccgttcctggttgcgttatatctggtgcgcaggggttcaagtgcgttgcggacgcagccggcgccttga

SEQ ID NO: 494874 - DNA, 366 bp, Stenotrophomonas maltophilia
atgaggatgtttcgccgtcagctgatctacgttcaagtgcaccaggaccactttatcgcgcgcgtggtgggtggagacaggaccatccgtcgccagtgccatgcccttggcaatcgcgcgggcccgatcaaggacttctctactctccagccccagctcaaggcgatcttctcggaactcttgcctgggttctctttcgtcaagccgtgggggcttctgcactttgatccggttgagtatccggtcacgaaggaggaattggccggatttcagaaggctgccatgcaaggtggtgtgagcttctgttttctctccacgtgggagcagcggcatgaagacaaggatctgttggagatgttcaagtag

SEQ ID NO: 494875 - DNA, 789 bp, Stenotrophomonas maltophilia
atgccagagttcctaaccggtacgccgttctcggcatatcagttcgaggcgacaatcgccaatgcttttacactggctatgctccaagaactcaattcgcgcaatgtacaaaatccgatttcactgctccgcagtgaggtgtcgtatcctggaacggggaagcatgcagacattcatattgggctagggcccctgggaatttttaacaaagaattcgcttcatacgggtattaccaagataactggctggaggcgaaattctgccgtttgtctacggctggtacgccaatcgtccccccgctgacctctacccatctgctgctgaaagatttgctcaggctttgtatgctggtacccgatgcgcgtcctggagatgcgtcgtcatcgggtcgctacttgctgcacgcctaccaaaacaatccgagccagtatctcgtccacaaccgaaactctggcggctcgcggacggaaagggcttggctgtccccgctattagaagcgggcgaccagcatcttgtgattcgagaccttgggaaagaacgaacgaaatcgtttgatgtgaacgttggcaagaaagctgccctctatcaagttgaagctcacatcactaatctcgtgcacaagcctcggacggcaagctccaatgtttattatattgtgctaacccgtatcaatgatttttcggtgatgaagggtaatcttctttacggtcgcagcaatgggcaagcgacgggaaatccaaaattcttccggaacctggcgactgcggctgaccggcgtttggcgtga

SEQ ID NO: 494876 - DNA, 543 bp, Stenotrophomonas maltophilia
atggatcgtgcacaagaaacaatgctaaacgcgggtctgatttttatatattccatctggcttcaggggcagatgtcagatctcgtcatcctcaagaaaaatccggaattggtggtggattttgtggctgacccagccaaaattcctgccgcctaccacgaactgcgagtcagctactgggagcgccagttcggagatgtaaagaaagagttcttggaggtgttcgctgatcagctaacggaactagagctcaaagaaatagacgagatttatcacgttcgcaatatgatcggccacgcccatgtatcaggaggtcgtgattacatgctctatcggcccagtagttcccgcaaggagaaagaggtccttgcagcacttaatataaaatcaattcttgatcaggcagatcctgtgctcatcaagctgccatttgggcagccagaagttttcaagtccctatctgataaaattgaacaccttgatcaagtttgttttgcaaggttagcagcatcgcttcgggtgccgcatggccgcgttaggtag

SEQ ID NO: 494877 - DNA, 489 bp, Stenotrophomonas maltophilia
atgagaaacatggcagtgctcctactcgtgcttgcgcttgccagtccagctgcagtcgcagcggatagcccttcggcacacgccgtgctcaatcggattgccaacgaaggggggcgcaaggtgctttgggacctgtggcagcacgagcgggagtttgggcaagtcacctctggcatcgagtcaggcgatcgtgcatggctcgaggttgcggctgcgctaaagccgttttcagatgcgggcgcctcgctatccatcaattacgcggtagcccgtgcattgcccaaagcgcctgagcgggtcttggcattgaccacccagggattcaagctcgaggacatctgcacatcgccgttcatcgagccagatccgggagtcgcggaggcgtatgaacgacgtacgcttgcggcactttcacgactgaagggcacatcggttgcgtccgttgcggcagaatgcgcggcgcaggtccgccttccggatggggcttga

SEQ ID NO: 494878 - DNA, 447 bp, Stenotrophomonas maltophilia
atggcagcattcgatcattccctggtgaccctccgattcttcggcgacgacctcctgcccgaagaagtcagtgccttgctcggagcgactccaaccgcatcgcatcacaaggggcaggaactcagaggcaaccaatcaggcaccgtgcgtatcgccaggactggaagctggcaacttgatgcggcgcgtcgtgagcctgaagatctggaagcgcagatcttcgagatcctcgatcaactcaccggcgatctcgccgtatggcaggctctggcacgcttccgacctgatctgttctgtggccttttcatgggcagcagcaatgatggtgtctcgctttcgcctcgcgcgctgctcgccttgggtgagcgcggcattgagctcgggctggacatctatgaagccgatgaagaagtgcgcaacgcccagcgccagcaggccatcagttga

SEQ ID NO: 494879 - DNA, 435 bp, Stenotrophomonas maltophilia
atggcacaggacaccgactggacacccgtttcgcatgacacctgcgaccaggtggctgggccgttctatcacggcacccgcgctgacctggccgtgggcgacttgctgagcgcgggcttccgctccaactatcgcgacagcgtggtgatgaaccacatctacttcaccacgattgccaagggcgccgggctggctgcggagatggcccggggtgaagggcggccgcgcgtgtatgtggtggagccgaccgggccgtttgaagacgacccgaacgtgaccaacaagaagtttcccgggaacccgacgcggtcgtatcggagtgcgcagccgttgcgggtggttggggagattgtggagtgggaagcctatgacgcggagttcgttcggcagttgaaggcgtttgttgcttcggggagtggggagatcatcaactga

SEQ ID NO: 494880 - DNA, 252 bp, Stenotrophomonas maltophilia
atgatcgacctgaatcaaatcgatgacctcgcccgtcgcctcagcgacctggtgccgccgggcctgcgcgaatcgcgcgaggaactgcaggccaccttcaagagcgcgctgcaggccggcctggccaagctcgacctggtcacccgcgaggagttcgaagtgcagcgcgccgtgctgctgaagacccgccagaagctggacgcgctggaaacggccgtgcgcgagttggaagggcgcggcgccgcggaatga

SEQ ID NO: 494881 - DNA, 339 bp, Stenotrophomonas maltophilia
atgaagatggtcatggcggtgatcaagccgttcaagctcgacgacgtgcgcgaagcgctggccgagcgtggggttaccgggatcacggtgacggaagtgaagggctttggtcgccagaagggccacaccgagctgtaccgtggcgcggagtatgtggtcgatttcctgccgaaggtgaagctggaagtggcggtgaccgatgaccaggtggaggcggtggttgaggccatcgtgaaggccgccggcaccggcaagattggtgacggcaaggtgttcgtgtacgacctgggcagcgtggtgcgtatccgtaccggcgagttggacgcggacgcgttgtaa

SEQ ID NO: 494882 - DNA, 660 bp, Stenotrophomonas maltophilia
atgcatcttcctgctcttcccccctcttcctgcggcaatgatgccgcctccccgctgctgctcaagcgcggcgagcgcttcctggcccccgatgtctaccgcacctgcctggacgggcgcgaggcggtcatcaaggactactcccgctaccgcggcactcccgtttcgctgatcgcgcggctgatggtgcgccgtgaagcacgcatgctgcagcgcctcggcggctggaagcatgcccccgcgctgctcggcaccctgggcggcctggcactcggcatggagttcattcccggccagaccttgagcaccgcgcaggccgtcggcaatgacgtgttcgagcagctgcaacacgcgctcagccgcctgcatgccgccggcatcacccacaacgacctgcatggcaccaacgtggtggtcagtggcggcgtgccggtcctgctggatttcacctccgcctggcgcgtaccccgctggttgcgccgtggcccgctgagccggcagatgcgccgcagcgacatgaagaacctgctgaagatccgccagcgcgtgaccggccaggcgccgagtgccgcgcaggccgcactggtggccgacccgggctgggtcgccgccgtgcgccagggctggaagcggttctacaagtgggccaagcggcggtag

SEQ ID NO: 494883 - DNA, 909 bp, Stenotrophomonas maltophilia
ttgatcatcaaaatcgtcattgcagcgctgttcgtggcctgcgtgctgtacatccacttccgtggcaaggtccgcgcgcgctggtcgcgccagctgctggaccactccagtttcatggccccgatcaacgtggtcatgtacatgttctcgaaggtgccgaccacgccgttcctggacccgggcaaagagttcccgcagctggagccgctgcgccagaactggcagatgatccgcgacgaggcgctggcgctgcgcgacgcgcagaagatcgctgcctccagcacgttcaacgatgccggcttcaattcgttcttccgtcgtggctggaagcgcttctacctgaagtggtacggcccgtcgcacccgtccgcgaagacgctgtgcccgaagaccacggcgctgatcgagtcgatcccggacgtgcgtgcggcgatgttcgcgcagctgccaccgggcagtgagctgcgcccgcaccgcgacccgttcgctggctcgctgcgcctgcacctgggcctgagcacgcccaacgacgatgcctgctacatcgaagtggacggcatcaagaagagctggcgcgacggcgagtggatgatgttcgacgagacctacatccaccatgcgcacaacgagacgcagcaggaccgggtgatcctgttctgcgacatcgcccgcccgctgcgcttcggcctgccgggcctgttcaaccgcgcggtggcggccacgctgctggccggtggtgcatcgccgaacctgccgggtgacccgaccggtggcgtcaacaaggcgttcggcagcgtctacaaggtgcgcctgaaggccaaggcattgcgcgagcgcagcgtggtggcctaccagctgatcaagtggggcctggtggtggcggtgattgccggtatctgggcgctttga

SEQ ID NO: 494884 - DNA, 852 bp, Stenotrophomonas maltophilia
atgactgacagcaacaactggtacatcgaacacttcgagcgcaccggctcggccatcggctaccgcatcaccggcaagctggacgaggtgcagtcgccgttccagaagatcgagatcttccagaccaccgactggggcaacctgatgaccatcgacggggccatcatgctgaccagcaaggacaacttcttctaccacgagatgatcagccacccggtgctgttcacccatgccgcacccaagcgcgtggtgatcatcggtggcggcgactgcggcaccctgcgcgaagtgctcaagcacagcggcgtggagagcgtgacccagtgcgacatcgacgagcaggtcaccgtgatggcgcgcaagcacttcccggaactgtgcgactccaacgatgacgcccgcgccgagctgctgttcgacgacggcgtggcctacatggccaactgcccggccggcagcgtggacgtggtgatcgtcgattcgaccgacccggtcggccccggcgaaggcctgttcaacaaggccttctacgagagctgcttcaaggccctgaaggacgacggcatcctggtgcagcagtccgaatcgccgctgatgcagttggacctgatcaacgaaatgcgcaccgagatgggcaaggccggcttcggttcgttcaagaccctgccgttcccgcagccgtgctaccccaccggctggtggagcgtgaccatggcgcgcaagggcgacagcagcttcgacttccgccaggccgactcggccgccaagaccttcaacaccctgtactacaccgccgcgctgcacaccggcgtactggtgaccccgccgttcgtacaggcggcactgaagtaa

SEQ ID NO: 494885 - DNA, 1890 bp, Stenotrophomonas maltophilia
atgaccgattggtccctcgaccaagcccgcaagacctactcgatcccgcattgggcggacggttacttcgacgtggatcaggccgggcacatggtggtgagaccgaccggggcggacggcccggtggtatcgctgcccaaggtggtggacgctgcgcgcgcggccggtgccaagctgccgctgctggtgcgcttcccggacatccttggccagcgcctgggcaagctgcaggcggccttcgcccaggcccagcaggactgggagtacagcggcggctacaccgccgtgtacccgatcaaggtcaaccagacccgcggcgtggccggcaccctggccagccaccacggcgaaggcttcggcctggaagcgggcagcaagcccgagctgatggccgtgctggcgctgtcgcgcccgggtggcctgatcgtctgcaacggctacaaggaccgcgagtacatccgcctggccctgatcggccgcaagctgggcctgcagaccttcatcgtcatcgagaagccgtccgagctgaagctggtgctggaagagtccaaggcgctggacgtgaagccgggcctgggcgtgcgcatgcgcctggcctcgctgggtgccggcaagtggcagaacagcggtggcgacaaggccaagttcggcctgtcgccgcgccagctgctggacctgtggaagtcgctgcgtgacaccgagtacgccgactgcctgaacctgctgcacttccacatgggttcgcagatctccaacgtgcgcgacatcgccaacggcatgcgcgaagccacccgctacttcgtggagctgtcgcgcctgggcgcgaagatcacccacgtcgacgtgggggggggcctgggcgtggattacgaaggcacccgttcgcgcagcttctgctcgatcaactacggcctgcattcctacgccagcaacatcgtgcagccgctggccaatgcctgcgaagagttcggcctcaccccgccgcgcatcgtcaccgagtgcggccgcgcaatgaccgcgcaccacgcggtgctgatcgccaacgtgtcggaagtggaagaggcgcaggaaggccgcgtgccggaccagcacgacgatgagccggcggcgatccgccacctgcgcgagatccacgacgaactggacgtgcgcccggcggtggaactgttccaggaagcgcagcatttccatgccgaaggcctggccagctacgcgctgggccagatcgacctgccgcagcgtgcgcgcatcgacgacctgttctatgccatcgcccatggcgtgcgtgcgcgcctgagctacgacgagaagagccatcgctcggtgctggacgaactgaacgagcgcctggtcgacaagtacttcgtcaacttcagcgtgttcgaatcgatcccggacgtgtgggcgatcgaccaggtgttcccgatcgtgccgatcgagcgcctggatgaaaccccggaccgccgcggcatcatcgccgacatgacctgcgactcggacggcatggtggaaacctatgtcgagaacgagagcctggacagctcgctgccgctgcacaagatgaggccgggcgagagctatcgcatcggcttcttcatggtcggcgcctaccaggaaatcctgggcgacatccacaacctgttcggcgataccgacgcggtggaagtgctggccgatgccgatggctacgccatcacccagcagcgccgcggcgacaccaccgacgtgatgctggattacgtgggttaccgcctggacgaactgcgtgcgacctatgcgcagcgcgtggctgcggcgcagctgtcgccggaacgcgcgcaggaactgtcggacgcgctggaagccggcctgaccggttacacctacctgtccgacgaaccgctggtgtga

SEQ ID NO: 494886 - DNA, 321 bp, Stenotrophomonas maltophilia
atgagcgcgcgcgcgatcttccacctgttcctgcatgccgccgtgccagcgttgctggcatggctgttctggcgcaagcgctttgcctcggcgtggctgctgatgctgctgggctggatcatcgacctggaccatctgctggccgagccgatctatgcaccgaaccgctgcagcatcgggttccacccgctgcacaccgcaccggccatcgcggtctatgcggggctgtgcgtgccgaagaaaacgcggttgttcggtatcggtctgatcatccacatcgtgctggacgcgattgattgctggtggatgcatcaccgttga

SEQ ID NO: 494887 - DNA, 1320 bp, Stenotrophomonas maltophilia
atgaaccggcaaccgtcgctgcggcggcgcctgctgctggccggcggcgtcgggctgctgctggtctcgctgctggccagcgcgctgctgggcgagctgttcaagcgcagcgcgcgcgaccgcctcgaccacgaactgcagcaggacatgctgaccctgctgtcacaggccgaagtggacccggacgggcagttgcgcctgcgccaggaacccaatgatgcgcgcttccagcgcgtgttttccggtgcctattggcagatcgccggtgccgatggccgcgtgctgctgcagtcgcgctcgctgtgggatgaaaccctgccggcgaaggccgccgggccggccacgcgcaatctgcccgggccgctgcaacaattcctgcgtgcacgcgtgcagcaggtgcgcctgccacgcgccagcgaaccgttcgtggccgtggtcgccaccgaccgcagcgcgctggatgccgatgttgccgcgttccgcaagcgcaccgccatcgcactgggcgtgctggtcgcggcgtggctggcggtgctggccagccaggtgcacttcggcctgcgcccgctgcatcgcctcggtgcgcagctggaacgggtacgtcgcggcgatgcgcagcgcatcgacacacagggactgggcgcggaggtcgcaccgctgggtgaagaactcaacgcgctgctggaccaccagcaacgcatggtcgcgcgtgcgcgcaccagtgcacaggatctggcgcacgcgctgaagactccactgagcgtgttggccaccgaggccgacggcgacggtacgcactggcgtgccaccgtgcgcgagcagagtgcgcgcatgcaggccagtgtcgaccgttacctggctgcaggactggctgccgaccatcgccagcgcaccgacgtggcggccgtcgcacaggcgatgtgccggctgatggcacgcgtgcatggcgaacgtggcatcgcgttcacggcggcaggcatcgatccggcgctgcagttcgccggcgccagtgcggatctggaggagatgctgggcaacctgctggacaacgccgggcgctgggcgcaacagcaggtcactgtcgaagcggaaaccagcgaagggcagctacgcgtcgaagtgcgcgacgatggccccggcctggccgcagacgcgctggaacgggtcacccagcgtggtgtgcggctggacgagcgcgaaggcagcagcgggttgggcctggcgatcgtaggcgatatcgccgccagctatggcgggcgattgcagctggagaatgcgcagccgggcctgcgtgcgacgttgtggttgccggtggcgtga

SEQ ID NO: 494888 - DNA, 660 bp, Stenotrophomonas maltophilia
atgcgcatcctgttggccgaagacgatgccgcactggcacagcgcctggtgcccctgctggaacaggccggctatgtggtggcggtggtcgccgacggtcgccaggccgaagaaatcggccagatcgaagacctccaggccgccatcgtcgacctcggcctgcccgggctggacgggctgagcgtgatcgagcgctggcgcggcaacggccgcagctttccggtgctggtgctgaccgcgcgcgggcgctggcacgacaagctggccggcttcgatgccggtgccgacgattacctcaccaaacccttccaggccgatgagctggtgctgcgcctgcgcgccctgatccgccgcagccatggccacgccagcccgcgcctgcactgcggcccgctgcagctggacgtcaacgccggccgcttcgagctggatggacaggcgctgccactgagtccgcaggaattccgcctgctcagctacttcatccaccacagtggacaggtgatcagccgcgaccggctgggcgaacaggtgttcgacggcggccacgacccggactccaacgcactggacgtgctgctcggacgcgtgcgccgcaagctcggcatcgacctgatccagaccgtgcgcggccagggctggcggctggccgcgccatga

SEQ ID NO: 494889 - DNA, 291 bp, Stenotrophomonas maltophilia
atgctcgccaccctgcccctgctgctggccctggccaacgccccgaccgccgccgcgcccctgcaggacccggcgcagcaggtcgcgcgtcgcgccgtgcagcagggccgctacgtgccgctggagagcgtggtgcgcgatgcgctcaagcgctacccgggccagctgctggaagtggagctggacgacggcgtctacgaagtggagatcctgcgcggcgacggcgtggtggtggagctggactatgatgcgcgcagcggaaagctgctgaagacggagctcgacgactga

SEQ ID NO: 494890 - DNA, 435 bp, Stenotrophomonas maltophilia
atgttgaagtcgctcaccctcgccactgttgccctgcttgccgtcgcgccggccgtacaggccgcgccgctgggcatggcccaggttgaacagaccctgcgcaaggccggctacacccagatccacgagatcgaacgcgatgatggcctgtgggaggctgacgtgagccgcgccgatggccgcttcagcgaggtctacgtggacccgaagaccggcgagatcttcgatgagcacagcggccgcgcgctgctgactaccgagcaggtgctggcacgggcgcagtcgcatggcctgcgcgagatccattcgctggaacgcgatggtgcgacctggtcgctggaagcccgcaatgcccgcaaccagaaggtagaggtgcgcctgagcggctatgacggccgcatcctgcacagcgagcgcgatggctggctggattga

SEQ ID NO: 494891 - DNA, 480 bp, Stenotrophomonas maltophilia
atgatccgccccctgaccctgctgctgtgcctggccctgccgggaaccgtgctggcccagtccgccgctggcgccactgcgccgcaggctgccggcctggacttgacgctgccgcaggcgccgatgcgctacctcaacgacccggccctgcagcaggacccgcccggcacctattacggtgacaagagcggcccgcgcgtgcacgacgatgcgaagatcgccgacgtgaccgacgacaaggtcaaggtgtccggcagcttcaccaccggcatcggctattcgaagaacggcggcaacagccactacaacgcggccacgctgaacctgagcaagaactacaccaccgatgaaggcaagacccacggggtcaacctcaacatccacgtgagtgagggcaagggcccgggcttcttcggcccgtatggcggctactacggccgcgggccgggctgggattacccgccgccgtacggctggtaa

SEQ ID NO: 494892 - DNA, 1209 bp, Stenotrophomonas maltophilia
atggacctgaaaagcggttacccgtggtgggccgtacgcaacggactgatccaggcgttccccccgctggagaaggatctgcgctgcgatgtgctggtggtcggtggcggcatcaccggcgcgctgattgccgacgagctgtcccaccatggccatgacgtggccgtgatcgagcagcgtgacatcggctggggcagcacggcggccagcaccgcgctgctgcagtacgagatcgatacccatctgctcgaactggccgaacgctacgggcaagacgccgcagcacgggcgtaccgggcctgcgcggaggcaatcccggcactgggcgaagtggcacgcgggttgaaggacgtggatttccagcgcatggacagcctgtacctggccagccgccatcgcgacgtgccgcgcctgatggccgaaggtgaggcgcggcgcagcatcggcctggatgcccgctggctggaccgcgaagcgcttcgcgagcgtttcgacgtggatgccggcggcgccctgctgacccgccaggcggcgcgggtcgatccctactgtctcacctacggcctgctcaaacgagtgcgccgccgcggcggccatgtgcacgaccgcaccgtgctgcacacgctcaagcctggcgcgcagggcgtcaccgcgatgaccgaggccggcgcctcggtccgtgcccgccacgtggtcctggccatgggctatgccaaccagacgtggctggaacagcgggttgcgcgcaaccgcagcagctatgccttcatcaccgatcccatcgaagcggacgtgctcggcaggctgcgcaacacgatggtgtgggaaagcgcccgcccgtacctgtacctgcgcgccaccggcgaccgccgcctgctggtgggtgggctggacgacgccatcgatatccccgcccggcgcgaccggcgcgttgatggcaaggccggcaagctgatgaagcagctgcggcactggttcccacggctggatccgatacccgccttttcctgggccggcaccttcgccgaaaccgccgacggcctgcccttcttcggcccgcacgcgcagtggggaccgcgggtccatttcgccatggcctacggcggcaacggcatcacttattcgatgatcggcgcccagctgctgcgggcccggatcgagcggcgcaagcatgcgctggaaaggctgttcgggttcgggcggttgtga

SEQ ID NO: 494893 - DNA, 495 bp, Stenotrophomonas maltophilia
atgaccgagcacccgccgctgaaaaccgtcgccgacctcaagctgccgcggtacctaggcacctggtacgagatcgcacgcctgccgatgcgccacgagccggaaggctgcaccgacgtatcggcgcactacaccctgctcgacaacggcaacgtcggcgtcaccaaccgctgccgcatggacggcgagatcgaagaggccaccggcgaggcctgcgctgtcgacaacgacagcgcgcggctggaggtcagcttcctgcccaagggcctgcgctggctgccgttcgccaagggcgactactgggtgatccagatcgccccggactacagcgtgtcgctggtcggcagcccggatcgcaagtacctgtggctgctggcgcgcgagccgcgcctggacgcgaccgtgcaggaccattatctggcggcggcccgcctgcagggcttcgatctgtccgaactgatccagacgccacataccggcaaacccacagcctga

SEQ ID NO: 494894 - DNA, 249 bp, Stenotrophomonas maltophilia
atgtaccaggtgatcctgttgaagagtgaatctgcgttcgcgcgcgaacagtggccgcaggtcgacgaactggtcgactacgaaggtgtgagttacagcctgcgcgccggcccgcgccagccgctgccgaccgaccacgactggcacccggtggcggtgtacgcgcccgatgagatcaccgaggaagagttccaggactggtatgcgctgcagcagccgacggtggaagagcttcgcctgaagtactga

SEQ ID NO: 494895 - DNA, 2421 bp, Stenotrophomonas maltophilia
gtgtcttctttcctgcgatcgatccgtgcacgggggccctggtgggtcctgctgctgtgtaccgccttcctgctgtccgcgccggtgctggcgcaggatgaggaccccacgccgaagcagcagctggcggatatcgattccagcctgaaggatgtggagcgcaagcgtggcgatgcagaagccaccgagacgctggcgatgctgtccgagaatgcctcgcaggtacggcgcgatgccgaggcgctggaaaaggcgctgcagccgcagctggaccgactcaacgaacagctggcgcagctgggaacgccggcagaaggggccgctgagccgccggagctggcggcgcaacggcgcaccctcaccaaacagcgtgacggcctggccgcttcggtggtgcaggccaaggccagtgccgtgcgtgcgcagcagctggcggcggacatcgagcagcagcgagccgcgcaacgcacggaagaactgggccagaaggtggcctcgccgttgtcgcccgcgctgtggagcaaggtggccgaacgtctgccgatcgatatcgcgcgggttgcgccattggccgggcagggccgcgatgcgctggtcgccggtatccgcgcccatggctggggcacgccgttgctgggcctgctggccgcgctggtgatgatgttcccactgcggctgtggctgcgcaagctggggcgccgttttgctgcgtccgaacgtgcgcccgatggtcgactgcgccggtccggcctggccatgtggctgctgctggtcggtacgctgctgcccggctatgccgtggtggtgctgatggcggcgctggatgccatcgatggaatcgcgccgcgcctgcaggtggtggccgacggcctggagaccgcaacgttccgcgcggccttcatcgccgcactcagcgcctgcctgctggtgcccaagcgcccgtcatggcggctgttgaacctggacgacaccgccgcgctgaagctgcgcaaatacgcctggggcgcggcggcgctggcctggctgagcacggtgctggtggccctggaccaggccacgcgcaccagcgacgtcaccacggtggcgctggacggactgattgcgctgacttacctcggcctgatcatggccatgctggtgaccctggcgcgcctgcatcgccggcagaccgccgaggccgaggccaagctggaagcgcaggccgatggcgtgggtgcagccacgccggtgcgccgcagcagctggctggtactggcccgggtagcgggtaacatcgcggtggtggccgccatcattgccacattgctgggctacctgaatttcgccaagttcgtgaaccagcaattgatcggcggcagcatcgtggtgttggccgcgacgttgctgttcaagttcgtcgatgacctgagcacgtggatgctcaacgccgacagcaaggtcggccagaccatcctgctcagcaccggcctgagcgtatcgcggctggaacaggcgggcgtgctgctgtcggcagcgctgcgtaccatcgtcgtactgatcgcgctgctggcgctggtggcaccgttcggcaacatcggcgcggtggtggagcgcttcacttcactgttcacgaccggattcgatatcggtggcaccaagctggcaccggcggggatcgtgttggcggtactggcgctgctggccggcctggcgatcacccagctggtgcagcgctggctgaccgacacctacctgcccaagaccgagctggacctgggcgcgcgcaattctgtgagcaccgttgcccgttacgtgggcatcatcatcgcggtgatctgggcgctgtcggcgatggggctgcagctgagcaagctggccctgctggtcagcgcactgtcggtgggtattggcttcggcctgcaggtgatcacccagaacttcgtctccggcctgatcctgctggccgagcgcccggtgaagatcggcgactgggtgaagctgggtgaccaggagggcgacatccgccgcatcagcctgcgatcgaccgagatccaggtgggcgacaagtcgacgctgatcgtgcccaactccgagctggtcaccaagaccgtgcgcaacatgacgatgggcaacaaccagggccgcatccagatccagttcgcggtgccgcccagcactgatgtcggcaacctgcggcaggcgctgctggatgcgtacaccgcgcacaccaacgtgctgaagcagccggcgccgacggtctacatcgacagcattgccggtggccagatcaccatcaacagtttcgcgtacgtggccagcccgcggcaggtgtatgcaacccgcagcgatctgtacttcagcctgctgcagatcctggccgagcggaacattccgctgtcgaccccgaccgacatccacatcatccgcgacccgcaggagtag

SEQ ID NO: 494896 - DNA, 2598 bp, Stenotrophomonas maltophilia
gtgcgcatcggcatcgtcgactcgggcgtgcagcgcaacgcagcggcattgaacgggcgggtggtgggcaacctcaactacatcgatccggcgcgcaacaacctgctggtggacgacgtggtgggccacggcacggcggtagccagcctggccgccggcgcgccggtgggaacctggccgggcggcatcgcccccggtgcgcagatcgtttcggcgcggatcatcgccgacaagccgccggtcgatgacggcagcggcaagggcaattccttcagcggtccgctgggcgtggcgcaggtccaccaggacctgatcagctacaacgtgaaggtgatgaacaactcgtggggcggcctgtactggaccgacctgccgaccaccgcgcaagtggcggccgagtaccgtccgttcgtcatcaaccatggcggcctggtggtgttcgcggccggcaacgatgcgcgcaccgaaccgagcagcctggccgccctgcccagccagctgggcgttgccggctcgctaccggcggccgacctggagcgcggttggctggtggcgaccgcagtggatccctatgcaccgggcacgctggccagctacgccaatgcctgcgggcaggcggcgcgctattgcctggcggcgccgggcagcgcggtctatcccgatgccaatggcagcacctactactggaactacgggacgtccttcgccgccccgttgatctccggcgccgccgcgctggtctggcagcgctacccgtacttcgacaacaacctggtgcggcagaccctgctgggcacggccaaggacatcggcgcgcccggcgtggatgcggtgttcggctacggcctgctcgacatctcgcgggcgatcaagggcccgggccgcttcgactggggtgatgtagtggccaatgtcgatgcgccatcgagtggctcgctgtggagcaacgacatcgtcggcagcggtggcctggtcaagcagggcgggggcaccctggtgctcgcaggcaacaacagctacagcggcgccacccgcatcgagcgcggcatcctgtcgctgcagaacggcggtgtcatccgttccaacgtgaccatcctcggccagcccgacccggattcgaccggcctgcagttcaatggcggcacgccgcgcgtgatcggcaacgtggtcaacggcagcagcgtgttcctgaccaccggcagcaccaccggcaccatcgagggcaactacacgcagcaggcgggtggccagttgatgatcgcgctcggtgccaatgcgctgcaggtgaccggcacggcctcgatcaatggtggcgtgcgcgtgcatggcttcgtctccggctacgtgccgcagaacggcagccgccaggacctggtccatgcggccggtggcctgagcggcaccttcagcagcccggcctcctccagcggcctgcagggcctgtcgctgctgcagagcagctatggctatgacagcaacactgcctggttgaacctgacccaggtgagcgtgacggcggcggcgaccgggctcgcggcctcggcgcagtccgcggcgcaacgactggaaggtgcgttcagcgcactcgatggcagtcccgccctgcagggctcggccttcggcgcggcggccggtgcgctgcagtggaccggcggtggcagcgagggcctggcagccagcctgcagagcctgtccgggcaggcgcatgcgcgggccgagtcggccaccttcgacagcatcgacatgtcgcgccgtgcgatcgccgagcgcttcgatcgcgtgcaggcggcgccgcgcctgcgcggggcctggcagagcgcgctcggtgaggccgggcagggcagttttgccggcaatgccgccgacagccgtggctggatggccggccaggacctgccgctgggcagcaatgggctgatgggcgtggcctttggcgagacccgcagcaatggtggcagcagcttcggcggcgatcgtgggcgtgatcgccaggcgcaggcgcagctgtacgccggctggaacctgggccggggctatgcgctggcgcaggtcggcagcggccagttcacccgtgcgctggatcgccagttgctgctgggcgccggtgcctatggtgtttccgcgcgttacggcggacgcttcagcagtgccagcgtcgaaggcggctatcgtttcggccgcgcgggcgcgtcgttgacaccgtatctgggtgccagcaccacgcgcgtggataccgatgccttcaatgagctgggtggtttcggcttcggcctgcgtggcgacgccaaccgcgtgcagcgcagccagatgctggccggtatccgcggcgagcgcggctgggggcgctggacgctgcgcgggcacgccgagtggcagcaacggctcgacggtgccgatgcggactggcaggccagcttcgttggtgtcgatgcctgggcacccctggcgggatgggacgcaccgcgtggcagtgcgctgttcggcgtggcgctggagtcgtggtggggccgcaatggccgcctgagcctgggcttcgaccagcgcgtcggtggcgagggcgcgcgccaggcggcgctgcgctacagcaccgggttctga

SEQ ID NO: 494897 - DNA, 1098 bp, Stenotrophomonas maltophilia
atgctattcgaaaccctcgccaccaccggccacgaacaagtggtgttctgccacaaccacgatgccggcctgaaggcgatcatcgccattcacaacaccaccctgggcccggccctgggcggcgtgcgcatgcgcccctacgccagcaccgacgaggcactggccgacgtgctgcggctgagccggacgatgacctacaagaatgcgctggccggcctcaacgtcggtggcggcaaggcggtgatcatcggcgacccgaaggtggacaagaccgaggtgctgttccgcgccttcggccgttacgtcgactcgctgggcggccgctacatcaccgccgaagacgtcggcaccgacgtcaacgacatggagaacatctacctggagagccagttcgtgaccggcgtgcaccaggtccatggcggctccggcgatccggccccgttcaccgcctacggtgcgctgcaggcgctgatggcggcgatgcgcttcaagttcggccacgaggaagtgggcaagaccagcatcgcggtgcagggcctgggccacatcggcatggagctggtgaaactgctgcgcgaccgcggtgccaagctgtatgtcaccgacctggacagcgcactggttgatcgcgcggtcagcgatttcggcgccgaagcggtcaagcccgacgagatccacgaagtgaacgccgacgtgttcgcaccgtgcgcgctggaaggcgccatcaacgccgacaccctgccgcgaatcaaggccaagatcatctgcggtaccgccaacaaccagctgtcgagcctggaaatcggcgatgaactgcacgcgcgcggcatcctgtatgcgccggactatgcggtcaacgctggcggcgtgatgaacgtgtcgctggagatcgatggctacaaccgcgaacgcgccatgcgcctgatccgcagcatctatcacaacctcacccgcatcttcgaactgtcgcagcgcgagaacatcgcgccgcagcgtgcggccgaccgcatcgccgaaagccgcatcctgtcgatcggcaagctgaagatgccgctgggccgcagcaccccgcgcctgggcaacctgcgcggcggctga

SEQ ID NO: 494898 - DNA, 1077 bp, Stenotrophomonas maltophilia
atgacagcggcatggtggcgatcgctgcgcggctggctgacacgttcgaccggggcggcaccggcgcggctggttgccgcatcccgccaggcggtggccgccgcagccgcaagcctgcagggcgaggcgctgccgtcgccggagatcgccgctcacctgcaacgcgggctgcatgcgcttgcgttgtacccacggctggccggcgagccaacgccggtgcaggacccaggcctgggcgaggcggtggcgcgcgcgctgcaggaccgcgactgggcggccaggcagctgccccgccggccgcagctgctgccgcagctgatccagaccgtcaacgacgatgccgcctcggcccgggtgatggccgcgatcatcggccaggatccggtgctgaccggcaacctgctgcgcatcgccaacagcccggcctacaaggtccacgagcgcccggtagagagcctgcagcgggcggtgaccctggtcggcaccgagggcgtgcgccagatcatcagtgcggtactggtgcagccggtgatgcaggtgcaatgcgaggtgttcccgcagttcagcgcgatcatctgggagcacgcactgctggcatcgcgtgcagcggccgaccacgcacgcacggtcaccttcggcgatgccttcgccgcgcagtggctgggcctggtgcaggggctgggtgcggcgctggtgatgcgccagctgctgcaggaggcacaggcccgtggcgagcccgtggagccggcgttggccctgcagctgttgcagcagtggtcgttgccgctggcgcagcgggtcgctgccgcatgggagttgcctgagccggttcaccaggccttggcggtggatgcggaaggatcgttggccgacagcctgcgcctggcgagcgcggccgcagcggccagcttgttgtgccgccatgggcatgccagccagagccgcatgctggccctgctggagcagctgccctcggcaccgccgcatgcattgcgctggatctggcggcgcctgcatgggcgcaacgtggaaacgctggatgaggccggacaggatgaggccgctccggcgtcctga

SEQ ID NO: 494899 - DNA, 1593 bp, Stenotrophomonas maltophilia
atggcgtggctctaccatcggggcatgagcctgcccaagccgctgtggcgacgcctgctgcgtgttgctgcgatcatcctcgccgtgctggtgctgctggtcctgtccgggctgctgctggccgaccatctcacgccgcaggcgcatggcgcgccttcgcacgtgctgccgctgcagccggcacagacccgcatcgaccagcagatcgtgccgctgcaggcggcccatcccggccagtcgggcgtggccttcctcagcgatggtatggatgccttcgccgcccgcgcgatgatcaccacccaggccggccgcagcctggacctgcagtactacatctggcacgacgacctgatcggccacctgatggccaaggcgctgtatgacgccgccgagcgcggcgtgcgcgtgcgcatcctgctcgatgacatgaatgccaaggacaaggacgcgctgatgatggcgctcgatgcccatccgaacatcgagatccgcctgtacaacccgttccgcaaccggaccggcatcctgcgcatggtggagatggtgcagcgcttcttcagcgtgaaccaccgcatgcacaacaagagctggatcgccgatggccgcgtcgcgatcgtcggtggccgcaacatcggcgaggagtacttcagcgcgcgcaccgacgtgaacttccaggatctggacctgctggtcgccggccccgccgtggagcaggccaaccggatcttcgacgactactggaacagcgaaaccgccattccggtatccgcgcttgccttccataccgacgcacaactgcgcctgctggtgcgcgaatcggaccacgaggcgcagcgggacgtggcccgcccctaccttgcgcgcgtggccgaatcacgccagcggcagcgcccgagccccgagccgttgcactggagcggtgccgtgcgcatcgtgtcggacccgccgatgaagcaccgcagggatgatcgcgccacctggctggtgtcgaccctgatcagcgagctgcaggccgcccggcacaaggccctgttgatctcgccctacttcgtgcccggcaacgagggcctcgatggcttttcggcaatggccgggcggggcgtgcaggtgggcgtggtcaccaactcgctggccgccaacgacgtcgccgccgtgcacgggggctacatgggctaccgcgtgccactgctggaagcgggcgtccacctgtacgagctgaaggcacagggtcagtcgggcgatgccggcgtgttcggcagcagcggcgcgagcctgcacaccaaggcattcctgatcgatgaccgccgcggtttcgtcggctccttcaacctggacccgcgctcggcctacctgaacactgaaatgggtgtgctgttcgacgatccggtgctgggtacacagctgcgggacgaatacctgcgcctggctgaccccaggcacagctggtggctggcactggacgaccgccgccggttgcgctggctggagcgcgaaccgcccccccactgggtggaggccgagccaggggcaacggcgcgcaagcgctggttgtcgcgggtgatcagctggctgccggtggaatcgcagctgtag

SEQ ID NO: 494900 - DNA, 699 bp, Stenotrophomonas maltophilia
atggaaccgatccgtctcgacaaacgcctgtccgccctgctcggcatcccgcgcggcgaagcgcggcgctacatcgaaggcggctgggtcacggtcaacggcgacgtggtggaacagccgcagcgcccggtcgatggcagcgcggtgatcgtggtggccgaacaggccagcgatgaaaaggccgagcgggtcagcatgctgctgcacaagccggccggtgtcgccgccgaaaccctgtgtgccctggtcagcagtgacagccgcagcgaacttgatgccagcgacatccgtccgttgcagcgtcacttccacggcctgcagctggccgcctcgctgccggccagcgacagcgggctggtggtggtcagccaggatccggccacgctggcccacctgcagcgcaacctgggccgtaccgagcaggaatacctgatcgaagtggccgaaggcggtcccgagcgcgggccgtggctgatggcgcggctgcagcaggaatcgggcggcgccaaggtcagctggcagagcgagcagcgcctgcgcttcgccggcaagggtctgacggccaaggggctgcgtgtggcggtcagcgccgccggcctgcaggtcacggccgtgcgccgcctgcgtatcggacgcgtggcgctggggccgctgccgccggggcagtggcgctacctgggcagcgacgagcggttctga

SEQ ID NO: 494901 - DNA, 501 bp, Stenotrophomonas maltophilia
atggcagtcctgaagtacctcaccggttatcccgaacccctggttgcccaggtcagcgagctgctggcgcagggcaggctcggcccctggctgcagcagcgctaccccgacccgcacgaggtgcgcagcgaccgccagctgtacgactacacccaggagctgaaggaccgttacctgcgcaagtcggtgccgctcaacaaggtctgctacgacaatacgctggaagtgatcaagcacgcgctgggcacccacaccgccatctcccgcgtgcacggcggccgcctcaaggccagccgcgagatccgcatcgcgaccgtgttccgccaggcacccgcggcgttcctgcgcatgatcgtggtgcatgagctggcccacctgaaggaagccgaccacaacaaggccttctaccagctgtgccagcacatggagccggactacctgcagctggagttcgatacccgcctgtacctgaccgagctggccaaccgcggccagcgctga

SEQ ID NO: 494902 - DNA, 558 bp, Stenotrophomonas maltophilia
atggcaaagcccaacgcgctgcaggaacaattgctcaaggccggcctggccaagaagtcgcaggccagcgccgccgcacgcgagcaggccaaggcccgccagggcaaggccgaatcgacctcggccgaggtccagcgcgaggctgaacgtgcccgcgccgagaaggtcgagcgcgaccgcgcactggccgccgaacgcaatgcccaggccaggcaggctgaacagaaggcccaggccaggcagatcatcacggcccatgccgtaccccacaagggcgacgacgagtaccgcttcagcgatggcgcggcgatccgtaccctgctgatcgaccccaagctgcgcaaggcgctgtcggtgggcgtgctggtcatcgtcgcccacggcgagggctatgcgttgctgccccgcgccgccgccgaaaaggtgcgtgaacgcgcacccgaagcaatcatcgtcgaccacggccagccgggctcgaccgccgagatctccaccggcaacgcagaagacgacgcctattacgcgcagttccaggtgcccgacgacctggtctggtaa

SEQ ID NO: 494903 - DNA, 267 bp, Stenotrophomonas maltophilia
atggccaccggttgggcaggagacggcgcggtccaggaccagatcgacgccactgtcgatgatgcgatcgcccgcgcgcggcgacagctgcgcgacggccccggcctggaacactgtgaggaatgcgacgcgccgatcccgttggcgcggcgccaggctgtgcctggtgtgcggttgtgcgttgcgtgccagcaggcgcgggacgacgaagaccaggcgcatgccgggtacaaccggcgtggcagcaaggacagccagctgaggtaa

SEQ ID NO: 494904 - DNA, 594 bp, Stenotrophomonas maltophilia
atgatgttgtcgctgaaggatcacctgccgccctggacccacccgtggttgaactacgccggcgtcgccctgcagatcgtaggggtgcttctggtcgcgtggctcctgcgcgtgctcgcccggcgcctgatccgccgcttcgccgagcactacacgttgccgcccgagatggtgatgggcgcgcgccggatcaccagtttcgtggtctatttcagtgccctgctgtacatcctcagcctgctcggcgcgaagccctcggtgctgtggaccgcgttcaccggcttcgcggccgtgggcgcggtggccttcttcgcggcctggagcgtgctgtccaacatcttctgcacgctgctgatcttcaccacccgcccgttccgcctgcacgactacatcgaggtgctggagaacggcgagaagccgggcctgaagggccgggtgatcgacgtgaacctgatctacaccacgctgcaggagaccggcgagggccacgagggcacggtgctgcagctgccgaacaacctgttcttccagcgcacggtacggcgctggcgtgacccggcgcaggcccccggcggcatccagggcgacggttga

SEQ ID NO: 494905 - DNA, 180 bp, Stenotrophomonas maltophilia
atgtccagcccaacctgcgccgccctgctggtgatcgccgcctgcgtcgtgctgcaggcactgggcctgtcgctgcagctgcaccccggtaacggccgtgcctgcctgcaacagcaccgccaggcgctggtgtgcctggcctgggccccggcggtcgaatccccggcacgcgccgggtaa

SEQ ID NO: 494906 - DNA, 579 bp, Stenotrophomonas maltophilia
atgctcgacaccaccatgcccgcgccgcctgccgcccacgacgccgtcgatgaacccgccctggtgcgggcggccgccgccggcgataccttggcctatgaactgctgtaccggcggcatgcaccgcgcgtgttcgccgtgctgtggcggctgtgcgggggccagcaggcgcgtgccgaagacgccttgcaggaagccttcctgcaggcgtggaaggcgctgccggggttccgtttcgagagcagcctgtcgacctggctgcatcgcctgggcgtcaacgctgcgctgatggaactgcgtgggcgcgccgccgggcaggaccacgacagtcttgatgatgtggacgcaggactgcaggaactggccgtacacgaccgctgcgccggtaccgagcgcgacctggagcgcgcgctggcgacgctgccgccgagggcgcgcgcggtactggtgctgcatgacatcgagggctggaaacaccaggagatcgccgcgcagctgcagatggccgtcggcagctccaaggcacagttgcatcgtgcgcgcggcctgttgcgcgcacggctgggagacatgacatga

SEQ ID NO: 494907 - DNA, 534 bp, Stenotrophomonas maltophilia
atgagtacacacgaacacgattccgaccacgatctggtggcccgactgcgcgcgctgccttccgaacgcggcctgcccgccgatggctgggcgcggttgtcggcgcagctgccgccgcgtgaaccacaggcggcgcctgcgccgaccggcaacgtggtggtgctgccggggcgttcgcgccggcgctggtggttgccggtgggggccgcactggccgcaagcctggcgctctacgcggtggcgccgtggcgccatgcgcaaccggacgcgccggtgccgtctaccctgcaactgcaggccgcggcgatgaccgagcagtaccagcaggcagtggcctcgttgcccgcaggccgggcgccggaatggcagccggcgctgcacgaactcgatgaaagcgcggcacagatccgggccgcgctggcgcaggatccacgcgcgccgcatctgcttggccagctcaagcgcacctatgcgttgcggctggaattgacccggcaggcggcctatgccgccgagtccggcctgacgacctga

SEQ ID NO: 494908 - DNA, 882 bp, Stenotrophomonas maltophilia
atgacacgaaccctgatgacctgctgcgccgcgctgttgctgctgcccgcggtggccctggctgacacacggatcgacgagcgccacaacctggccgccggcggccgcatcgaactgagcaacgtggccggcaaagtgagcgtgcgtggctgggaccgcaacgacgtgcagctcaccggtacgctaagcgatggcctgcagctgcgccaggagaagagtgccaaccgcgtgcgctgggagatcgagtatccgcgtcgcaacaacaacggcggcgcgacgctggtgctgaacgtgccgcgctcggtggaactgctgctgagtacggtcagtgccagccaggacatcagcggcatcgatgtgcgccgcctgcaggccgacacggtcagcggcagcctgagcgcctccggtcgcagcggcgacagcaagctcaatacggtcagcggcggtgtcatcgcgcgcctgcagacgccgaagctggacgtgaacacggtcagtggccgcatcgaagccggcggcggcgtgtccggtgacatcggtgcacagacggtatccggccgggtcgaggtcgatgccgggcgggtgcagcggctggcggtggaaaccgtgtcgggcagcatcgacctgtcggcggccgggctggcgccggggggccgtatcaatgtcgaatcggtgagcgcgtcggtcaacctgcgcctgccacgcacggtttcggcgcagctgtcggtgaacagcttcagcgggtcgatcaacagcgacgccggccaggtggaacggccgcgctacggccccggcagccatctcgatactcggctcggcaatggcgacggtgacatccgcatccagtcgcattcgggcagtgtgcgggtacgcctggatcgctga

SEQ ID NO: 494909 - DNA, 183 bp, Stenotrophomonas maltophilia
atgccccgcaaggcaaagacccccgcgaaggccagcaacagcatccgcagcgaacgcaagggcgcggccgccagcaccgtggtcagcagcgattcgatcgcttcggacctggcagcgttccgcaaggccggtggcaagatcgaagtcctcggcactacctgggcgctgaagaaagccagctga

SEQ ID NO: 494910 - DNA, 252 bp, Stenotrophomonas maltophilia
gtgctgctgcagcccggcgaccacgtgcccggccagttcctgtcacgcgacacccacggccgtgccgtgatggcgcgcaacgaggaaggctggtgcgcggcgatcgatccctatcacctgcgctgcacgatctattcgcagcgcccggcgatctgccgccagttctcgatgggcggcgatgactgccgccgcgagcggcaggactacctgcgccaggccgatgcctgggcgctttcctccccttccacctga

SEQ ID NO: 494911 - DNA, 1362 bp, Stenotrophomonas maltophilia
atgcgcctcggcatcgacttcggtaccagcaactccgccgccgccatcgtgcatgagggaacactgctgccgatccgcttcggcgacgccgagcagttccgcaccagcgtgtacttccccggcgtggtgcccgacccggacgacttccagctcgacgacggccaggaacaccagctgcagcagatgatcgacagcgccgcgcgcgcggcgcgcgccgccggccaggaacgcacgccgcaggcgctgcgccgcgaagccctgcgcgcgctgcgccgggaatggatggaagcccgcgccggcaaggaacgcagcgccaacgacctgctgcagaacgcggtctacggcgacgaagcgctggaagcctatttcgaggaacacgaaggcaacctggtgcagagcccgaagtcgatgctcggctacaacctgcacccgcgcgcgaagcagaccatcaccggcatcgccgcgcacatcctcgaacacatccgcctgaccgccagtgcccagctcggccggccgctgcgcgccgccctgctcgggcgcccggtgcagttccgcagttcgatcggcgcagccggcaacgaccaggcgctggacatcctgcgtgaagcggccacccaggccggcttcgaccaggttgatttcctcgaggagccagccgcggcggccatgcattaccacgccgaaagccgcgagcggcaccaggcggtgatcgtcgatatcggcggcggcaccaccgacatcgcccatgccgaagtcggcggcgacgacgccccgcgcatccaccgcgcctggggtatcgcccgcggcggtaccgacatcgacctggcgctgagcctgtccagctacatgccgctgttcggccgcggcatcacccgcgtgccggcccaccactacgtggaagcggccaccgtgcaggacatgacccgccagcgcgaattccgcctgcacaagtacgaccatgtcgacgcgccctggggcgaccgcctgcaggccctgcaggacaccggcaacaccgcccgcctgtaccgtgacgtcgaacgcgccaagatcgccctcagcgctgccagcgagcaccgcagcacgctggactacatcgcccgcgacctgcatgccgacagcagcgccgacggcctggccgccgccgcccatggctacctggagcagatccgcgagctgctggcccaggtccgcagcgacatcggcggcgacccggatgccgtgttcctgaccggtggcatgtcccgcgccggctacctgcgccaggcggtggcggccgccttcccgggcgcccgcatggtccacggcgagccctcgctgggcgtggtccagggccttgcgctggcggcagccagccaggattaa

SEQ ID NO: 494912 - DNA, 336 bp, Stenotrophomonas maltophilia
atgtcttctgcccccgcctgcccgcagtgcaccctggaaaacacctatgccgatggcgcgctgtggatctgcgccgactgcggcttcgaatggaccgccgaggaaagtgccggttcgaccctggtcgtgcgtgacagcaacggcaataccctgcaggccggtgacaccgtcaccgtgatcaaggacctgaaggtgaagggttcctcgatcccgctcaagcagggcaccgtgatccgcaacatccgcctggtcgaggacgatgccgagcacatcgaaggcaactcggagaagatcaagggcctggtcctgaagacctgcttcctcaagaaggcctga

SEQ ID NO: 494913 - DNA, 1152 bp, Stenotrophomonas maltophilia
atgtaccgtcctgccgcccgattcgttctgctcgcactggccgcattggcagcaccgtccgcgatcgcacaggatcatccgggaacggccgcgccgctggtcgttgccagcaccgccactccggcgatgccgacgccgcagcaggtgttcgcgattccaccggcgatgcgcgacatgctgcgcacgcaggtgatcaatcacggttactcccgcgagcagcgcctgcaggcgctggtggagatgatcttcgaccgccacggcctggatctgcagtacgacgccgatgcgaccttcaccgtcagcgagatctggcagcagcggcgcgccaactgcctggcctttaccctgatgttcgtcgcgctggcacgcgaagccggcatccaggcacgcgtgcaggaagtcggccaggtcgtgtcgtggtaccaggaccaggcccagggcctggtctacagcgtcggccacgtcaatgccggggtcggcttcgccggccgcttcgccaccgtcgatctggatcgcaacgtgctgtacgaccgccgcgggccgctgccgatcagccaggcacgggcattggcacacttctacaacaaccgcggcgccgaacgcatggccagcggcgatctggtgggtgcacgcaccttcttcaatgccgcgctggcacaggacaacagcttcgccgccacctggaacaacctgggcgtgctggaaaaccgtacgggcgataccgccgccgcgcgccgggcattggaaacggcgctgcgactggacggccgccaggacgctgcactgaccaacgccagcgcgctgtaccggaagctgggcatgatcatgcaggcgcaggcgctggagcagcgcctgcagtcggtgcagcgcgaggatccgttcgcgcagtacatgctcggcgccgaggccgaacgcgccggccgactggatcaggcgatccgctattaccggcaggccgtgcgcctgtacgacaccgcacaccagttccacttcgggctggcgcgggcctatttcctggccggccagctcaagcgcgccgatcgtgaactgctgcgcgcgcaggcgctgggcggtgccccgcagcaggcgcgctaccaggccaagctggacagcctggcccgctggcgcgcacagcagcaggccaggcgctga

SEQ ID NO: 494914 - DNA, 603 bp, Stenotrophomonas maltophilia
atggacttttccccactgacgctcgctccggcgcagtggcaggcgctgcaggacagctatgcaacgccaccacgcgcctaccatcacttcggccacgtgcgcgcggtgctgcagcactgccaggaggttgccgacggccccggctggcagcagccggccgaggtctacctggccgtgctctaccacgatgcgatctacgtggcggggcgaaaggacaacgaagcacgttcggcgcagatggccctgcaggcgatcacgcaggcgccggaactcgccgctgtcgatgccgcccgggtcgagcagctgatcctgctgaccgcccgccatggcgcgctcggcccggacgatgtcgatgccgaggccgcgctgttcctggactgcgacatggcgatcctggccgcgccggaaccggtgttcaccgcctatgaccggggcgtggccgaagagtacaagggcgtggtgccgggcttcctgtatcgcgctggccgccgccgtttcctgcagggcctgctgcgcgcaccgcgcatcttcctcagcgagttcttccaccagcgcctcgacgcggccgcgcgcgacaacctgcggcggcagctgggtcgctga

SEQ ID NO: 494915 - DNA, 174 bp, Stenotrophomonas maltophilia
gtgtccgtccctgatcccgatccccgtccgctgccgccggaagagcccggtcccaacgaatgctgtggcagcggttgcccgctgtgcgtgctggacctgtatgccgacgagctgcagcgctatcgcaaggcgttggccgaatggcaggcgcggcacccggaggcctccgcatga

SEQ ID NO: 494916 - DNA, 618 bp, Stenotrophomonas maltophilia
atgagccgcgcgcgtccggcggcgctgctggcgctggcagccctggttctgttcctggttaccgcgctgtggacccagttcgcacgcaccgacctggactgggtgcgggccacgctcagcctctacctgcacgggccgtgggggctggcgttgcgtgcggcgtactgcctgctggcactggcgatcaccctgctcggcatcgccctttatcgcggcagcatcggcccgcggcgcagcgcggcggcgccgctgctgttcacggtctcggcgctgggcctggccacggtcgccatcggtgacagctggctgcccgaagcaaccccgctgctggcaccgttcatccacgggttggcggccaacactgcattcctgtgtgccagcgtcggcatgctgctgcaggcctggtacctgcgccgcgaaccgggctggcaatccgccgccggcctgctctggggctgggcctggctggccttcgtgctgctgtggctgcacgtgctgtggcgtggcgggccgccgcgcgggctggggcagaaagtggtgatcgtggtgatcgtgggctggctgctgtatctggcgctggcgctgtatcggcgcagtcgtcgcgccgcagcctgctga

SEQ ID NO: 494917 - DNA, 1374 bp, Stenotrophomonas maltophilia
gtgtgcgcattccatcggggctgcgatatgaagcgtgcagggctgggcagggtaatgggcgtggtgctggcgctggccgcactgccggcaaccgcggcagcgaccgtgcagcagttcagccacgggcggttcgaacagattccggtgcatatgccggccggtaccccgcagcgggtggtgatctggttccacgaaccgactcccggtggcgataccagccgtctgccgatcgaggccctgcgtgccgacggtgcgatggtcgccgccgtggacatcgcgcacctgcgcggcgtgctcaagcgcgaaggcaacccgacctgttcgttcggttccggcgatgtcgagaatttctcgcgctggctgcaggcctcgctgcatctgcccgggtaccacctgccgctggtcggcggcgatggcgaaggcgctgaaatggcctatgcgctggctgcgcaggccgatacgcaggtgttcgccggcctgctcaccactggtttctgcccggaccacaaccacgagcgcatggtctgcggcgatggcgtgaagcgcaacacgctgcaacccgccgaactgaacttcccgtggttgagtgcagccggtgatcacggctgcaaggcgggcgaggccagcggtttcgtgcagcaggtggcgatggcgcgcgagttcaagcgcacggcgcgtggtgatgcctcaccgggcctggtggctgcagcgcgggtgatgggtgcgcaggcaggcgtcagcctggcaccgccgccggccgcgctgaagggcctgccggtggtggaagtaccgtcgaccggcaacggcgacacgctggccgtgttcgtctccggtgatggtggctgggccggcctggacaaggatgtggcgtcgtcgctcaacgagcacggcgtggccgtggtcggcatcgactcgctgcgctacttctggagcgagcgcacgccgaagggcttcgctgctgacctgcagaagatcatcgatcactaccgccagcagtggcaccgcgacaaggtgatgctgatcggtttctcgcagggtgccgacgtgctgccggcgaccatcaaccaactcgatgccgatacccgtgcagcgctggaccgcatcgtgctgctgtcggtaggcaagaaggccgacttcgagttccacgtcagcaactggctgggcggcggcggcgacggactgccgatcgcgccggacgtggccagactgccggcggagaagacgctgtgcgtgtacggcgacaaggatgaggacgcactgtgcccggacctgccggccaatgacggtgtgaagaaggtgaagctgccgggtgaccaccacttcaatggtgattacgaccgcttggccgaagtgatcctcaagggcggtatgtag

SEQ ID NO: 494918 - DNA, 2565 bp, Stenotrophomonas maltophilia
atgaccgtccccgtcgattccaccactgccccttccacgccagcctggaagcgggttgccaccatcgtcatcccgctgctgatcctcgccctggccctgcacggcctggccaacgagttcgacgagcacggctaccgggccatccgccaggcgttccggcagctcagtggcatgcagatcgcgctcaccgtggtactcggcctggccagttacgcctgcctgatcggcttcgatgccatcggcctgcgtcgcagcggcatccgcgtgcaccctgcgcgagtcggcatcaccgcgttccttgcgcacacgctgggccagaccgtgggctttgccgcgttgaccggcggcgcggtgcgcctgcgtggctaccgcagcgccggcctggacctggcgcagatcggccaggtggtgctgatgagcacgctcggcttcgtgttcggggcatggctgctgatcagcgtggcactgtgcatggaacctgcagcggcagcgttggcattgccattgaatcccgatgccgtgcgcatcgtcggcatcgtcgccctgctcgcatatctcggcaccgtgctgctggtcggccgcgatggacggcagttcagcgtgttcggccatgcgttgtggctgcccgaccgccgcaccatgatcggcgtcaccgtgctgagcgtgatcgaactggtgctggccagtgccgcgttctacgtgctgctgccggactccacgccgaccggactgcccggcttcgtcggcctgtacctggtggccgtgctggccggcctggtctcgaccgtgcccgccggccttggcgtgttcgagtggagcctgctgaagctgttgccgcaggtggcaccggcggcggtgctggcagcggcgctgatctaccgcgtcacctactacgtgctgccgctggtgctggccaccctgctcgcccttgcgcccgccctgcgtcagccactgcaggccagcgccggggcaacccgtgcgggctggaacgcgctgcgcccgtggctgccgcagatcatcgcgctggcggtgttcagcatcggcgccgcactggtcatcgacggcacgctgccgacgccacgccgtcacctggtcaatgcctcgctgccgatcctggagacctcgcacctgatcggcagcctcagcggcgtcgcactgctgctgatcggccagggcctggcccggcgcagccacgccgcgtgggtgctggcgatggcggtgtgcgtgatcaccccactgccgctgtggctgcggggtggccaactgttgatcgccgtctcggcagtgctggtggcgatggcactgtgggccgcacgtcgcgagttctaccgccagggcgcgctgctggacgaagcctggtcatggccgtggctgcgcaacctcggcctggtgctggtcgcggtcacctggctgctgttcttcacctacagccatgtcgagtaccagaacgagctgtggtggcagtttgcgatatccggcaacgcaccacgcgcgctgcgcgcgttgctggtcgtggcgatcgcgctggtgatgttcggcctggcgcggctgctgcacagcacgcgcagcccgctgccagccgccgacgaggccacgctgcaatcactggcgccggtactggccggtgccaccgatacccaggcctgcctggtgctgaccgccgacaaggcggtgctgcgcgacgaggcgaaacagggcttcgtgatgatgcagcgctacggcggttcgctgatcgcgatgggcgatccggtcggcccgccggaggtcgcccgcgcattgatctggcgcttccgcgaggaagccgaccggctcggcctgcgcccggtgttctaccgggtcggcgagtcctactggcagacctacctcgacctgggcctgggcctggtcaagctgggcgaagaagcgatggtgccgctgcacgatttcggcctggaaggccgcgaacgtgcggacctgcgccaggcctggaaccggggcaagcgcggcggcctgtccttccgtgtggcaccggtggaggaaattcccagcctgctgccgcgcctgcacgcgatttccaacgcgtggctggaagacaaggccggcgacgaaaagggcttttcgctgggcagctacgacccggattacctggtgcggttcccggtggcactggtggaggccgaaggccagatcgtggcgttcgccaacctgtggcaggcgccggccggtgccgagctgtcggtggacctgatgcgccacgtcaacgaggcgccgaagggcacgatggacttcctcttcatcgagctgttcctgtggggccgcgcgcagggctatgcacgcttctcgctgggcatggcgccactgtccgggctggcgcagcatcgcctggccggccgctggaaccgcctggccggcctgctggcgcggcatggcgaacgcttctacggcttcagtggcctgcgccgcttcaagtcgaagttcgacccgcagtggcggccacgctatctcgctgcgcccggtggcatgcacctgccggccgcactgctggatgccacgcgcctgatctcgctggacccgcggcgcaactga

SEQ ID NO: 494919 - DNA, 348 bp, Stenotrophomonas maltophilia
atgatggagcgttacgacgtcggaccgcgcatgtccgaaatgaccgtgtacaacaaggtcgcctacctctccggccagattccggaagacaccagccaggacatcaccgggcagacccggcaggtgctggcggagatcgacaagctgctggcactggtcgccagtgatcgccagcacgtgctgcgcgcggaagtgttcctggccgatatcgccgacttcgacggcatgaacaaggcgtgggacgagtgggtggtcgagggcgcgaccccggcccgcgcaaccttcgaagccaagctggcccacgccgagtggaaggtcgagatcgtggtgacggcggccgtgccgtaa

SEQ ID NO: 494920 - DNA, 414 bp, Stenotrophomonas maltophilia
atgagcctgatcccgcccctgaccgaacgcctcgaccgcctgctgccgcagacccaatgcgggcaatgcggctacgacggctgccgcccgtatgcgcaggcgatggcgcgcggcgaggtgagcgtggaccgctgcccgccgggcggcgatgctggcgcgcgcgcgctggcgcaggtactgggcgtgcctgccattccgtttgatcgttcgcgtggcgaacacaaggtgccgcaggtggcgctgatcgtggaagccgactgcatcggctgcaccaagtgcatccaggcctgcccggtggacgccatcgtcggcggcgccaagtacatgcacacggtcattgccgatctgtgcaccggttgcgaactgtgcattccgccgtgcccggtggactgcatcgagttgctgcccctgtaa

SEQ ID NO: 494921 - DNA, 606 bp, Stenotrophomonas maltophilia
atgggaagcaatggaatggaactggcgctgttcgacttcgaccacaccgtgaccacctgcgatacctatggccgtttcctgcgccgcgtggccaccgccgaacagctggcgcaggcgtggtggaaggtcggcccgtggctggccgcatacaagctgaaactgatctcggccgaacgcatccgtgcacgcgtcacccgcctgaccttcagcaaccgccacagcgatgacatcgccacgctggccgcaggcttctcgcgtgagttcctgcccgaggtggtgcgcccggaaatgctggagcagatccgctggcacagggaacagcagcataccgtggtgatcgtgtccggctcgctcgacctgtacctgcggccatggtgcgagcagctgggcctgcagctgatctgcaaccggctggaaagccaggacggccgcctgaccggtcgctatgccggtggcgactgcggcccgcgcaaggtcgagcacatccgtcgccagttcgatctgtcccgctacgtgcgcatccacgcctacggtgacagttccgaagacaagccgatgctggcgctggcccacgagcgctggttccgtggcaaacccctgaagtaa

SEQ ID NO: 494922 - DNA, 2082 bp, Stenotrophomonas maltophilia
atgacccgtaccgcgctcgtcaccaccgccctgccctacgccaacggcccgctgcacctgggccacctggtcggctacatccaggccgacatctgggtgcgtgcgcggcgaatgagcggcggcaaggcctggttcgtctgcgccgacgacacccacggcacgccgatcatgctggccgcggaaaaggccggggtcaccccggaaaccttcatcgccaacatccaggccagccacgaacgtgacttcgccgccttcggcgtggccttcgaccactacgactcgaccaactcggcggccaacaaggcactgaccgagcagttctacctgaagctggaagcggccggccacatcagccgccgttcggtcgcccagttctacgacccggccaagggcatgttcctgcccgaccgctacgtcaagggcatctgcccgaactgcggcagccccgaccagtacggcgacaactgcgaagtctgcggcgcgacctatgcaccgaccgacctgaaggagccgcgttcggtcatctccggcgccacgccggaaatgcgcgattcggagcacttcttcttcgaggtgggccacttcgatgcattcctgcgcgaatggctggccggcgatgtcgccctgccgggcgtgaaggccaagctgggtgagtggctcaacgccgaaggtggcctgcgcgcgtgggacatctcgcgcgatgcgccgtacttcggtttccagattcccggccagccgggcaagtacttctatgtctggctggatgcgccgatcggctacctgtccagcttccagaccctgtgcggcaagctcggcgaggacttcgaagcgcacctgcgcgccggcaccgccaccgaactgcaccacttcatcggcaaggacatcgtcaacttccacggcctgttctggccggcggtgctgcacggtaccggccaccgcgcgccgacccgcctgcacgtcaacggctacctcaccgtggacggtgccaagatgagcaagtcgcgcggcaccttcgtgatggcgcgtaccttcctcgatgccggcctggagccggaagcgctgcgctactactacgccgccaagtccggcggtggcgtcgacgatcttgacctgaacctgggtgatttcatcgcccgcgtcaacgccgacctggtcggcaagttcgtcaacctggccagccgctgcgccggcttcatcagcaagcgcttcgacggccagctggccgcgcagctgcccgacgcggcgcagtaccagcgcttcgtcgacggcctggcgccgatccgtgaagcctacgagcgcaacgacccggctgcggcgatccgcctgaccatgaccctggccgacgaagccaaccgctacatcgacgacgtcaagccgtgggtcatcgccaagcaggaaggcgccgacgtgcagctgcaggccgtgtgcagccagggcctgaacctgttccgcgtgctggtcaccgcactgaagccggtgctgccggccaccgccgcgcaggccgaggccttcctggccgcgccggtcaatgactggaccgaactggcacagccgctgctgggccaccgcatcaccgactacaccccgctgttcacccgtatcgacccgaagaagattgacgccatgatcgacgcctccaaggacaccctgcagccggccgccgctgccgcccccgccgccaggaccgacgccgccaagccggccacaccggccccggccaaggacgacgcgaagagcgccgatgctccggcctatatcggcatcgacgatttcgccaagctcgacctgcgcatcggcaaggtgctggtgtgcgagttcgtggaaggttcggacaagctgctgcgcttcgaactggatgccggcgaactgggcaagcgccagatcttctccggcatccgtggcagctacggcgagccggaagccctggtcggtcgcagcgtggtgttcatcgccaacctggccccgcgcaagatgcgcttcggcctgagcgaaggcatgatcctgtcggccggtttcgacggcggcgcgctggcgctgctggacgccgacagcggcgcgcagccgggcatgccggtccgctga

SEQ ID NO: 494923 - DNA, 444 bp, Stenotrophomonas maltophilia
atgcgcaacaccttcaagaccctgctgctggcactgccgctgtgcctggccgccctgtcggcccaggccgccgacggcgccgccggccgctggaagaccatcgacgacaagaccggcaaggtgaagtcgatcgtcgagatcagccaagccgccaacggcaccctgaccggcaaggtggtcgacatcctgcactcggacaagggcccgaacccggtctgcgatggctgtgaaggcgccaacaggaacaagccggtgaagggcatgaccatcctctggaacctgaaggccgatggcgccaacaagtggtccggcggcaccatcctcgacccggctaacggcaagacctacaagtcgaagatggagctgcagccgggtggcaccaggctggacgtgtccggctgcatcgccttcatctgccgcgcccagacctggcagcgcgaataa

SEQ ID NO: 494924 - DNA, 405 bp, Stenotrophomonas maltophilia
atgaccgccgattccggtgccctgctgggcatccaccacgccgcactgatctgcagcgactacgcacgttcaaaagacttctacgtgcgcatcctcggcctgcgcgtgctggccgagaaccaccgcgccgcgcgcgactcctggaagctggacctggccctgcccgacggcggccagctggaactgttctccttcccctcgccgccgccccgtcccagccgcccggaagcccagggcctgcgccacctcgcgttccgggtgactgcactggaacccttcatccagcgcctggccgcgcatggtgtcgcctgcgaaccgatccgcgtggacgagtacaccggacgccgcttcaccttcttcgccgaccccgacgaccttccgctggagttgtacgaagccggttga

SEQ ID NO: 494925 - DNA, 1071 bp, Stenotrophomonas maltophilia
atgcgtcctgccgtcgccctgttcgccgccgtgctgggcctgctgccgctggccaccgttgccgcaccggtgctggccccaccggatgcgggcatcgacggcctgatgcaggcctacgacggccaggtgcccggcgccgccgtactggtgctgcatgacggcaaaccggtattccggcgcggctatggcctggcggtggtggaggacggcacggcggtcaccgcggccagcaacttccggctggcctcggtcagcaagcagttcaccgctgcggcggtgttgctgctggtggaagatggccggctcgggctggaccaacctgcccggcaatggctgcccgaactgcccccggctgcggccgccatcaccatccgccagctgctctcgcataccggtggcctgcccgactacgaagacctgatggacccggctgatgctcggcaggtgcatgacgccgatgtgctgaccctgctgtcgcgccaggaccggctgaacttcgcgcccggcacgcagtaccactacagcaacagcggctatgcgctgctggcactgatcgtcggccgcgcctccggccaggatttcgcagccttcctgcaacagcgcatcttccgcccgctgggcatggcccacaccgtggcccatcaggacggcatcgataccatcgccgcacgcgcctatggctacagctggatcgatggccgttggcggcgcaccgaccagagcaccaccagcgccgtgctcggcgatggcggcatctattcctcgctggacgacctggcccgctgggatgcggcgctgtacgacgaccgcctgctgtcgaaggcctcgcgccgcgcgatgttcagccccgccacatcgacgcccgaaccggatgtaccgcactacgggttcggctggcggctgaatggccccgtgcaatggcacagcggcgagagcatcggcttccgcaacgtgatcgtgcgccacccggaaaaacacctgaccgtgatcgttctgaccaaccgcaacgaccccgaaccctatccgctggcgctgaagatcgcccagcgctggctggacaccctgcaatga

SEQ ID NO: 494926 - DNA, 1941 bp, Stenotrophomonas maltophilia
atgccgcatcccacccgcgccctggccgccgccatcgccgcgttgttcctgttcagtgccgtgccgtcggccgaagcagcgaaaaagaaggccagccgccctgccgccgcgcagacccgccaggctgccaagcccaaggccaggcccgcccgcgccaccgcaccggcgcgtggcagctcggcacgccgcgccgcgccgcgtccggtcgcgccggcccgtgccgtacccaagcaggtacagctggagcgcctgtacgacgagtactgggatgcctcgatgcggttgaacccgctgcaggccaccttccagggcgaatcccgctacaacgaccagctgcccaacatcctgtccgccgcctggcgccagcagtcgcacgacttcaccacgcaatggctgggcaaggtcgagaagctcggcagtgatggcctgcagggccaggacctgctcagctacgagatcttcgtgcgcgacgcacgcgcctcgctggccgccgagcgctacccgagctggatgatgccgatcagccagtactacaacatcggcagcatcatggcgatcctcggtgccggtgccggcgcgcagccattcaacaccgtgcaggactacgacacctggtcgcgccgttcgctgggcattcccgaactgttcgaccaggccatcgacaacatgcgccaaggcatgaaggccggcgtggtacagccgcgcgacctgatggaaaaagtgctgccgcaactggatgcggtgatcaagccgaccgccgaagagagcatcttctggtcgccgatccgcaccatgcccaacaccatcccggccgaggacaaggcgcgcatcagcgccgagtacaagcgcatgatcgaactgcgcatcatgccggcctatcgcgccctgcgcggcttcatcgccaccgaatacctgccggccacgcgcgccagcagcggcctgggcgcactgcccgatggccaggcctggtacgccagcctgatcgtgcagaccaccgccagcgaccagaccgccgcgcagctgcacgcgctgggcgaacaacgcgtgcaggaactgcaggcgcagatcgccacggtgatgaaggatgccaggctgcgcggcacccccaccaagctgctgcgcagcatgcgcaacgaccgccagttccagtacggcgatgccaatgcgctgatcaaccgttaccgccaggtgcagcagcaggtcaacgcacgcctgccgcaggtgctggataccttgccgaaggcgccgctggacgtacgcgcggtggaaccggagcgtgcgctcaccgccgctgccgctgcctaccagccggcactgcccgggcaatccgcggtgctgtacgtgaacacccgcgacctgcccggccgcaagcgctggaacgtgccggtgcagtacctgcatgaagcgatccccggccaccacgtgcagctgggcctgcaacaggagctggccaagctgccgcgcttccgccgcctcggtggcgatctcgccttcgtcgaaggctggggcctgtacgccgaaacgctgggcgaggacctgggcatctacaccgatccctacgaccgcatcggctacctgtactcgcgcctgctgcgcgccgcccgcgtggtggccgataccggcgtgaatgcccagggctggagcaagcagcaggctgtcacctacctgcagaagaccgtggacatgagcagcgacgatgccaacgccgaagtcgagcgggtcatggcccagcctggccaggcactgtcgaacgtggccggcctgaccaccattgtcgccctgcgcgacaaggccagggcgcgccagggcgccgccttcgacctgcgccgcttccacgccgaactgctgaaggacggctcgatgccgctggacgtgctggaccgcaagatggaacgctggatggcccagccggccagcgccacgcccgccccgtcaccctga

SEQ ID NO: 494927 - DNA, 786 bp, Stenotrophomonas maltophilia
atgaccgcggcgccgatcgagcgcccgttgcaggaccgcgcggtcctgctgttcatcgtgctggctgcgttcttctgcggcaatgcggtgctggccgaactgatcggagtgaagatcttcgcgctggaagacaccctcggcatcgatccgctgaactggaacctgttcggccagaccggttcgctcagcttcaccgccggcaccctgctatggccggtggtgttcatcatgaccgacaccatcaacgagttcttcggcaagcgcggcgtgcgcttcatctcgtggctggccgtggtcctgatcgcctatggcttcctgttcgccttcgcggcgatctcgctggcgccggccagctggtgggtcacctccatggacgggcacggcgtgccggactaccaggccgcattcgcagcggtgttcggccagggcatgtggaccatcgccggttcactggtggccttcctgctcggccagctgatcgacgtggcggtgttccatcgcatccgccaggccaccggcgagcgccacgtgtggctgcgtgcgaccgggtccaccgcgatctcgcaggtggtggacagcttcgtggtgatctggatcgccttcgtgctcggcccgcagcactggccgacctcgctgttcctggccgtcagcagcgtcaactacatctacaagatgggctttgcaattgccctgattccgctgctgtacctgatgcggcgtgcgatcacccgctatctgggcgcagacagggccgctgcgctgcgcgcggcggcggcggctgactga

SEQ ID NO: 494928 - DNA, 696 bp, Stenotrophomonas maltophilia
atgtcgctcgaagcccccgccctggtcccccgcccctccctgcagcgcctgttcctgaccggcctgctgaccctgctgccgatctggctgacctgggtcgtggtcaagttcgtgttcgtgctgctgtcgggcatttccagcccgttggtggtgccactttccgagcagatcgcgacaagctttccgcactacctcggctgggtccgggccgagtggatccagaacaccatcgccctgctggccaccctgctggtgatcctggcggtgggcgtggccagccgccgcgtgctgggccagcgcctgctgcgctgggtcggcgcggtcatcaagcgcattccgctggccagcatcatctacgacagcgccaagaagctgctggacatgctgcagaccgaaccgggcagcacccagcgcgtggtgctgatcgacttcccgcaccgcgacatgaagtcggtcgggctggtcacccgcgtgatcaaggaacacggcaccgaccgtgaactggccgcggtgtacgtgccaaccacgccgaacccgacttcgggttacctggaaatcgtgccggtggaactgctgaccccgaccgactggaccgtcgaccaggccatgagcttcatcatttccggcggcgccgtcgcgccgtccagcgttccgttcacgcgcgccggcgatcgccccggcgatcgcagcgaatga

SEQ ID NO: 494929 - DNA, 1317 bp, Stenotrophomonas maltophilia
gtgttgaagattctgcacggactgggttggaccctggcaggccttctggtgctggccatcgtggtgtggtgcgcctcgcgcatgtggccggtgccggaatcgcggcgacaggcccagcagcgcctgcaggcccgcctgcctgtccacggccacaacggttttgcgctgctgtggacgctcgcgttcgacgatctggacgcgcgccagcgcgaacaggccctggcccgcgacgtgcagcgttgggaggccgatccgcgcggcaatggcggcgccggaccgcagctggcggaggaccatgacgcgctgcgatcacgaccggcggccagctgcgggccgaccgccagtgactgcctgggccaggtgcgcgccgacccgcagcgcttcgtcgatgcccacgctggccaccagcagctgcatgcgcgcctggaccagctggccgatgcggaccacttcgtgtcgccattccggcccaagggcgacggcatcctggtgccgatgccgacctatggcctgatgatcgatgccaccagcgcacgcgcgctggcctatgtgcagggcgatatcgacggtgcgctgcgtggcagttgcagggggcttcagctgggccggcggctggtgacgggcggcagttacctggtggagagcatcatcggtgccagcctggtgcaggccaatgcccagctgctggccgacatgctggtcgaactgccggccgaccatccgttgccagcggaatgcgatcaggcaatgcagccgatgctggccgccgaacagagcctgtgccgtgcgatgcagggtgagtacgcgatgagccgggctgcgatcgaaacctcggcgcaggaattcggcggggtgctggtcctggatcgcagcagtaccctggcgcgcgcggcgggcaatctgggctgggcctgcggcgcggcggcgatggcggcgctggaagcggatcgcccgctgccggtgccggcaccgccgcagcatgactttggctgcctgtcgaacatcctggggtgcgtgctgaccgatattgcccgcccggtctatccggcctattcgtcacggacccaggatgccgccgcgatggtgcggctgatcggcgcgcagcgctggctgaggcagcaggcgcaggatccggtggatgcgctgcagcgcctgcctgcgcagttccgctcgccggtgcgggcaccgcagctgtcggccgatggccgccgtctgcaggtgccgcggcgttcaccgtcgcgcagcaccgacgagagcccatggctgtcggtgccgctggtgatggagaacgccccggccgctgctgcgcgcgattga

SEQ ID NO: 494930 - DNA, 717 bp, Stenotrophomonas maltophilia
atgcgcccgtatgcgcttgccacactgctgaccctgctgtccttcaccgcccacgccctcgacctgccaccggtgcaatatccgacgctgccggcccaggcggccaatgccgccggtttcgtcccgcagggctgggcacttgaatcgagtgtcgaaggcgatctcgaccaggatggccgcgcggacctggtgctggtgctgcgtcagcaggcgccacgcaacgtcatcgagcacgatggcttgggtccctcgccgtacgacagcaacccgcgcattctcgccgtggcgtggtcgcgcccgtccggctatgtgctggcggtgcaggaccaccagctgataccacgcccggacaatccggtgatgagcgacccgctcgaagacggcggcgtcagcatccagcggggcaccctgaaggtcgcactgttttcattcgccagcgcgggcagctggtcaatgggcacgaccgcctttaccttccgttggcaggacgatgcctttgcgctgatcggctacgaccagaattcggtgatgcgcaattccgggcagaccgagtcggtgagcgtgaacttctccactggcagggtaaagcggagcgaaggcagcatcgaggacgacaaggacagcgtgcactgggagcccctgcacagccgccgccgctggacgctgcagaccatcggtgatggctgggcattcgatccgctggcgggcagcgactga

SEQ ID NO: 494931 - DNA, 453 bp, Stenotrophomonas maltophilia
atgaacgcccgcctgttccgcttcggcatcaacctctggccgccgttcctgttcaccggcatccacgtcacccggatcacgcccgattaccggcagatcgacgtggcattgcgactgcggccgtggaaccgcaattacgtgggcacgcatttcggcggcagcctgttcgcgatgaccgatccattctggatgctgggcctgctgcacatcctcggccgtgactattacgtgtgggaccgggccggtgcgatcgatttcctcaagcctggccggggcacggtgcgcacttcgttccgcatcgatgatgcactgctggccgaactgcgtgccgaagcggccggcggcgaaaaggtgctgcgctggttcagcaacgatgtcgtcgacgaaagcggcgaagtggtcgcccaggtacgcaagcaggtgtacctgcggttgaagccgcacgcacgctga

SEQ ID NO: 494932 - DNA, 1626 bp, Stenotrophomonas maltophilia
gtgaggcgctcgccgctgccatggtcgaagcggatcctgctggccctgctggccggcgtgctgaccatcgtggccagccagggccaatggctgtggcgccaggacgaggcagcctatgacgcactgatcggcaactgggactaccgccccgaccccagcgtgctgatcgtggccatcgacgaaggcagcctgcagcgtatcggccagtggccctggccgcgctcggtgcatgcccgcctgctggaccgcctgaccgatgccggcgccgaacgcgttgcgctggacctgatgctgtccgaacccgaccgtcgcgacagccgccaggatgatgagctggcggccgcgatccgacgcaacggccgggtggtgctgccggtgctggcggcaccggcggccggcgaccgcatggccgaggaaatgctgccgatcccgcagatcgccgccagtgccgccgcgatcggccacaccgatgtcgaggtggatggggacggcgtcgcccgcggcgtctatctgcacgccggtatcggacggccgcactggccggcactgggcctggcactggccgacctgccggcgggtgcggtacgcggcctgcccgaccccgacccggcgctgggctcgccctatcaatggcgtcgcgatgattacgtgcgcgtgcgctacgccggcccgcccgagcggctgccgcaggtgtcctatgcggacgtgctcgatgggcacgtggatggagcgatgctgcatggccgccgcatcgtggtcggcatgacggccagcggcatcgcgcctcgcctgctgaccccgaccacccgcgagttctggatgagcggcagcgagtaccaggccaacatcacctcgatgctgctgcagcacaagcagatcgacgtgctgccgcacgcctggcagcacgccatcagtggcgtgctggtggcgctgtgcgtgatcctgctcggcctgcgcctgccgtggctggtcgcgctgtgttcgctgccgatgccgccgctgctgagctggctgctgctgcgcaccggtgacctgtggtgggcaccggccagcgcgatgctgggcgtggtgctggcactgctggtctgggcggtgtggcggatctcggcctggcaccgcctggccaaccgcgatgccctcaccggcctgggcaaccgccttcgcttcgagcagtcactgcagcaggaatgcgacgccgcgcggcgcagtggcaagccattgagcctggcgctgatcgacgtcgaccacttcaagcgccacaacgaccgccatggccaccaggtcggtgaccgcgtgctgcgtgatgtcgcccgcctgatcggcgcgcatgcccgtcgcccgcgcgacatggcggcgcgctacggtggcgacgaattcgcactggtgctgccggatacgccggccgagggcgcgcgccgggtgatcgaggacctgattgcctgcgtgcgtgcactgccggcgccgggcgatggcagcgatgacggcgtcacgctcaccatcggggtattcacccgcgtgcccgacggtgacctgcaaccgcaccatttcgtggaaggcgccgacaccgccctttaccaggccaaggccaacggccgcgacgggttcatgatcgacggcgggacgtga

SEQ ID NO: 494933 - DNA, 1701 bp, Stenotrophomonas maltophilia
atggggtcttgcagctgcacccccgcattgccgggattgcaaactgtgaccgtcgtccgctctctgtcgttcgccatgcgtttaacgggcgccctgctctgcgccctcctcctgccgcctgccatcgccggcgcccaggactggaactaccgggtccggcccggcgacaccctgtgggacctgggcgggctgtacctgaaaccctcggtacgctggcagcagctgcagcagcacaaccgcatcgacaacccctaccagttgccgccgggccagctgctgcgcttcccgatcagctggctgcgcaccgaaccggcgccggcccgggtgctgtcggtgcgcggcaaggtcgagctgtccggtgccgatggcacggcgacccgtgcgctccaggccggcgagcagctgcatatcggtgacaccgtggaaaccgagggcgattccagcatcacgctggaatttgccgatgcctcgcgcctgcagctgcgcgaatactcgcgcctgcgcctggaccagctcagccgctatggccacaccggcatggtcgacacccgcctgcgcctgcagcaggggcgcgccagcaaccgggtgacgccggcgcgcggcccggcctcgcgctacatcatcgatgcacccaccgcgaccagcagcgtgcgcggcacggtgttccgggtcagcgccggggataccgggcacgtcggcgccaccgaggtcctgcagggcaaggtgcaggtcggcaacccccatggccagcgcttggtgcgcccggggcagtccacccgcagcagcagcgccgatgcggcccccgccgcggtctcggccctgctgccggcgccggcgctgcgcaatgacgcgctgcgcctggcgccgctgccgaccctgcttgcctgggaaccggtcactggcgccgatcactaccgggtggaagtggtgcaggcggcaacgccggagatcctgctgttcgccaccaccaccgccgacacccggttggcgatcggcgacctgccgcccggccagctgcgcctgctgttgcgcgcggtcgacgcacagggcgtcgaaggcctggatgcgagcgccgatttcgagctcagtgaccagccaccgccgccgctgaccatatcgccgctgcatgggcagacgatcaacagcgaccgcccgcgcttccgctggagccaggcccccggtgcacgcagcagcgtgctgcagatcgccgccgaacccagcttccggcagccattgcaggagcaggctacccatgcgaccgacctgcgcctggcgcaaccgttgccgcccggacagtactactggcgcgtggcctcgcgcgatgccgaaggccaccagggccgctatggccaggcgctgccgctgcagctgagcaacgagccggtggacccggcactgcaaccgcccgaggccgcgcacggcgagctcaccctgcgctggcaggccggcagcgaaggccagcgctaccgggtgcaggtggatcgccgcggtgacttcaaggccccactgatcgatgaaacggtggcccagccgcaggtgagcttcaagcgcccgtggagcggcacgctgcacgtgcgcgtgcagtacatcgacgatgacggccacgccggcgagttctctcctgcccagcagatcccgttgccatgccgcctgtgctacggcgccggtggcggtgcactgctgctctggttgttgttgtga

SEQ ID NO: 494934 - DNA, 858 bp, Stenotrophomonas maltophilia
atgaccgagacgacctacgtattcgacgccaccactgcgaccttcgaggccgaagtcctgcagaagtcgctgcagacgccggtgctggtcgacttctgggccacctggtgcgggccgtgcaagacccttggcccgatgctggaaaagctggctgccgagtacaacggcgctttcgagctggccaaggtcgatgtcgacaaggaacagcagatcgcggcggccttccagatccgctcggtgcccaccgtgttcctggtcaagggcggccagctggtggacggcttccccggcgccattccggaaggccagctgcgtgaattcctggcccagcacggcatcgtgccggccgatgtcggcgatgccgcccctgaagatgacgccccgctggacccgcaggcgcaggtcgacgtactgcgcgcgcagatcgccgccgagccggacaaggatgagctgaagctcgacctggccctggccctgctgcagatcggcggcgtggacgaggccggtacgctgatcgacggcctgccggccaatctggccaccgacgaccgcgccgtgcgcgcccgtgcccgcctggccttcgccgctgcgctgaaggatgccccggcggccgaggtgctggaggcccgcatcgccgctgatggcaaggatctcaaggcccgccacctgcgcggcgtgcagctgctgctgggcgggcatgacgaggccgccctggcgcagttcctggaaatgctgcggatcgaccgtggattcgaggagggcctgccacgcaaagccttgatcgacgccttcaatgtgatctccgacgaggacctggtgggccagtaccgccgcaggatggcgtcgctgctgttctga

SEQ ID NO: 494935 - DNA, 600 bp, Stenotrophomonas maltophilia
atgtccgtggtccggcttgatcgttggttggggctgcttgcggcagtcgtattcgtcctggccgtggccggcttcggtgccggcctggacggctatgcccaggctcgccacccggtggcgctgctgggtgcgcgcggtgtaccgcatgcgctggccttcaatctgctgggtttcgtgctgcccggcgtgctggcggtggcggtggctgaacgcctgcgccgcagtctgccggccactgctggctgggcgccacgggtcggcagccagatgctgctgctggccggtctggcctttgccgcgatggggttgctgccactggacgtggatgacctgcatgggcccgccagccagctgcatgccagcgcctggatgatctgggtgctgggtttcgtcgcgggcaccgtgctgctgggcgtgtcccatctgcgccaggcgcatggccgggccttgggcgcagtggccctgggctgcggcgtgctggccgcgctggcggcgttcgccctgcagggcacactgccggcgccgatggcacaacggctcgcgttcgcctgctggctggtctggctggcggcggccctgccgctgtcgcgcccgcgctga

SEQ ID NO: 494936 - DNA, 2643 bp, Stenotrophomonas maltophilia
atgaccagcgctgaaaccaacgcctacgacccgcagcaggttgaatccgccgcccagcagtactgggacgccacccgtgccttcgaggtcgacgagacttcggacaagccgaagtactactgcctgtcgatgcttccgtacccgtccggtgcgctgcacatgggccacgtgcgcaattacacgatcggcgacgtgatcagccgctacaagcgcatgaccggccacaacgtgctgcagccgatgggctgggacgcgttcggcctgccggcggaaaacgctgcgatcaagaacaagaccgcgccggcggcgtggacctacaagaacatcgaccacatgcgcagccagctgaagtcgctgggctatgccatcgactggtcgcgcgagttcgccacctgccgtccggactattacgtccacgagcagcgcatgttcacccgcctgatgcgcaagggcctggcctaccgccgcaacgcggtggtgaactgggacccggtcgaccagaccgtgctggccaacgagcaggtcatcgacggccgcggctggcgctccggtgcgctggtggagaagcgcgagatcccgcaatggttcctgcgcatcaccgactacgcccaggaactgctggacggcctggacgagctggacggctggccggaatcggtcaagaccatgcagcgcaactggatcggccgttccgagggcctggagatccagttcgatgtgcgcgatgtcgatggcagcgcgctggacccgctgcgcgtgttcaccacccgcccggacacggtgatgggcgtgaccttcgtgtcgatcgccgccgagcacccgctggcgctgcatgcggcgaagaacaacccggagctggcggcgatgctggccgacctgaagcagggtggcgtgtccgaggctgaactggaaacccaggaaaagcgcggcatggacaccggcctgcgcgcgctgcatccggtcaccggcgagccggtgccggtgtgggtcgccaacttcgtgctgatgggctacggcaccggcgcggtgatggccgttccgggccatgaccagcgcgacaacgaagtggccaacaagtacggcctgccgatcaagcaggtgatcgcgctgaaggatgcgcgcaccgaagaggagcgcaactgggacggtagccgctggcaggactggtacagcgacaagagccgtgccttcgagctggtgaactcggccgagttcgacggcctggatttccagggcgcctttgaagccctggccgaacgtttcgagcgcaaggcccagggccagcgccgcgtcaactaccgcctgcgcgactggggcgtgagccgccagcgctactggggctgcccgattccggtgatctactgcgccaagtgcggcgcggtgcctgtgccggaagagcagctgccggtggtgctgccggaagacgtggccttcgccggtaccggctcgccgatcaagaccgacccggaatggcgcaagaccacctgcccggattgcggcggcgcggccgagcgcgagaccgacaccttcgacaccttcatggagtcgagctggtactacgcccgctacacctcgccgggtgcccgtgatgcggtcgacaagcgcggcaactactggctgccggtggaccagtacatcggtggcatcgagcacgcgatcctgcacctgatgtatttccgcttctaccacaagctgctgcgcgacgcgcggatggtggacagcaacgaaccggcgcgcaacctgctgtgccagggcatggtgatcgccgaaacctattaccgcccgaacccggacggctcgaaggactggatcaacccggccgacgtggaagtgcagcgcgacgagcgcggccgcatcaccggcgccaccctgatcgccgacggccagccggtggtggtcggtggtaccgagaagatgtccaagtcgaagaacaacggcgtggacccgcaggcgatggtcggcaagtacggcgccgataccgtgcgcctgttctcgatgttcgccgcaccgccggaacagtcgctggagtggaacgaagccggcgtggacggcatggcccgcttcctgcgccgcctctgggcccaggtgcagaagcacgctgccgacggtgccgccccggcgctggatgccgcggcgctggatgccaaccagaaggcgctgcgccgcaagacccatgaaaccatcggcaaggtcggtgacgactatggccgccgccacagcttcaataccgcgatcgctgcggtgatggagctgatgaacgcgctggccaagttcgaggatggcagcgagcagggccgcgcggtgcgccaggaagcgctgcaggcgatcgtgctgctgctcaacccgatcaccccgcatgccagccacgccctgtggcaggtgctgggtcatggcgagacgctgctggaagaccagccgttcccgcaggccgacagcagcgcgctggtgcgcgatgcgctgaccctggcggtgcaggtcaacggcaagctgcgtggcaccatcgaggtggcggccgatgccgcgcgcgagcaggtcgaggcgctggccctggccgagcccaacgcggccaggttcatggaaggcctgacggtgcgcaagatcatcatcgtcccgggcaagatcgtgaacatcgtcgctgcctga

SEQ ID NO: 494937 - DNA, 576 bp, Stenotrophomonas maltophilia
atgacccgaatcctgcttgccctcgttcttgtcctcggcctcgccggctgcggtttccatctgcgcaacaagctgatgctgccgaccgacactgccccggtgaaggtggtctccaccgccccgtacagtgaactggtcaagctgctcaaccgcagcctgctggcctccggtgccaagctggccgatgaggacagcaagggacccaacgcccagctgcaggtgctgtccgagcgctggggtgacctgccgatcgccatcgactcgcagggccgcgcacaggaatacagcctgcgctacgcggtgatcttcatcttccgtcgcgaggatggcagcgaactggtgccgcagcaggtgatcgaactgtcgcgcgactatgtgtcgccgccgaccgacgccaccggtaccaccaccgaacgcgaaatcctggccacggagctgcgccgggaaatgtccgcctcgatcatccgccgtatcgacagcgtggtccgcgccgagatcgagaagggcggcagcctgtccgcgccgaaggccaagccgatcgagggtgcggtgccggccgccgacgtcaagcactga

SEQ ID NO: 494938 - DNA, 1038 bp, Stenotrophomonas maltophilia
atggaactgcgtccggagcagctggccagccagggcgctgacaccccgttggcgccggtgtacctgatcgcaggcccggaaaccctgcgcgtgctggaggcggcagatgccgtccgcgcgcgcgcgcgcgcctccggcatcggcgaacgcgaagtgttcgacgccgacgggcgggatttcgactggaaccagctcgacgccagcttcaatgcgcccagcctgttcagcgcccgccgcctggtcgaggtgcgcctgcccagcggcaagcccggcaaggacggcgccgaagtgatcagccagttctgcgccaatccggcgccggacgtggtgctgatgatcaccgccaatgaatggagcaaggcccatcagggcaagtgggccgaggcggtcagccgcatcggcgtgctgtcggtggcctgggcgatcaagccgcacgaactgccggactggatcgagcgccgcctgcgcggcaagggcctgcgtgccgacccggccgccgtgcagcgcctggccgagcgggtggagggcaacctgctggccgccgcccaggaaatcgacaagctggcgctgttggccgatggccagccgctggatgtggagcggatggaatcgctggtggctgacgctgcccgctacgacgtgttccggctggtggaggcgacgttctccggccagccgccggccgtgctgcgcatgctggctggcctgcgcggcgaaggcgaagcggtggccgcactgatgccgatcgtgatccgtgaactgctggccggtgccggcctggcccgtgtgcaggcccgtggcggcaacctagccgccgaaatgaaatcgcgtggcatctgggaatcacggcaggcgccctacaagcgcgcgctgcagcggcacccggaaggcaagcgctgggaacgcttcgtggccgaagccgggctggtcgaccgcatcgccaaggggcgggccgacggcgatgcctggctggcgctggagcgcctgctggtggccgtggccgaaccgcgtgccgtgcgcctgctggcgcgggcctga

SEQ ID NO: 494939 - DNA, 666 bp, Stenotrophomonas maltophilia
atgagcctgcggatctattacgggggcaccttcgatccggtgcacctggggcatctggcaatcgcgcgagccgcccgggacgaactgcaggtggccgtgcgcatgttgccggcaggcgatccgccgcaccgtgcggtgcccggcgctaccgccgagcagcgctgcaccatgttgtcgctggccatcggcgacgaaccgggcctgctgctggaccgtcgtgaactggaccgtgccacgcgctatcccggtcgtccgtcctacaccgtcgataccctgcgcgagctgcgtggcgagctgggcccaagccggccactggcctggctggtgggcgccgacagcctgctgggcctgtccggctggcacgaatgggaggccctgttcgggctggcccacttcgtggtggccgagcggccgggcagcccgctgcaggcgtcgatcgacggtgaactggggcgtgccctgcaggggcgctgggccgacaacgaacaggccctgttcgccagcccggccggacgcatcctgcgcctgcaccacccgctgcgcgaggaatcggccagcgccgtgcgctcgcagatcgccgccggtggcccctggcgcgccctgctgccgccggctgtcgcggactacgtcgctgcacacgggctgtaccgcccggccacagcgtga

SEQ ID NO: 494940 - DNA, 411 bp, Stenotrophomonas maltophilia
ttgagcaaccagacccagccccagaccatcaaggtcgatctgcccagcccgccgccgtccgtgccggaactgctggccagcgtccgccaagccaccgaagacctgaaggccaaggacctggtcgagatcgacgtgcgcggccggtccagcgttgccgactacatgatcgtcgtttcgggcacctcgacccgccacgtcaagtcgatcgccgatgaagtcgtgcgcttcgccaagaacatcgacgtgatgccgctgggtgttgaaggcgagcgcgaagccgagtgggtgctggtcgatctgggcgacgtgatcgtccacgtgatgctgccgcgcgtgcgtgagttctacgccctcgagcgcctgtggaccgttggcgaccagccgccgtccagcgacgacgaagtggcctga

SEQ ID NO: 494941 - DNA, 471 bp, Stenotrophomonas maltophilia
atgaaagcccgcctgatcgccaccggtgaacgcgcgcccagctgggtcgcgcagggcttcgccgagtaccagaagcggctgtcgcactggctgccgttcgagctggtggaaatcgagcccggcttgcgcggcaaggggcgtgatccgcgccgcgccactgaagaggaaggcaagcgggtcatcgcttcgctgccgaagaacgcctatgtggtggcgttggatgtgccaggacgacagctgagttccgaacagctggcacagcgcctggagcattggcgcgggcagggccgcgacctggcgttcctgattggtggcccggaagggcattcgccggaggtgtccgcgctggccgatgagaagtggtcgatcggaccgctgacgctgccgcacatgctggtgcgcctggtggtggccgagcagctgtatcgggccgccgcaatgattgccaatcacccctaccatcgcgcgtga

SEQ ID NO: 494942 - DNA, 975 bp, Stenotrophomonas maltophilia
atgccgatcgtgcgcgtgctgctgtcctcgagcttcctgctgctggcgatggtgccgttcgccacaacgaaggccgcgccttccacctggcatccgccacagggcaccaccgagcttccgttgtggccgcagggcacggtgatcgcgccgccgaagttgaaggggcccgagcaggtcagcgaagtgatctccgaagccagtggcgaacactggatgatgctgcagaacgtcgctgcgccgaccctcaccgtgtttccaccgaagggaccggccaccggcaccgcggtgatggtggtgcctggcggaggctatcgggtgctggcgatggacctggaaggcagcgagatctgcgactggctgaccgcacagggcatcacctgtgcattgctgaagtaccgggtgccagcctctggcccgaactgggaccccgagtgcaactgccgcgactttccgaaagtgccgatggccctgcaggatgcacagcgtgcaatgggcctgctgcgcgcacaggccgagcgctggtcaatcaatcccaagcgtatcggggcgatcggcttttccgccggtggtcacgtggtggctggactgagcacgcacgcgctgcgcagctacgcgccggtcgatgctgcggatgagcaacccagccgtcccgatttcgccatggtgatgtattccgggcacctgtgggcagggcacgggaagggattgtcgctggtcagggacatcaccgtggatgacaaggtgccgccgacgttcatcgcgcaggccaccgacgatcgcaccgatgacgtgcgcgaatcgctggcctattaccgtgccctggcggacgcgggggtgccggtggaaatgcatctgttcgcacgcggcggccacgcattcgggttgcgcatgaaggatgcaccggtcgcggcgtggccgcagctggccgagcgctggatgcaggatatcggcatgctggcggatcgccagttgtag

SEQ ID NO: 494943 - DNA, 1455 bp, Stenotrophomonas maltophilia
atgctcgcggcattcgcgccgcaggggatctccatggccgcgacatcgcaacggctgggcctgcccgcgttgactgcactggtagtcggctcgatggtcggcgccggcatcttttcactgccgcagaacgtcgcgcgcagcgccggcccggccgccgccttgatcggctgggcggtcagtggcgccggcatgctgatgctggccttcgtgttccaggccctggccaatcgtcgccccgacctggataccggcatctacgcctatgcgcgcgaaggcttcggcaactacatcggcttctccgcggcgtggggctactgggtggcgtcggtgctcggcaacgccagcttcttcgtactgatcttcagtggcctcggccacttcgtgccggtcttcggtgaaggcaatacacccgccgccgtagccgcttcatcactgctgctgtggaccgtgcacctgctggtgctgcgcggcctgcgcacggccgccatcgtcaacggcctggtgacggtggccaagctgctgcccatcgcgttgttcctgatcctggcggcgggcgcgttccgcatggacgtattccgcgccgatttcctcggtacgcccgcactcggcgacctcggccagcagctgcgcggcatgatgctggtgaccgtgtgggtgttcatcggcatcgaaggggccagcatctattcgcggcgtgccgcgcgccgtgccgacgttggccgtgccacggtgatcggtttcctcggggtctggctgctgctggtactggtcagcctgctgtcgatgggcgtgctgtcgcaggccgaactggccgggctgcccaatccgtcgatggcctacgtgctgcgcgccatcgtcggcgaatggggcgcgacggtgatcatcatcggttcgatcgtctccgtactcggcgcattgctggcctgggtgctgctgtgcgccgaagtgctgtatgccgccgccggtgacggcaccatgccggccttcctcggccgcgagaacgcgcgtggcgtgccggccaatgcactgtggttgagcaatggcctgatccagttgttcctgctgatggtgctggtcagttcgggcagctacaccgggctggtgctgctcgctgcgtcgatgagcctggtgccctacttcctgtccaccgcgttcggcgtgcagctggcctggcgcgggcaggcctacgccggcgaaccaggcgtgcgctggcgcgatttcggggtcgcactgctggccagcgcctatgcgctgtggctggtgtatgccggcggcctggacaacctgctgctgtcggtactgctgtacgtgcccggcgtggtgttgttcgctttgacccggcgccagcgcggcgagcgggtattcacgcgctgggagtgggtactgttcggcgcgatcctggcggtggcgatcgccacgctggtggccttctgcagaggtgagctggcactgtag

SEQ ID NO: 494944 - DNA, 2796 bp, Stenotrophomonas maltophilia
gtgaaacacccgatccaacggcccgccagccgccgccgcagcaccctggcatcgtccatcacccacatcctcaccggcggcgccctgctgctggccggcgccgtcgcttcctcctccgccttcgcgcaggaaaaggccaccaacctcgaccgcatcacggtcaccggctccaacatcccgcgcaccaacaccgagacaccgtcgccggtgcaggtggtgacccgccaggaaatcgaccgcaccggcaagacctcgctggccgagtacctgcagaccatcaccgccgatggcgccggctcgattcccaagaccttcggcaacggtttcgccggcggtggcgccggcatctcgctgcgcggcctgggcgccggctcgacgctggtactgttgaacggccgccgcatggccacctatggcctggccgatgacggacagaaggtcttcaccgacctcagcaccattccgctcgatgccgtcgagcgcgtggaagtcctgaaggacggcgcttcggcgatctacggctccgatgccatcgccggcgtggtcaacatcatcctgcgcagcgacttccagggcgccatcctgcgtggctcctacggcctgtccggtgacagcgatggcgacgcccggaaagcaaccctgaccgccggtaccggtgacctggccaccgatggctggaacgccttcttcagcctggacgttggcaagaccgacgcgatcaagatcagcgaccgcaagaaccgcaagtggatcggtaccggtgacacccgcccgtggggctatgacaagaccgcccagttcctcggcggtgcctacacccgtggtggcacctccggcggttccggcccgaacggctcctacctcgacgccaccggccatctggtgccgctgccgggttgcgccggcctgaccaccatcggtgggcagaccccggccagcatcgccgccgatggctgcctgtgggatccggcgcagcagtaccgcgacctgattccggaagagaagtacgtcaacgtgttcggtcgcgccagcttcgccttcggtgaaggcggcgagatctacaccgagatcggctactcgaagaaggaaaccatcttcagcaacaccccgtccggcgtgtcgggcggctggggctatccgggcggcccggtcaatgccaacagtggccccggtgccaccgtgctgggcccgaaccatcccgacaacccgaccccgggcacggcgcgccgcgtgcgttactcggcctgggatgtcggcccgcgcgtgaccgacaacaccaatgagttcaaccgcttcctggtcggcatcaaaggcaactggggcgactggagctacgacaccgcctacctgcactcgggcaccgacctgaccaacaagcgcaccggcttcctgcgctacagcgccgtccagtgtgcactgggcaatgccaactgcgccggtggcgtgtggcgtatcggtgatgatgccggcaagaactcgcaggcgctgtacgactacatctcgcccacgatcagcgcccgcgccaagtccagcctggacatgttcgacttcaccgtctcgcgcagcctgatggacctgaagggtggtccgctgggcctggcgatcggtaccgagtggcgcaagaccagcaacagcctgaccccgcagacctacaccgaccagggcgacatcatcggcctgggctactcggcctatgacggcacccagaacgtctacgccggctacgtcgaactgtcggcaccggtgctggaacagctggaactgtccggcgccctgcgttacgacaagtacgaaagcggcgaaggcaaggctacgccgaagctgggcgtgaagtggaccccggccgactggatcgccctgcgcgccagctacgccgaaggtttccgcgcgccgaacccggccgagaacggtgacggtggcctggccgccttctccactgcggtcgacccggtgcgttgccagatcagcggcggcgctgccagcgaatgtggcgccaattcggtggcgatcatcaccaagccgaacaagctgctgaagccggaagagtccaagagctactcggtcggcatcgtgctgcagccgacttcgaccacctcgatgaccgtcgatgcctggcagatcaagcgtaccaacgagatcgtgcagggcagcacggcggcggcgatcctggccggcaacgtgctgcgcgacagcaacaatctcaatggcgtggccaacagcggcaccatcctggcggtcaacaccggctacgtgaatgccagctcgtcgcgcgtgcgcggtatcgataccgatatccgccagaccttcgagatcggcccgggccagctggagctggacctgcagtggagccacatcctgaagttcgagcgcaccgaaggcggcgacacggttgattacgtgggtacccacggcaactgcgacgtcaccaactgcatcggtacgccgaaggacaaggtcaacttcggcaccacctggaagcagggcccgtggagcgtcagcggcatcgtcaactacatcagcaagatggacaacatcgacagccgtggtggcagctacctggccttctacgctgacggtacgccggtgaagaagatctcttcgttcaccacgatggacctgtccggtcgctggagcatcaacgactcgttcgaactcaacgcctcggtggccaacgtgttcgaccgcatcgccccgctcgatccgaccacctacggcgcggtgaactacaacccgatgcacttctccggtgcgctgggccgttactacaccgtcggcttcaagtacacgttcaagtaa

SEQ ID NO: 494945 - DNA, 651 bp, Stenotrophomonas maltophilia
atggttcgtacgtaccccgttgcatccctgcatttcgaccccgcccgggtggccgcctggagcgcggcgatcgccctgcacctgctggccttcctgttgctgctcatccctgcgacctaccaggccgtgcaggtcccgcgtgaaaagacgccggtccggctgatcgagaagatcccgccaccgccaacgccgccggttccggtcccgcccagggagatcgtccaggtggtgccgaaaccgcgaacgcagccggtggtaccgccactgcccgcgcccaccgcgaccgtggaggagacccagggcatcgcgctgccggccgccgaaccggcaccgccgcagctggcgcccagcatcgacacgtccacccctctggccggcgcccaggtgcagtaccgcagcgccccgccgccgacctaccccatccagtccctgcgcaaccacgaacagggcacggtgctgttgcgggtggaagtggacagccatggccaaccggtcgcggtcagcgtcgagcgcagcagcggctcgcgcaacctggaccaggccgcccgccagcaggtgctccggcactggcgcttcgagcctgcccagcgtgacggcgtggcagttccggccatcggcctggtaccggtgcagttctcgctgcccgactga

SEQ ID NO: 494946 - DNA, 738 bp, Stenotrophomonas maltophilia
atgcgcctgaccgccaccccgctgctgctcgccctgtccctcgcccttggaacctcgatgactgcccatgctgctccgtcgtcgccgtcgatcgccgccgcggccgaaggcaccctgctgaacatttcggccaacgccgaggccacccgcgtgccggacgtcgccaccctgtcggccggcgtggtcacccaggccgccgacggcaacagcgccatgcgccagaacgcccagcagatggacaaggtgctggccgcgatcaaggccgccggcatcgccgagcgcgacgtgcagaccagcggcgtcagcctcaacccgcagtaccgctatgccgacaacgaggcgccgaagatcaccggctaccaggccagcaacacggtcagcctgaaggtccgtgacatcgccaagctcggcaaggtgctcgatgcgctggccgctcagggcgccaaccagatcaacggtccgcagtttgagatcgaccagcccgaaccggtctatgacgaagcccgcctggccgcgctgaagaaggcccaggcccgcgcccagacctatgccaagtcgctgggcctgcaggtgcgccgcatcgtcagcatctccgagaacagcagcggcggtttccgcccgatgcagatgatgcgcaccatggcggccggtgcggcgatggacaaggccaccccggtcgcaccgggcgaatcgaccgtctcggtcaacctggacgtggtgttcgaactgggccgctga

SEQ ID NO: 494947 - DNA, 609 bp, Stenotrophomonas maltophilia
atgctctatcttgcttcccgctccccccgacgcaaccagttgctggcccgactcggacgccctttccaggccctggacctggaggtcgtcgagcagcgcgccgcgaccgagagtgccgaacagtatgtgtgccgggtcgccgccgacaaggcgcgcgccgggctggcccgggtgctggccgaagacccgcaggcgcgggtgctcggctcggacaccgaggtggtgctggacggtgaagtgttcggcaagccggccgacgccgccggcgcgcgcgcgatgctggcgcgcctggccgggcgcacccaccaggtgatgactgcggtggtggtggtcggcgccgacgggctggacagcgaactggtcatttccgaagtgaccttcgccccgatcgccgccgccgacatcgccgcctatgtcgccaccggcgagccgttggacaaggccggggcctacgccatccagggcggggccgagcgctggatcgaacatctttccggcagctactccggcgtcatggggctgccattgctgcataccgatcgtctgctggcgcgctgtggcgtgccggcccccactgccgatgccgccagggaggctgccgatgtctga

SEQ ID NO: 494948 - DNA, 1488 bp, Stenotrophomonas maltophilia
atgtctgaggaaatcctggtcaatgtgaccccccgcgaaacccgggtcgcggtgatcgagaacggcatgctgcaggaactgcacatcgagcgcggctggcgccggggtgtggtcggcaacatctacaagggcaaggtgcagcgggtcatgcccggcatgcaggccgcgttcgtcgaggtcggcctggagcgcgccgcgttcctgcacgccaacgacgtggtgcgcccggccccggtggccagtgccgacaccgagaacacgacgctgccgccgccggccagcgtgccgatcgtcgagctgctgcgtgacggccaggacatcgtggtgcaggtggtgaaggacccgatcggcaccaagggtgcacgcctgaccacgcagatcagcattccctcgcgctacatggtgctgctgccgcagtccaaggtggtgggggtgtccgcgcgcatcgaggatgaaaccgagcgcgcccgcctgaaggcgctggtgaccgagttgtcggcgcagcacggcggctacggctacatcgtgcgcaccaacgccgaaggccagccggccgaggccatcgccgaggacatcgcctacctgtcgcgcgtgtggaacgtggtcgagcgccgcggccgcgaagcgccgtcgtgcagcatcatctatgaagacctgagcctgccgctgcggtcggtgcgcgacctgatccgcaaggacgtggacaaggtgaaggtggactcgaaggagaccttcggccaactgcaggccttcgtcgccaagtacatgccggtgctggccgagaagctggagctgtactccggtgaccgcccgatcttcgacatgttcggcgtggaggacgagatcggccgcgcgctggacaagcaggtgccgctgaaatccggtggttacctggtgatcgaccagaccgaggcgatgaccaccatcgacgtcaataccggttcgttcctcggccagcgcaacctggaagagacggtgttccgcaccaacctggaagcggcacaggcggtggcccgccagctgcgcctgcgcaacctgggcggcatcatcatcatcgacttcatcgacatggacgatgccgagcatcgccgccaggtgctgcgcacgctggaaaaggcgctggcccgcgaccatgccaagaccacggtgtacgacttctcgccgctggggctggtggagatgacgcgcaagcgcacggtggaaagcctggagcgccagctgtcggaaacgtgcccgcagtgcagtggccgcggcagcatcaagaccaccgagacggtgacctatgagatcttccgcgagatcacccgtgccgtgcgccagttcgatgctgcgcgcctgctggtgatcgcctcgaccaaggtggtcgcgcgcattaccgatgaggaatcctcggcggtggccgagctggaagagttcctcggcaagagcatccgcttccaggcggacgagcagtacctgcaggagcaattcgatgtcgttctgctctga

SEQ ID NO: 494949 - DNA, 3858 bp, Stenotrophomonas maltophilia
atgagcgcgccgccgcgcctgcgactgcgaaggatccgccgtcatttcattgccgcctgtgcggtgggcctggtcgggcttgcactgctggtgggcacgctcagccagctgctgccgctggccgagcgtcatcctgacaggatcgccgcctggctgagcgagcgtgccggccagccggtgcgtttcgaccagctgcagaccgcctggacccgtcgtggcccgctgctgcagctgaaaggcctgcgcatcggcgccgggcagggcctggcgatcggcgaggccgaggtgctggtatcgatgtacagcgggctgctgcccgggcgctcgctgaccgagctgcgcctgcgtggcctggcgctggatctgcagcagggcgaggacggacgctggacggtgcgcgggctgccgcaatcggacaacggcggcgatccgctggatgcgctgcgccggctgggcgagctgcaggtgatcggggggcgcctgggcgtgcacgcgccgacgttgggcatcgacaccacgctgccgcgcatcgacctgcgcatgcgggtcaatggcgatcgcctgcgcgtgggcctacgcgcctgggcgcagcccgaagcgctgccgctgaccgcggtgctggacgtggaccgtgcgcgcggcaacggcgaggcctggctgggcgccgacccggtcgatttccacgcctgggcgcccttgctggcggctggcggcgtgcgcctgcgcgagggcaagggcgagttgaacctgtggttgaccctgcgcgatttcgcgccggtggcgctgaccacggattcggacctgcgcgacgtgcgtatcgatggcgcaccgatacccggcatggcggcgccgcagctgcagctgcagcgactgcaggcccgcctgcgctggcagcgccaggccgagggctgggcgctgcaggtaccgcagctgcggctgaagaatgaagacggcgagcagcgcctcgatggcctgcagctgcaggtcggcaaacagctgcaggtccgttccggtgaagtgcaggccggcatcgcactgcgtgcgctggccctgagtgatcgccttgagccgggcctgcgtcgctggctgttcctgtccaggccgcagctggacgtgcgcgcgttgcagctgtcgggcgaacgcgatggccccctgtgggcgcagggtgaactgcagtcgctgggtttcgccagcgtgggcaactcgcccggcctgcgcggcctgggcgggcgctttgaaggcgacgccgacggcttcagcctgcagctgcaaccgcaacggcagctgcagttcgattggccgaccggcttcggcgtgcgccatgacctgcacctggccggacagatcgtgggctggcgcgacgagggcggtggttggcggatcgggacgccggcgatgcgtgtggaaggcaccgactacgcggccgacgtgcgcggcggggtctggttccagggcgacggcacgcggccgtggctgcagctggccgcgaagctggacgacgtgccgatgacggcggccaagcgcttctggatccactccaagatgagcaagggcgccaccgactggctggacatggcgctggctggcggccaggtgcgcaatggcgtcggcctggtcaccggtgacctggacgactggccgttcgacaacaatgatggccgcttcgaggccaccggccacatcaccaatggcgacatccgcttccagcacgactggccgctgatgagccaggtcgacgccgacatcgccttcatcggccctggcttcgacatgcgtggacggggtgatcttgccggcgtggcggtacagaaattcgaagcgggcattccggacttcgggcaccagccgttgtacgtacgtgccgacgcgccgagcgaggccggcaagctgctggcgatgctgcgccagagcccgttgcacaaggattacggcgatacgctggacaatctggtcgccagtggtccggcccatgtgaccttcgatctgctgcagccgctgcatcaggatgaaggcgagggccacctgcagggcacggtcgatctggccggcgtgaagctggtcgacaagcgcttccagctgacctttgacaacatgcacgggcaggcgcgctacagcaatggcggtttcggcgccgaggacctggcggtgcgccacctcggccaggaaggacggctgagcctgcgtgccggcggttacgtgcatgacagcacgcgcgccttcgagtcgcagctgaccgcccgcctcgatgccagcgtgctgatcgaccgtgctcccgagatggcctggctcaagccttacatcaacggcaattcggcctggaccatcggcgtcaacctgcccaaggtggcgcccggcgcacctgcgccgccgagcgagctgcgactgggttcggacctggtcggcacccggctcgacctgccggcgccgctggacaagccggccgccgagccgctggcgaccacggtggccgcgcagctgccgatgggcgccggccgcatcgacgtagcgttcggccagcgcctggccctggccgcgcgcagccacaacaaccagaccggtgtgcaggtcacgctgggcagcgaccatgtcgaccgcgagccgccggcgagcggactgacggtcaatggccgcagcccgaccctggatgcgctggagtggatcagcctggcgcgcgggggaagtgacgacgacgcgatgccgctgcgcgcggtcgacgtgcaggtcggccagctcaagctgatcggcggagtgttcgagcagacccggctgcagctgcacccgggcccgcaggcactggacgtgcgcctggacgggccgtcgctggccggccgcctgaccgtacccaacgccgacggcggcaccatcagcggccagcttgaccgcgtgcactggcagtcactgccggcggtaccgggggcggccgccgcgccggcgcgggtacaggccggtgccaatgacatggacccggccaagctgccgccgttcgcgctggacatcgccgacctgaagttcggcaaggtggtgctgggccaggcggtgctgcgcacgcgcccgctggccaacggcctgaacgtggacgcgttgcgcttccgcgcgccggaccaggaaatcgacatcaccggccgctggctcggccgtacgggcggcgcccgtaccgaactgaccgcgcaggtgcgcagcgaggacctgggcgggctgatgcagaaccttgattatggcggccagctgcgcggcggttccggccaggcgcagctgcaggcggcctggagcggggggccgtcggacttccagctgggcaacctgcagggcagcctcgacctgcaggcgcgcaatggccagctgctggagctggagccgggcgccggccgcgtgctgggcctgctgagcgtcgcgcagctgccgcggcggctgatgttcgatttccgcgacttcttctccaagggcttcgcgttcaaccagatcgagggcagcatgcagttcggtcagggcatggcgcgcaccgacaaggtgctgatcgaaggcccggcggccaacatcaccatccgtggccaggccgacctgcgcaaccagcagttcgaccagaccatcgacgtcaacccgcgcgcgggcaacctgctgaccgtggtcggtgcagtggccggcggcccggtgggggcggcgctgggcgcggccaccaatgcggtattgtccaagccgctgggcgagattggcgcccgtacctacaaggtgaccggtccatggaaggagccgaaggtggaagtgatcgagcgcagccgcgacaagaccccatcaccgcccgtgccggcacctgcaccggccattccgccgaccgtcaccgacctgccgcgctcgcgctga

SEQ ID NO: 494950 - DNA, 1446 bp, Stenotrophomonas maltophilia
atgactgatatcgccctgacgcttgcccaagaccgcctgctgcgccccggcggcctggataccgccggcctggagctcaccttcgggcagctgctcggccctggtgtcgacttcggcgacctttatttccagcacgcccgccgcgagagctggagcgtggaagacggcatcgtcaaggacggcgcccattccatcgagcagggcgtgggcgtgcgggcgatttccggcgagaagaccggcttcgcctactccgatgacatccatgccgatgcgctgctggcggcggcgcagtcggcgcgcgcgatctcgcgcgagggcggtgcgcagaccggacgttcgctgctgcgcggcaatgcgcgcgcgctgtacccggcgctggacccgatcgacggcatcggcaacgaggccaaggtcgaggtgctcaagcgcctggatggctacctgcgtgccgccgacccgcgcgtgaagcaggtgatggtgagcctgtccggcggcgtcgatacggtgctgatcgcccgcagcgacggcgtgctggcggccgacgtgcgcccgctggtacgcctgaacgtgcaggtcatcgtcgaacacaacggccgtcgcgagtccggctacgccggtggcggtggccgttatggctacgaagcgctgttcgccagcggccgccccgaagccctggcccaggaagcgctgcgccaggcgctggtgaacctggacgcggtgccggcgccggccggcatgatgccggtggtgctcggcccgggttggccgggcgtgttgctgcacgaagcggtcggccacggcctggaaggcgacttcaaccgcaagggcaccagcgtctacgccggccgcatcggcgagcgtgtcgccgcaccgggggtgaccatcgtcgacgacggcaccctcgacggtcgccgcggttcgttgaacatcgacgacgaaggccacccgagccagtgcaccccgctgatcgaggacggcatcctggtcggctacatgcaggacagcctcaacgcgcggctgatgggcatggccccgaccggcaacgggcgccgcgaatcgttcgcgcacctgaccatgccacgcatgaccaacacctacatgcgcgccggcgagcacgacccgcaggagatgatccgttcggtgaagaagggcctgtacgcggtcaacttcggcggtggccaggtcgacatcaccagcggcaagtacgtgttctcggccaccgaggcctacctgatcgaggatggccgcatcaccaccccggtgaagggcgcgaccctgatcggcaacggcccggagaccatgcagaaggtgcgcatggtcggcaacgatctggccctggacgagggcgtgggcatctgcggcaaggacgggcagagtgtgcccgtgggtgtcggccagccctcgctgttgatcgagggcatcaccgtcggcggtacgcaggcctga

SEQ ID NO: 494951 - DNA, 588 bp, Stenotrophomonas maltophilia
atgcgcggacgcgacgaagaaaccggtgaattccacgacaagagccgcagccagaaccggcgcgacgcgctcgacgtcctggccctgggcgagaagctggtgtcgttgaccccggcccagctggcgcgcctgccgatcccggaagacctgctgccgcatatcgccgagtgcaagcgcatcaccgcccacatcgcccacaagcgccagctggcgttcctggccaagcacatgcgccgcgaggacgaggcaacgctggacgcgatccgcgatgcgctggacgccaacagcgagactggccgccgcgaagtggcgatgatgcaccgcgtggaagactggcgcgaccgcctgttggccgacggtgacaaggcgctggccgccctgcttgacgactacccgcaggccgaccgccagcagctgcgcaccctggtacgcaacgcgcaggccgaaaaggcgaagaacaagccgccgcgcgcctaccgcgagatcttccaggtgctgcgtacgctgatgctgccggcggcgctgggcttgaagacggcgggcgacgaacacgccggcgatccggtcgacgaggccgacgaggactga

SEQ ID NO: 494952 - DNA, 1368 bp, Stenotrophomonas maltophilia
ttgaacgtgatcgcccctgaagtggccgtcggcgacgacagcccggcccggctggaacggctggccgacctctcccagcagctgctcgaccgcgcccgcgcgctgggcgccagccaggccgaggtcagttgcagcgaggaccgcggactggaggtcaatgtccgcctcggcgaggtcgagaccgtgcagtccacgcgcgaccgcggcatcgccgtgaccgtctatttcggccagcgcaagggcagtgccagcaccggtgacctgaacgaggccagcctggccgctacggtcgagcaggcctgcgcgattgcccggcataccgaggatgacccggctgccggcctggccgaggccgcactgatggccaccgacttcccggagctggacggttggcacccgtgggcgctgcaggccgatgaggcggtggacctggccctggcctgcgaggcggccggtcgcgaggccgacgcgcagatccgcaattccgacggcgcatcggtgtcgagcatgcagagcctgtcggtgtatgccaattcgcatggtttctttggtcgtgagcgcggcacccaccattcggtcggctgcgcgctgatcgccgggcagggcgatggcatgcagcgcgatggctggtacaccagcgcgcttggccgggaggacctggaagacgtgggcctggtcggccgtcgtgccgccgagcgcaccgtggcccgcctgcagccgcgttcactggctactggcagcatgccggtgctgttcgccccggaagtggcgcgcagcctggtcggccacctgctgtcggcggtgtccggcggcgccttgtaccgccaggccagcttcctgctggacagcgtcggccaacgcctgttcccggaatggatgcagatcgacgagctgccgcacctgcgccgtggcctgcgctcggccgccttcgacggcgacggcgtggccacccgtagttcggcgctggtccgagacggcgtactgcagcgctacgtgctgggcagctattcggcgcgcaagctgggcctgcagaccaccgccaatgctggcggcgtgcacaacctgcagctggcggccaatgccggcccgctggaagagatcgcccggcagatgggtgacggcctgctggtgaccgagctgatggggcagggcgtgaacggggtgaccggcgattactcacgaggcgcgggcggcttccgtgtcgagaacggcgagatccagtacccggtggacggcgtcaccatcgccggcaacctgcgcgagatgttcagcagcatcgaggcggtcggcagcgacgtcgacccgcgctcgcacatccggaccggttcgatcctgctggggcggatgaccgtcgccggtaatgattga

SEQ ID NO: 494953 - DNA, 372 bp, Stenotrophomonas maltophilia
gtgagcgaattcgataacgtcccgccgccgccggcaaccaccgatgccccggccgaccagcgcaccatggcgctggctgcgcacctgctgggcatcttcacctggttcatcggcgccctgatcatctggctgatcaacaaggatgacgccagcaaggccttcgtgaccgaccaggccaaggaagcgctgaacttccagatcaccgtgaccatcgccatggtcatcagcatcatcctgatggtggtgatcatcggcggcatcctggcgccgatcgtgggcatcatcaacctggtgttctgcatcattgccgcagtcaaggccaacaacggcgaagcctatcgctacccgttcaccctgcgcctgatcaagtaa

SEQ ID NO: 494954 - DNA, 879 bp, Stenotrophomonas maltophilia
atgacggctgaagcccttttcgcgcgctggcgcgaccgtatcgaaagccagctcgatgccgccctgccctcgcctgccgaagcaccgcagcgcctgctccaggccatgcgctattcggtgctgggcggtggcaaacgcatgcgaccgctgctggtgtatgccagtggccacctgttcggcgcgcagccggaacagctggacgcggcggcgatggctgtcgagctgatccacgcctattcgctggtgcatgacgacctcccggcgatggacgacgacgccctgcgccgcggcaagccgaccacccacatcgccttcgacgaagccaccgcgatcctggccggcgacgccctgcagacgcgtgccttcggcctgctggccgatgcgccgctgccggccacgctgcgcgtggcctgcctgcagaccctcgctcacgcgtccggcgcctccggcatgtgcggtggccaggcgctggacatcgatgccaccggccagcagcagaccctggcggcactgacccgcatgcatgcgctgaagaccggcgcgctgatccgtgcagcggtgcgcatgggggcgctgtgcggccaggcccacgagccgcagctggcccagctcgacagtttcgccgatgcactcggcctggccttccaggtccgcgatgacatcctcgatgtcgaagccagttccgaacagctgggcaagaccgccggcaaggaccaggcgcaggacaagagcaccttccccgcgctgctcggcatggacggcgcgaaggcgcagctgcgcgaactggccgcacgcatgcaggccacgttggccggccatggcgaagaggccgatgcgctgcgcgcgctggcaacgctggcggtggaacgcgatcactga

SEQ ID NO: 494955 - DNA, 261 bp, Stenotrophomonas maltophilia
atggccaagaagtcccccgaaaacgcctccccggtcgcccagttcgagcagtcgctcgaatcgctggagcagctggtggagcagatggaaaccggcgagctgagcctggaagcgtcgctcagtgcttacgaacgcggtgtcggtctgtaccgtcagtgccagcaggcgctggagcaggccgaattgcgcgtgcgcctgctcatcgatccggcccagccggaaacggccgagcctttcgatccgcccaaccatgacggctga

SEQ ID NO: 494956 - DNA, 1329 bp, Stenotrophomonas maltophilia
gtgcagggcgcagccctgccgagcaaccctatacttgccgccgtgactgccttccctgccctcgttccgctggatgcgccactgctggtgggctacagcggcggtgtcgactcgacggtgctgctgcactggctgtggcgctgcgccaaggcctccagcacggcgctgcgcgcggtgcacgtgcaccatggcctgcaccccgatgcggacgactgggtgctgcattgccagcagcaatgcgcagcgctgggcatcgaactggccgtgcatcgcgtgcagatcgaccccacatcgggcctgggcctggaaggcgcagcacggcaggcgcgacgcgccgcgttcgccaccgaactgcgcgacggcgaaacactggcgctggcgcagcacctggacgaccaggccgagaccttcctgctgcgtgccctgcgtggctccggcgtcgatggtcttgccgcgatgtccgcagacagccgcgtaggcgaacaccgtgtgtggcgaccgctgctggcggtgccgcgccgtgcgctgctcgattatgcgcaccagcacgcgctgcactgggttgaagaccccagcaacgccgacgaccacgccgatcgcaatttcctgcgactgcaggtgctgccgttgctgcgccagcgctggccgcacgccgccgcggcattggcgggcagcgccctgcattgccggcagacccgcgaactgctggacgaggaggacgccgagctgatcgtgcatctggaggtggcaccgcgtgtgctgtcgctgcagctgctgcgccaggtgtcaccgggccgcgccgcgcgcgtgctgcgtgcctgggtgatcggccatggggccgccccactgccggccacggtgctgcagcaggcgctggacgagctgctgccagccagcaacgatcgccaggcgcgggtgcgctggcacgatcatgccatccagcaatggcgcgatcatgcctatctcctgcccgcgcaactgccggcgcttccccatgattggcaggccggatgggatggacgcgcgccattggcgctgcccgatggcggtcagctgcacctgcacggcgccgaggccttcgaacggccgctccaggtccgtgcgcgtgtgggcggcgaacgcatcctgctgcccggtcgccagcattcgcatgcgctgaaggactgcctgcaacgcgaacaccttgccccctggcgacgcgcccagctgccgctggtcttcgatggagcgcagctgcttgccgccgccgacgtggtcatcgcagctcccctgcaggcctggttgcaggcccacgacgcgcagctgcagtggcgtccgggcggctggtga

SEQ ID NO: 494957 - DNA, 534 bp, Stenotrophomonas maltophilia
gtgcggcaggcccgcctcgaccgcggccgcttcgcgcggtcgctggtcctgctcggcgtactggccggttccagcgcgctggcgcaggcgccggcctgcaagctgctgaccgacgaacacgggttgtggccgctgcccaactgtgaggtggtcgatcaccggccgaagatcagcgccgatgcgctgaaggacctgagctacgacgaccacggcctggccgtgctgtatgccgaccagggcttccactacgtcgaccgcaagggccgcagcctgcctgtgctgacctgggacaacggcccggaaacaccgcaggaaggcctgctgcgcggccgcgtcggcaaccgcgtcggctacttcgacctgacgttccgccaggtggtgcccggcacctacgatttcgggtggccgttccaggatggcgtggccgaggtctgcaacggctgtcggcgcggcacgccggatgccgatggccacacgccgatggaaggcggggagtggttccgcatcgaccgcgcgggccgtcgggtgaagtag

SEQ ID NO: 494958 - DNA, 1707 bp, Stenotrophomonas maltophilia
atgcgccgttccgtctcaatgttggccgcctgcgccaccaccctgctgctgggcgcctgcgccagcaccacccccgcctctgttccggccggcctgaaggtcaccgtcgacccggtcgcccatccggccggcgagaccccgcaatggtggtaccgcagtggcgccgcccaggccgccgccaacggcgcgatgtccggcaaggcgaagaacgtcatcctgttcctcggcgacggcatgagcctgaccaccgtggccgcctcgcgcatctacgaaggccagcagaagggtggctcgggcgaggagaacctgctgtcctgggagcgcttcccggccacggcgttcagcaagacctacaacaccgattcgcagacgccggattcggccggcaccatgaccgccatcaccaccggcgtgaagacccacatgggcgcgatcggtgtcagcgccggcagccgcaccgactgcgccgacagcctgtccaagggcctgctgacctggctgcagctggccgacagcgccggcctggccaccggtgtggtgtccactgcgcgcctgacccatgccacccccgccgccacctatgcgcactcgcccgagcgcaactgggaaaacgacaccgacctgactgaagcggccaaggctgcaggctgcaaggacatcgcacagcagctgctgtcgacctcgcgttatgggcgcggcccgctggtcgctctcggcggcggtcgcggtgaattcaccaccgtggaagagcgcgatccggaatacgacgacaaggtcggccagcgcctggatggccgcagcctggtgcaggaatggcagcaggcgcacccgcagggtgcctacgtgtggaacagcaagcagctggcggcggccgccaatgcgccggccatcctcggcctgttcgaaccggaccacatgcgctacgaatacgagcgcccgcaggatccgggcggtgagccgagcctggccgaactgacggctgcagcgatcaggaatctggccaggcaccaggaaggctacgtgctgatgatcgaaggcgcgcgcatcgaccacgccaaccacagcggcaacgcctaccgtgcactgaccgagaccgtggcgctgtccgacgcggtgcgcgtggccaacgaactgacctcggccgacgacaccctgatcatcgtcaccgccgaccactcgcatacgctgaacttcgtcggctacccggcacgtggcaatccgatcctgggcaaggtgaaggacaagggcggcgaagatggtgccggcaagctggactacgcgctggacggcaccggccagccgtacaccacgctgagctatgccaacggcccgggccataccggcagcagcaaccagcagccggccggcccgaagcgttacccgcacaacccgagcagcttcgaaccggccaacggccgcccgaacctgcgcgaggtcgacaccgagcatccggactacatgcaggaagcactggtgccgatgaagtccgaatcgcacggtggtgaggatgtcggcatctgggcgcgtggcccgggcagcaaggcgatccgcggcacgctggaacagaacgcgatctatcacatgatcgtgcaggccaccccggccctgcgcgagcgcctgtgccaggccggcacctgcgatgacaagggcgtgccggtgcagctgccggcaccgacggccttcgagcgcaaggccgaggccaagtga

SEQ ID NO: 494959 - DNA, 1335 bp, Stenotrophomonas maltophilia
atgaagctggtctctgcctggctgcggattccattctggcagcgcgtggtcggtggcttcgtgctcggcgcgctggccggctgggcgcttggcccggccgcggaaacgtggttcggcccgctcggtgagctgtacgtcaccctgatcaagatgatcgccgtgccgctggtgttcttcgcggtcatcaacgcgatctcgtcgctgcacgggcagaagtcggtcgccgcgctcagtggccgcaccttcctgtggttcgtgatcaccgcggcgctggcggtatgcgttgggctgggcgtggggaccgtgctgcagcccggtgccggcgggctgcagctgacaatggccagcaactacgtgccgcgcgaagtgcccagtgtggtgcaggtgctgctggacgtggtgccggccaatgtcttctacgcgctgtccggcatcggtaccaaggtcaatgcggccggtgagaccgtgctggcggccggtcgcggctcgatcctgccggtgatcttcttcgcaggcctggtgggctttgccatcgtcaagcagggcgagaaggtgaccgaggcgcgcaagctggtcggccagatgagcgacatcatgatccaggtgacccgcttcgtgctggaagtcaccccgatcggtaccttcggcctgatcgccggcctggtcggcagttatggcttcgaaaagctgctgccgctgggccatttcgtgctggccctgtacgtggcctgcgccctgcacatcgtggtggtctacagcgcgctgctgctggcgcacggcctgaacccgctgaagttcttccgcggcgcggcgccgggcatgcaggtggccttcgtcagctcgtccagcttcgccgcgatgccggtggcgctgcgttcgatcacccacaacctgggcgtgaacaaggactacggttcattcgcggtgccgctgggcgccagcatcaagatggatggctgcggcgcgatctatccggcgctgtgcgcggtgttcatcgcgcagtacagcggtgtgccgctgaccccggagcagtacgtggtggtgctgatcgcctcggtgctgggcagcttcggtacggccggcgtgccgggtaccgcggtgatcatggccacggtggtgctgagcgcagccaacctgccgctggagaccatcggctatctgtatgccatcgaccgcatcctggacatgatgcgcacgatgacgaatgtgaccggccagatgctggtgccggtgatcgtggccaaggaaaccgggctgctggaccaggcggtgtatgacaatccgtccagcaatgtgggcgtggacgatcctgacccgacaccgccacgcagctga

SEQ ID NO: 494960 - DNA, 774 bp, Stenotrophomonas maltophilia
gtgacgactgacgacctgaaaagcgaaggccagacttccgtatcttcacgtagtgcccgcccgctgttgcttggcctggcactgtgtctgaccagccttccggcctggtcgcagactgctccgaaccgttccgatgtgaccccggccccggtggccgagagcaccgcccgaccggccgccaaggccgaggctgccgctccgcagcgcagccgcgtcgatgccgccgccagtgccacgctggccgccctgctgccgcacctggccgccaacgacaccattccgctgatggaccgctcggccgtggtggccggcgacctcagccgcctgctcgccaactacgacaccagcagcgccgccaatggcagcgtcgtcggcaccgccgccggcaacggcaaggtgcagtcgctgctgcgccgcgcgatgaccctgctgggcaccccgtaccgttggggtggcagcaacccggacagcggtttcgactgcagcggcctggtcggttatgtgttccgttcggccctgggcatcgaacttccgcgcgtctcgcgcgagatggcccacgatgacaatgccgaactgatcaacgaccgcaccgcgctggccgcgggtgatctggtgttcttcggccgcaagggccgcgtcgaccacgtcggcatctacgtcggcgatggccgtttcctgcatgcgccgagctcgggcaaggacgtccgcgtggacaccctgctcagtggctactggggcaacaagttcatgcaggcccgccgggtcgacctctga

SEQ ID NO: 494961 - DNA, 540 bp, Stenotrophomonas maltophilia
atgcacatcacgccagtttcgtccggccagcgccggtttctcgccccggccctgctgctggccctgcccctgttgatgaccgcctgtggcggtggcaaggccacccgcccggccccgcccccgcccacggcgaactggccaaagaccgtgccggacaaccccgaggctgccaactcggtgctgatgcgcgccatcagcctggtcggcacgccctaccgctatggcggcaacactccggattcgggcttcgactgcagcggcctggtcgcttatgtctatcgcgagatgctggacctgcggctgccgcgcacctcccgcgacctggcggcggtgcagggcccgaagatcgacccgcagcgcctggccaccggcgacctggtgttcttcggcagccgcggcagcgtcacccacgtcggtatttatgtaggtgaagggcgcttcgtgcatgcgccgagcaccggcggcaccgtgcgcctggactcgctcagcggtccctactggaaggaccactacacaggggcgaaacgcgtccttcgctaa

SEQ ID NO: 494962 - DNA, 558 bp, Stenotrophomonas maltophilia
atgatggcggcgtccccgccgggcgacaacccgccccaacccgcctgcctccggcagatccagacagagttgcgcatgaagatcgaaaaagaccgcgttgtccgcttccactacaccgtttccgaagtcggccaggagccgatcgaatcgtccaaggaccgcggcgagccgctggcgatcctgatcggtcacggcaacatcatcccgggcctggaaaacgccatgatggacaaggaagccggcgcgaccttcaacgtcgacgtcaaggcggccgatgcctacggcgagcgtcgtgagggcctgtcccagcgcgtgccgaagaagcacttcggcaataccaagctggcgccgggccagcaggtcgtgctgcagaccaacttcggcccgcgtgcggtgaccgtgcagaaggtcggcatgagcgtcgtcgacgttgacctgaaccatccgatggctggcaaggacctgcacttcgacgtcgaaatcgtcgacgtgcgcgaagccggcaaggaagagctggaccacggccacgtccacggcgacggcggtcaccagcactga

SEQ ID NO: 494963 - DNA, 1245 bp, Stenotrophomonas maltophilia
atggcggacctgcctgacggacgccccgtgaacgccgcttctccttccctgcagccggtggcttccggcgaacgcatcgccgtgctggacgtgctgcgcggtgctgcgctgctgggcatcctgctgatgaacatcgaggctttcagcggcccgctggacctggccttcaccggcattgacgtgcactggcggggcatcgattactgggccgacgccttcgtctatgtgttcgtgcagggcaagttcttcaccctgttctcgctgctgttcggtgccggctttgcggtgatggcacaacgcgccgaggtggccgggcgcgacttcaccccgttctacctgcgccgcagcgccggcctgctgctgatcggcctgtgccatgcactgctggtctggtccggcgacatcctggtgatgtatgcgctggtctcgttgcccttgctggcctgccgcgaggcgccgcgcagctggctgccgtggatgggcgtgatcgtctacctcggcggtgtagcgatgatgctgctggtgggtgcgatggtgtcgatggcgtcggccgaagaggtgcagggcatgcttgccgaggcgcagcagagcatcgacctgcagcggcaggtgtacgggcagggcagctgggcgcaggccactgtgcagcgcctgagcgagttcggcacctcgatgggcgcgttgctgatcagcggcccggaagtgctgggcatgttcctgctcggcagctggttcgccggcagtggcgcgctggcgacgccggagcgcttcccgcggctgtacgcgtcgctgcgctggatcgcactgccgctggggctgctggtcacgctgctgggggttgcctggaaaccctaccttgcacccggcgcctacaacctgccggtgaccgcggcgatggccctggtcacggttggcgggctgccgatgtgcctgggctacctggcgtggatcgtgcactggcgcacgcggctggcgtggctggcgccggtggggcgcatggcgttgacccactatcttggccagtcgctgctgtgtacctggaccttctaccactacggcctgggcaggttcgagatgatgccgcgcagcgtgcagctgctgttcgcgctgctgttgtttgccgtgcaggtggctgtttcgcacgcgtggctggcgcgcttccgctttggtccgatggaatggctgtggcgtgcaatgacctaccggcagtggccaccgatgcggcgcaggacgaagcaggggtga

SEQ ID NO: 494964 - DNA, 1359 bp, Stenotrophomonas maltophilia
atgagcactgcatcctatgattacgatctgatcgtccttggcggcggctccgccggcctggccggcgcgatccgcgccgcgcagcacggcaagcgggtggcaatgctggaacccggcgaactgggcggaacctgtgtcaatgtcggctgcgtgccgaagaaggcgatgtggctggcggccgacctgcacgagcgcatcggcctggccaatgcgatgggcttcgatgtcgaggcacgcccggcgctgtcgtggaaggaactggtgatccatcgccaggcctacatcagcaacatccacaccagctaccacaagcgcctggacgaaaccggcgtggtgcgcattccggcacgtggccatctgcttgatgcgcacaccgtggcctgcagtgatggcgtgcgttacagcgccgaacacatcctgatcgccactggcgcgcatccactgcgtccggatattcccggcgcggagctgggcctggtctccgacgatttcttcgacctgcgtgcggcgccggccgaggtggcgatcatcggtggtggttacatcgcggtggagctggctggcctgctgcaggcgctcggcagccgcgtgagcctgctggtgcgcggcaagcgcctgctggagcgcttcgattacgagctgaccgatcagctggccgagaacctgaaacagcagggcgtgcggatccatttcgactatcgcctgcgcgaactgcagcgcgatggcgagcgcgtgcgggcgttcggccatgacggcccgatcgacagtgtgttcgatgcggtgttcttcgctgccggccgccgcggcaacagccgtggcctgggtctggaagcgctcggcatcgacatcggcgagcacgagcaggtgcaggtggacgagtggcagaccacccgcgtgccgagcgtgcacgcggtcggtgacatcgccggcaaggtcggcctgaccccggtggcggtggccgcttcgcggcggctgatggaccgcctgttcgggggccgcccgcagtccaaaatggattacgagaacgtggccagcgtggttttctcgcatccgccgctgggcgcggtgggcatgagcgaggaagaagcgcgccggcgtttcgcccaggtgagcgtctaccacagccgcttccgcccgatgctgcaggcgctggccaatggtacccagcgcagcctgttcaagatggtctgtgccggcccggaagaacgcgtggtaggcatccacctgctgggcgaagcggccgacgagatcctgcagggctttgcggtggcggtgaagatgggcgcgaccaaggcccagttcgacgacaccgtggcgatccacccgacctcggccgaagaagtggtgctgatgcgctga

SEQ ID NO: 494965 - DNA, 921 bp, Stenotrophomonas maltophilia
atgtccactcccgcttcccgcatcgccactgcttccccacgcattgcgctgggcggcatcggcctggccgcgatcggcgccatcgccgcgtcgggcaaggcgatcatcgtcaagctcggcctgcgccacggcgtcgatgccaccacgctgctcgccctgcgcatgctgatggcgctgcccctgttcgcgttgatggcagcgtgggccgcgcgccgggccgagccgttgtcctgggccgaccgtgcccgcgtgctgtggctgggcttcaccggctactacctgtccagcctgctcgacttccagggactgcagtacatcagcgtgaccctggagcggctgatcctgtacttgaacccgaccctggtactgctgatcaacgtgctgctggcgcgccagcggccgggccgctggcagatcggtgcgctggtgctgagctacctcggcgtgctgctggccttcggccacgatctgcagcgcgagggtgggcagatcatcgtcggcagcctgctggtgctgggcagtgccctcagctatgcgctgtacctgttcggcagtgggcaggtggtcgcgcgcatcggtgcggtgcggctgaccgcctatgccagctgcgtggccagcgtgctggtgctgctgcatttcgcggtgacccatccgctgccgctgctgtggcaggcaccggcgccggtgcagtggctgtcgttggtcaatgccaccgtgtgcacggtgctgccggtgctggcgatcatgctggcggtgcagcgcgtgggttcgtcgctggccgcgcaggtcggtatgctgggccctgtttccaccatcgtgatgagcctatggctgctcgacgaaccgatggggccggcgcagatcgccggcaccgtgctggtgctgatcggcgttctgctggtgacccgcctgcggcgctga

SEQ ID NO: 494966 - DNA, 273 bp, Stenotrophomonas maltophilia
atgggctacggccaggtggcgatgcgcgcgggcctgcccgggcgtgcacgcctgaccgcacgcatcctgggccagaacgacgacccggacctgccctggcaccgcgtgctgcgctcggacgggcgcattgccatggaagaagggtcggccggctggcgcgagcagtcacaacggttgcgcgccgagggtgtgcgggtggagaacggccgggtgcggatgccggcgaccgatccggcggcggcgctggacgcagcggtgtggggcccgggctga

SEQ ID NO: 494967 - DNA, 672 bp, Stenotrophomonas maltophilia
atgttcccgcgactgccaaccgtcaccaaggccctgctgatcgccaacgcgatcctgttcctgctgcagcagccgttcctgctcggcatgcagaccttcgagccgttcatgctgcaaccgttgcagcagggcttcgacgctttctcgccgggtggcaacttccagccttggcagctgctgacctacggtttcctgcatggcagcttcggccatctgttcttcaacatgctggcggtcttcatgttcggcgcgccgctggagcagacctggggcgagaagcgcttcctgctgtactacctggtgtgcgtggccggtgccggtgtctgccagctgctggtgggtacgctgctggaaaaccctgccacggtgctgggcgcctccggcggcgtgttcggcctgctgctggcctacggcatgctgttcccgaaccagcgggtgatgctgctgttcccgccgatcccgatgaaggcgcgcactttcgtgatcctgttcggtgtgggcgagctggtgctgggcatgaccggctggcagccgggcgtggcccacttcgcgcacctcggcggcatgctgttcggctggttgctgatccgctactggcgcgggcagccgccgttcaagcgccgcccgcccggcccaccgaagcgcccgaaccatctgcgcagcgtcaaatga

SEQ ID NO: 494968 - DNA, 1584 bp, Stenotrophomonas maltophilia
atgtcctgcgatgcgatcgtcgttggtggcggccacaacggcctggtctgcgcggcctatctggcgcgcgctggaaagaaggtgctggtgctggaacgtcgtggcgttctcggcggtgccgcagtcaccgaggaattccatcccggcttccgcaactcggtggcgtcgtacacggtgtccctgctgcagccgaaggtgatcgacgacctgcaactgcatgcgcatgggctgcgcatcatcaatcgcccggtcaacaacttcctgccgatggaggatggtcgttacctgctgtcggcaccgggccgcacccaggcagaggtcgcgaagttctccgagcgggatgcgcagcggcttcccgaatacgaagcgcgcctggagatcttcgccgatgtgctgcgcgcgtgggccctgcgcgcgccaccggatgccggcgttgcgggtggttggcgcgcgttgcctgcgctgtggcagatgggtcgtcttggtcgtgaactggccacgctggatgcctcgctgcggcaggagctgctggacctgttcacgctgtcggcagccgagtatctggatcgctggttcgaaagcgaaccgatcaaggcgctgttcggcttcgatggcatcgtcggcaactacgcaagcccctatacaccgggcagtgcctacgtactgctgcaccacgtattcggccagtgcaatggcgtgaagggtgcgtggggccatgcgatcggcggcatgggcgcgatcagccaggcgattgcagcctcggcacgcgaggccggggcggaactgcgcgtggaggccggcgtgcagcgcgtgcgaatcgaacagggccgcgcggtgggcgtcgaactggccaacggcgagatcctgcgcgcacgcacggtggtcgccaacgtcaatccgaaactgctgtacgaacaattgctggaaccggcacaggtacccaacgcgacacgcgaacgcatggcgaactggcgctgcggttccggcacgttccggatgaacgtggcgctgtcgcggctgccggagttccgcgccctgcccgggcccggcgatcacctcagcgccggcatcatcatggcacccagcctggattacatggaccgcgcctggctggatgcgcgccgcgacggttgggcgcgcgaaccgatcgtggaaatgctgattccgagcacgctggacgattcgctggcgccgcccgggcagcacgtggccagcctgttctgccagcatgtggcgccggtgttgcctgaaggccgccattgggacgatcaccgggagaccgtggccgacctgatgatcgccaccgtcgaacggcatgcgcccggcttcaccgccagcgtgctcggtcggcaggtgctgtcgccgctggatctggaacgcaccttcggcctggtcggcggcgacatcttccacggcgcactgagcgccaaccagctgttctcggcacggccgatggtcggccaggccggctatcgtggcgccctgcccgggctgtacctgtgcggttcgggcacacaccccggcggtggcgtcaccggtgcaccggggcacaacgcggcgcaggtggtgttgcaggatctgtag

SEQ ID NO: 494969 - DNA, 495 bp, Stenotrophomonas maltophilia
atggcacacaagaacacgatctgcctctggtacgacaacggcgcgctcgaggccgccaccttctacgccagcatcctgcccgacagcgcggtgatcgccgtgcatcacgcccccggcgactttccggatggcaaggaaggcaacgtgctgacggtcgagttcacggtctgcggcattccctgcgtcggcctcaacggcggcaccgcgttcaagcacagcgaagcgttttccttccagatccagaccgaggaccaggccgagaccgaccgcctgtgggatgcgatcgtcggcaacggtggacaggagagccaatgcggctggtgcaaggatcgctggggcatctcctggcagatcagcccgcgcatgttgatcgaagccgtgaccagcaaggacaagacattggccaagcgcgccttcaacgcgatgatgccgatgaagaagatcgacatcgccaccatcgaagcggcaatcaaaaaaggggacggaggggattaa

SEQ ID NO: 494970 - DNA, 2007 bp, Stenotrophomonas maltophilia
atgcccaatttccgtccgcttgccatcgccctgggcatcagcctggcgacgctggtcccgacccacgatgcgttcgccgccaagaagaaggccgcgcgcgccccggccgtcagcgcccagtgcagcgacttctacgacgccaccaacgcaggctggctgaaggccaacccggtgccgcagaccggtgccaccaccgcgctcggccagctggtcgagcgcagccgccagcagcagcgtgaactgctcgacgccgcgatgaagtcgccgcagggcaacgtgcagaagctgctgggcgacttctgggccagcggcctggacgaagccgccgtggaagcggacggctccaacccgatcgcgccgctgctgacccgcatcaacgccatcaagaaggccaaggatgtgccggcctcgatcgccgcgctgcaccaggtgggcatcccggtggccttcaacttcggcccggacgtcgacctgaaggcactggaccgccacatcggttacttcatgcagggcggcatgggcctgccggacccggcgttctatacccgcaccgacgccgataccgtggcgctgatggggcgctaccgcaactacgtcaagcagatcctggcgctgaccggcaccccggcggccaggctcgatgccgaatcgcaggcggtgatcgcgctggagaccgagctggcgcgcaatgcgcagtcgctggccggcatcaacaacccgttcaacaactacgcgccgatctccaccaaggagctcaacagccgttaccgcaacctgcagctggacgcgttcctgaaggcacagggcgtggacgacgacctggtctcgctggccgacccgggcctgttcaagcagctcgatggcatggtcaccaagctcaagccggaccagtggaaggcctacctgcgctggcgcgtgggcgactcgatggcaccgtacctgtccaaggcctaccgcgacgcggagtttgaattccgtggccgcgtgctgcgtggcgaaacgctgccgccgcagcgctgggaagacgtgctggaggcgatcaacgtggccgccggcccgatggtcggccgcgaatatgcggcccgttacctgtcggccgaagaccgtcgccaggcggcgtggatcgtcgacaagctgcgcgaagtgcagatcgaggcggtcaagaacaacagctggatgagcgccgaagccaagaccgaagcgcaggccaagctggctgcgctgaagatcgagatcggcaccccgttgcgcgacctcgactacagcgtgcagccgatgggccgcggttcgttcggcggcaacatgctgatcgcgtcgacctggcgccaccgcgaggaaatgaagcgcatcggcaagggcaacgccgaccgccgctgggacgtgctgccgcagcagccgtcgctggcctacgacctggcacagaaccgcctgatcgttaccgcggcgattctgcagggcccggtgttcaatgccaaggccgacgccgccgacaagttcggcagcttcggtggcctggtcggccatgagctgacccgtgcgatcgacgccaagggtgcactggtcgacgccaagggcgaactgcgcagctggtggaccccggccgacaagaccgcctggaccctgcttggcaaccgcgtggccgcgcagtacagcgcctacgatttcccgggcgtgaagggtgccaaggtcaacggcacgctcacccaggaagagaacctggccgacatcgccggtctggaactggcctgggcggcctataccgcgcaggagccgaaggccaagccggcacagcagcagggcttcttccgcgcctggtcggcgttgtgggcacagcagctgtcgccgaacgaggccgtgcgccgcctgaccgccgacatccgcgcgccgggcctgtggcgcagcaacggcacgctggccaacctgccggcattcggtgccaccttcagctgcaaggccggccagccgatgcagcgcagcgaagccgaccagatcaaggtctggcgctga

SEQ ID NO: 494971 - DNA, 2103 bp, Stenotrophomonas maltophilia
atgacgcgcactcccaagatcgtcctgctcagcctggccgtgtcggccgtgctggccggctgcggcaagaacgaaaccccggccaaggatgccgcgacccccgccccggccaccgccgaagccaccacctacaagctggacgacagcaagctgccggcctacaacgccttccagccgagcgacctggacaccaccaaggacgcgtgcaccgccttcggcgactacgtcaacagcaagtggctggccgccaatgaaatcccgggcgaccgcaccagctggggcgcgttcaccatcctcgacgagcgttcggtggccgtgcagcaccagctggccgaacaggttgcgcaggtcaagaacccgaaccacatcgagaagatcgtcggcgacctgtgggccaccggcatggacgaagccaagatcaacgcccagggcatcgagccgctgaaggccgacctggctgcgatcgacggcctgcaggacaaggcggccatcgccaactacctgcgcaccagcgccgccaagggtgacaacctcctgttcggcttcggcgctgaagccgacttcaagaactccggggtgaacatggcctatgccagccagggcggcctgggcctgccggataccacctactacaccgatgccaagaacgccgacaagctgaaggcctatcaggcgcatgtcgccaaggtgctggagctgtccggcgtggccgcggccgatgcagccaagcaggccgaggacgtggtcaagttcgaaacccgcctggccaaggcctccaagtcgcgcgtggagctgtcgcgcaacgtcgagctgtactacaacccggtcaccctggccgacgccgacaagctgaccccgaacttcagctggaccgagttcttcaagtcgcagggcgtggccgcgccggagaagttctcgctggccatgccggccttccatgaggaagtgagcaagtcgctggccgacaccgatccgtcggtgtggcgcgcctacctgcgcttccacaccgtggacagcgcctcgccgtacctggccgatgccttcgtgcaggagaactacgagttctacggcaagaccctcaacggccagaagcagcagaagccgcgctggaagcgtgtgctgggcaccatcgaaaacgatgccggtgaagccttcggccagctgtacgtgaaggtggccttctcgccggaagccaaggcgaagatggaagaactggtgaagaacctggccgcctcgctgaaggaccgcatccagggcctgagctggatgagcgaggaaaccaaggccaaggccatcgccaagtgggaaaccttcaccccgaagatcggttacccggacaagtggcgcgactggtcgggcctgcagacccagcgcgacagctacctgggcaacgtgcgcgcggccaacgagttcaactacaagttcaacctgtccaagatcggcaagccggtggacaagaccgagtggggcatgaccccgcagaccgtcaacgcctactacaacccgctgcagaacgagatcgtgttcccggccgccatcctgcagccgccgttcttcgatccgaaggccgacgacgcgctgaactacggcggcatcggtgcggtgatcggccatgagatgacccacggttacgacgaccagggcgcacgcttcgggccgaccggcaacatggaagactggtggaccccggccgacaagaagaacttcgaaggcctcaccggcaagctggtcaagcagttcgaccagtacaaggtcgacggccaggcagtgaacggccacctgaccctgggcgagaacatcgccgacctgggcggcctggccaccgcctacgacgccctgcagaaggcgaccgccggcaaggaagatgcgaaggtcgacggcttcacccgcgaccagcgcttcttcttcaactgggccaccgtgtggcgcaccaagtacaccccggaaaacgccaaggtccgcctggccaccgacccgcacgccccggcgcagttccgcgccatgggtgcgccgtcgaacctgccgaccttcgctgccgcgttccagtgcaaggccggttcgccgatggcccgcaccggcgagcagcaggtggtgatctggtaa

SEQ ID NO: 494972 - DNA, 2028 bp, Stenotrophomonas maltophilia
atgaagcgagccctgctgctggcggccctggccagcctttcaccgttgctgcacgccaagcctgtggcgcccaccatcgaacagatggccgccttcccggccatctccagcctgtcgttgtcaccagacggaaaacacatcgccggccttcgcgccgatggcgaggagcgcgtgatcgtggtttggcggaccgatgcactggacaagccacccacggtgatcggcgccaaccgcatgaagttccagagcgtgtcgttcatcaagaacggacagctggccgtcgtgctgtggcaaccctacgacctgcgcgccgaccgggtgaccaagaccttcgtcagcaagttcttcataaccgacatcgaaggcaagcagtggaaggagccgatcacgccgccgcgcgcctccagtcgcaatgaagagctcgagcaggcactggccaacgccacggtgctcgacaccctgcccaacgatcccgaccacatcctggtggtcaacggttcgggcagcagttccggtgacgtctacaaggtcgacctgcgcaacttcacctcccagcgcatccagaagaccgaagagcgcgtggcgggctatatcaccgacctggacagtgaactgcgggcacgcctgcggcaggacgtcgacggtaccggcgcctacgtcgccaccgagttccgctcgcctgccaacggtgcctgggaggagcatttccgctcctacgtgaagaaccgcgacgtcaaccaggtgatcggctttgccgatgatccgaacatcgcgttcgtactcagcaatgtcggccgcgacaaatcaatcgtctacgagtacgacatcacggcccgcaagcagaaggaagtgctgttcgagcacaaactgttcaacgccggctcgatgctgatcaaccgccaccggagcggtgcggtacccttcggcgagatcatgggaatcggctacgccggtccgcgcggcgacgacatccagtggacctctccgcgcatgaaggccctggaccaggggctgcgccaggcgcttggcatccgccaggagccgctggcgatggtcgataccgcgaacggccagcgctacaccgccaactacgatacaggcctgagctaccgcatcgtcgactacaccgccgatctttccaatgtgctggtggctacctccggcccttccaacccgcccgagtatcacctgctgcacgacggcaagctgaccctgctggccaagacctatccgcagatccagccagccgcgctgggcaccacccggctggtctactacaaggcacgcgacgggctggacattccggcattcctgaccacgcccagcaccgagctgtgcggtgccggcccgtggaaagccgtggtgcatccgcacggcggcccgtgggcacgcgatggcatggacttcgacggctcgatgtgggtaccgctgatggcatcacgctgcatggcggtcctgcgcccccagttccgcggctcggccgactggggccgcaagctgtggatggccggtgatgccgaatggggccagaagatgcaggacgacaaggacgatggcgcgcagtggatgatcgaccagaagatcgcccagcccggccacatcgccatgttcggcttctcctatggcggctactcggcgttcgcggcttcggtgcgtcccaatggcctgtacaagtgcgccatcgccggtgccggcgtttcggacatcaagaagatctggtcgcgcttctataccaacccgttcttccgccaggcccaggcgccgaccgtggccggcctcaacccggtcgacaaggccggtgaaatgaagattccattgatggtctaccacggtgaccgcgaccgcacggtgccgatcgagcagtcggagtggttcgtgaacaaggccaggggttcggggcagccggtcgagttccacgccatcgccgactacgcgcatggtcccgcctggacccgcgcgatcatgggtgaccagctcaggctgatcgacgactacctgggcaagggctgcggcggcggcggcctgtaa

SEQ ID NO: 494973 - DNA, 2979 bp, Stenotrophomonas maltophilia
atgatcaatcgcaagtcgctcagcaagcatccgctgagcttcgccctcgcctccgccgtgctgctcgctgcggctgccccggcgatcgcacaggacgcctcgggctcgacgcagaccaccgaagaagcatccaagtccaaggccaccaatctggatacggtgaccgtcaccggctcgcgcatcagccgcgacgtgttcaactcggtctcgccggtgcaggtcgtcacccgtgaagaaaccaccctggccggcttcaactcgaccacggcggccctgcagagcaccgcggtcaccgccggtgcggcgcagatcaacaacgcctatggcggctacgtcaccgacggtggcccgggcgccaacaccctgggcctgcgcggcctcggcccgacccgcaccctgatcctgctcaatggccgccgcgtgtcgccggccggtacccgcggctcggtgggctcgaccgacctgaacgtgctgccgaactcgatcgtcgaccgcgtcgaaatcctgaaggacggtgcgtcctcgatctacggctccgacgccgttgccggcgtaatcaacatcatcaccaagaagaaggtcgatggcgtcagcttcgaagcacagcacaacgccaccgatggcggcggcggtgaagagcgccgttactccatcatgttcggtgccaccggcgagcgctcgcacttctccggctcctatgagtactacacccgcaacgagctgaccctggccgaccgcagctgggccggtggctgcccgaccgacatgtaccgcgacatcgacgcgggcgactattggggcagcggcgacttcatcgacccgctgaccggcaagccgaagtgctggtcgctcgatgccggcggcaccacgctgaacaccatcggcaccaacacccgtaccggtgttgcggccccgggcggcgccggcacccgcttcaaccgctggcgcccgaatgcggccatcaccaccggcctggtgggctacgaaggcgtggacctgaacacccgcgacaccttcgatccggccatgcgcaaccagtcgctgatctcgccgaccaagacccacaccctgtacctgcagggtggcttcgacctcaacgcactgggcgatgccgagctgtactacgagttcctgggcaacaagcgcaagtcgacccagaccggctatcgccagctgaccctggactatgccgtgggcagcccgctgatcccggccaacctgcgtgacagcgttgccggtgctccgaccgaccagaccagcggcaagaacctgggcgtgcgtgcgttcatcggtttcggcaacgacaccaacaagcagaacgtcgacttcctgcgcttcaatgccggcctgcgtggccacctgagctcggagtggaactatgacttcaacgtcatgcactcgcgcagcgacgccgactacaccttcgagagcttcctgaccagccgcctgcgccagagcctggacgtggtctccaacggtgccggtggctatgtctgccgggacggttccaacggctgcatcgccgcgccggcgctgaacaccaacaccatcggtggcaagctgccgcaggactggaaggactgggtgttcgtgccggtcaccggcaacacgctgtacaaggaaacgacggtcaacttcaacgtcaacggcccgctgttcgacatgccgtacggttcggccggtggtgcattcggcgtcgagtaccgcaaggcacgcatcgacgacaccccgtcgccgtactcgatcaatgccgacctgtacaacctgaccaacgccactccgacccgcggttcggactcggtgttcgaagcctacggcgaactggaactgccgctgctgtccggcgtcaccgctgccgaggaactgacggtcaacctgtccggccgctacaccgactacaagtcctacggctcggacgagacctacaagatcggcgcgctgtggaccccggtgaagtggctgtcgttccgtgcgtcgtacggtacctcctaccgcgcaccggcgctgttcgaacagttcctgggcggcaccaccggcttcctgagcagcagtgccgacccctgcaacgagtatggtgatcgcaacccgagctcgccgcgttaccagaactgcgcatcgctgggcctggcaccggactacctggccacccagggcgtgaccgtggtcacccagggtggtgccgaggccggcctggaagccgaaacctccaaggccaagaccctgggcgtggtgatccagccggaattcggcagcggcttcggtgacctgtccttcgccgccgactacttcgacatcgaagtgaagaacggcgtcgacagcgcgggcggcgcgaacatcctgtcgcgctgctacgacagcggcagtgccgacttctcctccggttcgggtctgtgccgcctggtggcccgcaacccggtcaacaaccaactggtggtgaccaacggcttcatcaacctgtccaccgacaaggtccgtggcctggacttcaccacccgctatgtccgcgaaatcggcccgggcaccctgcgcaccacgctgcagttcacccactacctggaacaggccagcaaggtcttctccgacgatccgctggtggactacaacggcatgctgtcgcgtccggaaaacaccgcctcgctggacctgagctacaagtggaagaactggcaggtgcgttacggcctggactggatcgacaagatggacagctacgcgtactacgaggagcgcaacccgggtgacttcgatccggccacctcggcgtacaagctgtacaccccgaactacttcctgcaggccatctcggtgaagtatgaagcggacaagtggtcggtcaccggtggcgtgcgcaacttcgccgaccgcaagccgccgaccatctcccagggtatctacaacaccgtcggcaacgcgctgctgtacagcggcttcgactacttcggtcgcagctacttcctgaacatcacgcgttcgttctga

SEQ ID NO: 494974 - DNA, 2790 bp, Stenotrophomonas maltophilia
atgaaacacgtcagcaataccgcacgtcgcaacacgctcgccgtcgccctgatgtccgctctgatggccgccgccccggcaatggcccaggacaaggcgaccaacctggacaagatcaccgtcaccggttcgctgatcccgcagacccaggtcgaaacccagaccccggtgatgtccatcaccgccgaagacatccagacccgcggcttcagcagcgttgctgaagttctgcagcagtcgtcgctgaccaccggcggcctgcagggtggacagacctcgggtgcgttcacccagggcgccgaagccgccggcatgttcggcctgaacccgggctacaccaagtacctgatcaacggccgcccgatgctctcgtatccggcgctgtacaacggcagcgagtcgttcaacaacatcagcggcattccgatcgacatcgtcgagcgcatcgaggtcctgccgggcggccagtcgtcgctgtacggctcggacgcgatcgccggcgtggtcaacatcatcctgaaggaacgcatggacggcggcacgatgtcgatccgtggtggcacctacaccgaaggtggtggcagcaacatccgcttcagcgccgccaagggcttcaatgcattcgacgaccgcttccacgcgctggtcaacgtgcagatcgaaaacggcagcccgatctggggctaccagcgtgacatcaccaagcagaacaacccggtcggttacaccgcacagctgccgtcgaacgactttgccgtcatcggcaacgccgacaacaagctgtacatgatggacccgacccgctgcgccaacgtcgcaggcctgtacgacggcaccaccaccgtcggcaagcgtgcatcgggcgaatcgtgcggctcggtgtacagcgccggctacaagaccctgaagaacggcaagaacagcggccagttctactcgtcgatgaccttcgacgtgaacgacaacttccagctgttcgccgatgtgctgtacagcaaggagaagaccgagttcacctccggctccagcgccctgtggtggggcaccaagtcggtgatgggcggcttctacgaccagggcctgggcaaggtcgtgaacctgcagcgcgccttcgcaccggaagaaatcggcccgggccactacaacaacatcctgaactccgatgagagccgttcctaccaggtcaccctgggcggcaagggcatggtcggcgactgggactacagcgccagcttcacccgcggcgaataccgcctggaccagaaccgcttcgcgcgctggaaggacaagatcgaaggcttcttcggcgacactgtgctgggcccgcgcctgggtaccaccgctgatggcttcggcatctacaacccggactacgccgcgttctactcgccgatcaccccggaccagttcgccagcttcaccggctatggcacccaccgcagcaagacctggcagaacctgggtcgcgtgcaggtgaccaacgggtcgctgttctccctgccgggcggcgacgccggcctggccgtggtgctggaaggtggcagcgaaggttgggattactcgcccgaccaggccttcgtcgatggcaacgcctggggcgccaccgccgtggccggtgccggccaccgcagcaactacgcggtgaccagcgaactgcgcatgccggtgttcgagtcgctgaccatcagcgcctcgggccgctacgacgccttcaagatcgccgacaagaccgttgacaaggccacctacagcatcggcctggaataccgcccggttgagagcctgctgctgcgcggcaagtacggcaccgcattccgtgcgccgaccctgtccgatgccttccagggcatgagcggctcgttcgcctccggccagaacgactactaccgctgcagccagatgggctacgcgctgcgtgacgaagcctgctcgttctacaagaccacctcggtgtacagcgaaaagtccggcaacccggacctgaagccgatcaccgccgacgtgtggagcgcgggcgtggtgtgggccccggtgagcaacttctcgctgtcggtcgactactacaactggaagatcaagaacgaggtcaagaccctgagcaccgaccagctgctgctggccgagtaccagtgccgcaacggcctgccgaacaacacctcggccagctgccagaacgtgaccgactgggtgtcccgcgacgccggtggcaacctggcccgcgtgtacaccccgaagctcaacgtggccagccagaacctggaagcggtgaccgtcggcgccaagtaccagcaggacctgggccgcttcggttcgctgatgttctcgggcaactacaccaacatgctgaagcgtgaagtggtgccgctgccgggcgcacagaagctggatctgctgagcgatccgtacaacatgtggtactacgacaacttcgccaaggtgcgcggcgatgtgtcggtgggctgggccatctccaagttcaccaccaccctgtacgccaactacgtcggcagcaccccgaactacctggcctacaccggccgcagctatgactacgtccactcctccggcgccaaggccggcaagtggggctcgtacaccacctacaacatgagcctgaactaccaggcgcaggacgatctgaccctgtcgctgatggtcaacaacgtgttcaacaagctgccggaaggccagcgctacaactacccgggcaacgaatcgaccccgttcaacgacggcttctacagcgtctacggccgtcagatctcggcccaggtcaagtacgacttctga

SEQ ID NO: 494975 - DNA, 864 bp, Stenotrophomonas maltophilia
gtgcccgttgtgaacagttctccccgccgtccccatgtcagccaggtccagaagggacttacgccgcatgcccgcatccgcaacgtgatcgcggtcggttcgggcaagggcggcgtcggcaagtccaccacctcggtgaacctggccgtggcgctgcagcaggtcggcgcgcgcgtgggcgtgctcgatgcggacatctacgggccgagcgtgccggccatgctgggcctgtccggtcgcccggaaagcccggacaacaagagcatcgagccgttgcgtgcctttggcgtggacaccatgtcgatcggctacctgatcgaagaggacacgccgatgatctggcggggcccgatggccacctcggcgatgacccagctgttcaacgacaccctgtgggacgacctggatttcctgctgatcgacctgccgccgggcaccggtgacatccagctgaccctgacccagaagattccgctggccggtgcggtgatcgtcaccacgccgcaggacatcgccacgctggacgcaaagaaagcgctgaagatgttcgagaaggtcgaggtgccggtgctgggcatcgtcgagaacatggcggtgcacacctgcagcagttgcgggcacatcgagcacctgttcggcgagggcggcggcgagcgcatggccgcgcagtacggcgtgccgctgctgggctctctgcccctgcagatcggcatccgtgaacagggcgatgcaggcaccccgatcaccgtcgcccagccggattcggcgccggcccaggcctaccgccatgccgcacagcgcctgatcgaggaagtgggcaggcgcccgcgggcttcgatcccgatcctgtcgtcgctgctgtaa

SEQ ID NO: 494976 - DNA, 573 bp, Stenotrophomonas maltophilia
atgagcatcaagagtgaccgttggatccgccgcatgtccgagcagcacggcatgatcgagccgttcgaggccgggcaggtgaagcaggccaacggccagcgcatcgtcagctatggcacgtccagctatggctacgacgtgcgctgctcgcgcgagttcaaggtgttcaccaacatcaactcgacgatcgtcgatcccaagcacttcgactcgggcagcttcgtcgacatcaccgccgacgaatgcatcatcccgccgaacagcttcgcgctggcgcgtaccgtcgagtacttccgcatcccgcgcgataccctggtggtgtgcctgggcaagagcacctacgcgcgctgcggcatcatcgtcaacgtgacgccgctggagccggaatgggaaggccacgtcaccctggaattcagcaacaccacgccgctgccggcgcgcatctacgccaacgaaggcgtggcacagatgctgttcttccaggcggccgccgatgacgtctgcgagacgtcctaccgcgaccgtggcggcaagtaccagggccagaccggcgtgaccctgccgcggacctga

SEQ ID NO: 494977 - DNA, 168 bp, Stenotrophomonas maltophilia
atgcgattcaacctcgttgccgccgtcctgctgatcctgatcggcctgttcatgctcgccagcaatctcggctggacgcacctgaacctgtccaagctgctgttgacctggtggccggtggccctggttggtgtcggcatcgcgatgctgttcggtcgcggcaaataa

SEQ ID NO: 494978 - DNA, 423 bp, Stenotrophomonas maltophilia
atgagcgaattcgaactcgattcacgcctggccaccgatagcgtgctggtggcggaaggaccgttgtcgcaagtgcggctgatgaacgacgaacgattcccctggctggtgctggtaccgcgcctggccggggtgaccgagtggatcgagctggacggcgagcagcaggacaagctgcgcaccgagctcaaccgcgcctgcaaggccctgaagggcgcagacggggtggagaagatcaacatcggggcgctgggcaacatcgtgcgccagctgcacttccatgtcatcggccgccatgacggtgatccggcctggccgggcccggtctggggcagtggcccggcgcaccgctacgagccggcggcgctggaccagcatgtcgcctactggaaggaacggctaggatatccggcccagtcctga

SEQ ID NO: 494979 - DNA, 672 bp, Stenotrophomonas maltophilia
atggccgagtggatcaccctggatacgcatcacggcccggtacgggcctggcaggccctgccggacggcaccgcgcgcggcggcctggtggtggtgcaggaaatcttcggcgccaacccgcacatccgcagcgtggccgagcgcttcgcagccgaaggctatgcggtgctggcgccctcgttcttcgacctggtcgacggccccgacgccgacccggatgcgctgccctacgacgccgagggcgtgaagcagggcctggaacgggtcggcgcgctgggcatggaacgggcgctggaggtcgtgcgcgcggcggccacccggctggcgccctacggcaaggtcggcaccgtcggctactgctggggcggcacggtggcgatgctgtccgcactgcgcctggggctgccgtcggtcagctactacggtgcgcgcaacgtgcagttcctcgacgaggcgcccaaggccccggtgatcttccacttcggcgcccaggaccgcagcatcccgccggaagcggtccaggcccaccgcgagaagctgccgcagatggccacctacgtctatccggccgatcacgccttcaaccgggaggtcggacatgcgtatgatccagacagcgccgccctggcgctgcaacgcaccctggacttcttctcggagcatcttggatga

SEQ ID NO: 494980 - DNA, 1362 bp, Stenotrophomonas maltophilia
atgtcccagctgaaccccaaagtcggcttcgtcagccttggctgcccgaaggccctcgtcgattccgagcgcatcctcacccagctccgctcggaaggctacgacatcgtcccgtcctacgattcggccgacgtggtggtggtcaacacctgtggcttcatcgattcggcggtgaccgagtcgctggatgccattggcgaggcgatgaaccagaacggcaaggtcatcgtcaccggctgcctgggcaagcgccctgagcagatccgcgaggcgtaccccaacgtgctggcggtgtccggcccgcaggattaccagagcgtgatggaagcggtgcatgaagcactgccgcccaagcacgatccgttcgtggatctggtgcccgactacggcatcaagctgaccccgcgccattacgcctacctgaagatttccgaaggctgcaaccacaagtgcagcttctgcatcattccgtcgatgcgcggcaagctggtctcgcgcccggtggatgaggtgctgcgcgaagccgagcgcctggtgcgtggtggcgtgcgtgagctgctggtggtttcgcaggacacctcggcctacggcgtggacgtgaagtacgccgaaaagatgtggcgcgacaaggcctaccagacccgcctgaaggcgctgtgcgaaggcctgtccgagctggatgcgtgggtgcgcatgcactacgtctacccgtatccgcacgtggacgaagtggtgccgctgatggccgagaaccgcattctgccgtacctggacatcccgttccagcatgcgagtccgcgcatcctgcgcctgatgaagcgccccggtgcggtcgagaagaccctggagcgcgtgcagaactggcgccgtatcgcgccggacatcaccgtgcgttcgaccttcatcgtcggcttcccgggcgagaccgagtccgagttcgaagaactgctgtcgttcctcgacgaagcgcagctggatcgcgtgggtgcgttcgcctattcgccggtcgagggggccaccgccaacgatctgcccgatgctgtgccggaggaagtgaagcaggagcgtctggcccgcttcatggagaagcaggcgcagatctccgccgcacgactggaggccaagatcggcaccgtgcagcagtgcctggtcgacgccatcgaaggcgatatcgccgtggcccgttccagggccgatgcgccggagatcgacggactggtgcacatccagaacgccgaccaggtgccgctgcgcgtgggcgaattcgtcgacgtggaaatcaccgagagcgacgagcacgacctgtacggtgacgcgctgcccgccgctacccgcccggcattcgacctcaagatgctgtga

SEQ ID NO: 494981 - DNA, 825 bp, Stenotrophomonas maltophilia
gtgaccgcagcgacgaccgccgccagtgacgggggcggcgtccggcgcttcgtaccgccgccacgtgcggcgatcgatccgcaggtgttcgcgcagccgctgtttgccgggctgcaggatttccgtgatctgctggatggcccccactggccgtccatcgcggcgcttgacgcacgcctgtccctgccgggttggcagctggtcgaacaggatgccgcgttgctggccgatggcctgcactacgaggcccgcatcgcgcaggggcgcatcgccacccgtgccgacaactggcacgacctgttcaacgcgctggtgtgggcctcccacccaaagctcaagcgggcactcaacgtgcagcagtgccggcatatcgaagccatgccacccggccagcgcaaccgcgcgcaggccgccttgacccagttcgacgaaaccggcgtgatcgtgcgtgtgggtgatgtcacgttgctgcgcgcgtgggatgggcatgactggcctgcgttgttcgagccaacgcgctggcagagcggtgacatcgccattgccacggtattcgggcacgcgttgatggaacaggcactgctgccggggcgattgctggtgggcaagtgcgtggtggtgcagggtgatgccgatgctgcctgcgtcgacgcggtgactgcggccattgccgaaggcagggcagtgaccgatccgctgcagctgcggcccctgccgttggccggtgttcctggctggcatggcgtgcaggattccgccttctatcgcaatgccgagtatttccgcccgttgcgtgcagggcgcacatacccgccgccgttgtag

SEQ ID NO: 494982 - DNA, 507 bp, Stenotrophomonas maltophilia
atgtcgcgttggcgtccccccgcagaaaaaagcacggccctgatcaccgcctccgggcatgcccggctgaaggccgaactggatgagctgtggcgtgtgcgccgcccggaggtggtgaaggcactggccgcggccgccgcggaaggtgaccgctccgagaacgccgaatacacctatcgcaagaagcagctgggcgagatcgatcgtcgcgtgcgctacctgaccaagcggctggaatcactgcgcgtggtcgacaccacgccgaccgacccgctggcggtgttcttcggcgcatgggtggaactggagaatgtggacagtggcgagaccagccgctatcgcattgtcgggccggatgagaccgatgccgggctgggctggatcagcatcgattcgccgttggcgcgggcgctgctgaagaagcgactggatgatgaattctcggtggagctgcccggcgggcaatttacctttacggtgatcggggtggagtacgcgccgttgtag

SEQ ID NO: 494983 - DNA, 1506 bp, Stenotrophomonas maltophilia
atggatccgattctgctcggcaaaggcattaccgacgatattgccgtcaccctgctgccgaaactcggcaaccgccacggcctggtggccggcgccaccggtaccggcaagaccgtgaccctgatgacgctggccgagggcttctcgcgactgggcgtgccggtgttcctggccgatgtgaagggcgatgtctccggcctggccgtgcccggcagcggtgccgagaacctgctccagcgtgccgccgagatcggcgtggccgactatgcgccggccgccagccccaccctcttctgggacctgtacggcaagctgggccacccggtgcgcaccaccgtcagcgaaatgggcccgaccctgctggcgcgcatcctcgagttgaacgacacccagtccggcgtgctcgacatcgtgttcaagctggccgacgaccgcggcctgctgctgctggacatggacgacctgcgcgccctgctcggcctcgtcgccgaggagcgcaaggacatctccaccgagtacggcctggtcagcgcgcagtcgatcgccgcgatccagcgttcggtgctgcgcctggcgcaggacggtggcgagcacttcttcggcgaacctgcgctggagctggccgacatcatgcgggtcaaccacgacggccgcggcatgatcggcatcctcgccgccgaccagctggtactcaagcccaagctgtactccaccttcctgctgtggctgctgtcggagctgttcgagcagctgccggaagtgggcgacctggacaagccgaagctggtcttcatcttcgacgaggcacacctgctgttcgacgatgcgccgccatcgctggtgcagcgcatcgagcaggtggtgcgcctgatccgctccaagggtgtgggcgtgtatttctgctcgcagttccccgacgacgtgccaggcaacatcctcggccagctcggcaaccgcgtgcagcacgcactgcgcgcgttcaccccgcgcgaccagaaggcggtgaagaccgcggccgaaaccttcgtgccgaacccgaagctggacgtggccaaggtactgagccagctcggcactggtgaggccctggtctccacgctgcaggacaagggcatcccgatgccggtgcagcagaccatgatcgcgccgccacgctgccggatggggccgatcaccgaagccgagcgcgcccaggtgcgtgccggcagcccggtcggcagtcgctacgacaccgcgatcaaccgcgaatcggccgccgaactgctggcccagcgtgcacagaagactgtcgaacaggcgcaggcgccggccgcgcgcagccgcgaacaggacgaagcgcaggaaggcggtttcggccaggcgatcaaggatgcgatcttcggcaccaagcgccgccagggcatgatcgagacgatggccaagcagaccacgcgcaccgtcggcaccaagctgggcaaccagatcgtgcgcggcatcctgggtggcatcttcggcggaaagcgttga

SEQ ID NO: 494984 - DNA, 1611 bp, Stenotrophomonas maltophilia
atgcccgttcctgtcctgatttcccgcggttggccgctgctggccctggccggcctggtttccctggcgcccgacgcccatgcgcagcgggtttcggcccgggacaaggtgaaggtggatgcgctgcagcagcgcatgaccgccgccgaaaagcgctacagcgacgccctgctgctggtcgccaatgccgaccccaagggcagcaacgaggccgacgccgcgctggaggacatggaagatgtcctcaacgactgcgtgaagcagaagggctgccagatgggcaccctgctggccagctacaagcgcctgctcaagcacgacgccgatgccgctgccagcgatgacgtggccgacgaggggggtgaccgcctggaagccgacccggatcacatcggcccgctgaccgcggacgtgcccgaggccgcgcgcgctgccgcgctgctgaacgacaagcggcacgccttcgacagcatggtcgagtacaacccggcggtgcaggccggcatccgtcgctggctgaccgacatgcgtccggcgctgctgaccagctacgagaactaccagaacctgcgcgcggtgatgtggccggagtgggagaagcgtggcctgcccgaggcgctgctgttcggcatcatggccaaggaatccaacggccgcgtgcacgcctcctcgcgtgccggcgccgccggcctgatgcagttcatgccggccactggccgtcgcttcggcctcggcccggatggcaccggcttcgacacgcgcttcgatgcgcgcagcgccgccgaggccagcgccagctacctcaacgaacgcctgcgcgaactgaacaacaacgtggaaatgtcggtggccgcctacaacggtggcgaaggccgtgccgcacgcgtgttcaagcagagcgccggccagagcttctggaccgacagtgtctacaaccagttcccgggcgagaccaaggactatgtgccgatggtgattgccgcggcctggatcttcctgcacccgcagcagtatggcgtggagttcccgaagatcagcgcgcagccggccacgctgcgcctggccaagtccaccaccatctatgaactgaccatctgcctgggcagccacggcacccgtgatggctacatgcgcgcgctgcgcaacctcaacccgcgctatgaagccgatggctggattccggccggcaccctgatcaacgccaccacccgcatcgccgggctgtaccagcgcaactgcgtcagtggcccgcgtgccgacctggcccgcaccctgatcaccgccgatctgaacgcggcgatcaagcgcccgaccgtggccagctacaccggcagcgtcgccgtgggcggcgtggtgccggtggccgacgctgcggcctccaccagtgtgccgaccacgccggtggcggcggtggcgacgcctcgcccggcgccggccccgcgcccgaagccggtgcgcagccacaaggtgggcaagggcgagaccctgggcgccatcgcggcgaagttccagtgcgacgtgccgaccctggcccgcgccaacggcctgaaggccccggcctacagcctgcgccacggccagacgctgaagctgcagggctgcgacaagtaa

SEQ ID NO: 494985 - DNA, 348 bp, Stenotrophomonas maltophilia
atggatctcgaagacacccgcaacctgttcgccaacctccgcgaaaacaccgactgggacatcaacggcccgttgctgtgggggtacttcttcgtgcactccactgctgagccgttgcaggcactggcagagcacctgcaggcgcagggctacaccttcgtggaactgttcgaacaagatccggaagagggtgacgcgccgttccacgtgctgcatgtggagcgcgtggagatccacgacgaagcctcgctggaccgtcgcaaccaggaattcgcagcgctggccgcggagaagggcgtggaagactacgacggcatggacgtcggcccggccccggccctgcagtaa

SEQ ID NO: 494986 - DNA, 843 bp, Stenotrophomonas maltophilia
atgagcctcaccaccgccctgacgtatgccctgccccaccgcctgctgtcctcgatggcgcgttcgctggcgtactcggacgatccgcgcgtgtcgcgctggctgatcgacacggtcacccgcaagttcaacgtcaacctggacgaagcggccaacccggacccgcgcagctattcgaccttcaaccagttcttcacccgtgcgctgaagccgggcgcacgcgtggccgatgccgatccgcgcagcctggtgatgccggccgacggccgcatcagccagctcggcaggatcgaggccggccgcattttccaggccaagggccagtcattcaccgctgccgaactgctgggcagtgacgaggacgccaagccatacaacgatggcctctacgccacggtgtacctgtcgccgcgcgattaccaccgcgtgcacatgccctggaccggcaccctgcgtgagaccgtgcacgtgccggggcgcctgttcagcgttggtccggcggcagtgaacggcgtaccgcgcctgttcgcccgcaacgagcgcctggtctgccacttcgacaccagcttcggcccgatggtcagcgtgatggtcggtgcactgctggtgtccggcgtggaaaccgtgtggagcggcgaggagattccgcactacggcgaccgcatcacccgcaaggactaccgcggccagggcatcaagctggagcgtttcgccgagatggcacgcttcaactatggctcgaccgtgatcgtgctgctgccgccgggcgtggccgaattcgccccgcagctgggcgccgaaagcccggtacagctgggccaggccctggcgaagctgcgctga

SEQ ID NO: 494987 - DNA, 651 bp, Stenotrophomonas maltophilia
atgttcaatcgcaacgccggcatcatcctgctgatcgccctggcggcgggtctcggcctgctggccgcccagcaggtgttcgcgccgaagccgccggccaatgccccggccaccgaagcgatcacgctgtacccacagccgcgcgaactgcccgacttcaacctggcccagtccgacggcacccgcctgatcccgggcgaactgaagggccactggaccctggtgttcctgggcttcaccttctgcccggacgtctgcccgaccacgctggccgcgctggccggcgcgcagaaccagtgggaagccctgcccgacagcctgcgcccacgcgtgctgttcatctcggtcgaccccgaccgcgacagcgccacccgcctgggcgagtacgtgcacggcttccacaaggacaccctggccgccaccgctgacgttccctcgctggagcgcttcgccacctcattgggcttcgtgttccagaaggtgccgggcaagcatttcgacgagaaccccgaggattacaccgtcgagcattcggccagcctggccgtgctcgacccgcagggccgcctcgccggcctggtacgccccccgttcaacgcgccggcgatcgcccgcgacctgcagaagctgaccgagaaaaccgccccatga

SEQ ID NO: 494988 - DNA, 930 bp, Stenotrophomonas maltophilia
atgaccgctgaaacggccgccgaactccacacgatcatcgatctgatccgctacggcaccagccgtttcaacgaagccgggctgaccttcgggcacagctacgacaacgcgctggacgaggccacccagctggtgctgcacagcctgcacctgccgcacgacctcggcccggcctacggccaggcgcgcctgctgcaggccgaaaagctgcgcgtgctggagctgttccagcgccgcatcgatgaacgcatcccggccgcctacctgaccggtgaggcctggtttgcaggattgagcttcaagagcgacaagcgcgccctggtaccgcgctcgccgatcgccgaactgatcgaatgcggcttcgagccgtggctggccggccgcgacgtgtaccgtgcactggatctgtgcaccggttcgggctgcatcgccatcgccatgggccactactacccgaactggcaggtggacggcgtcgacctgagcgacgatgcactgtcgctggccgaagaaaacaaggagcgcctgcaggcgcacaacgtcaccctgatcaagtcggacctgttcaacggcctgtccggccgccactacgacctgatcgtcaccaatccgccatacgtcaccaacgacgagaccgatgccctgccgcaggaatactcctacgagccggagatgggcctgcgtgccggcgacgacggcctggacctggtgctgaagatcctgcgcgatgccccgctgcacctgagcgaggacggcctgctgatctgtgaagtgggcgagtccgagcagcatctggtcaagctgctgccggaagtcgatttcgcctggatcgaattcaaggtcggccagatgggtatcttcgcggttgaatgccgcgagctgatcgcccacagcgcacgcatcaccgaactggcggcgcagcgcccgtga

SEQ ID NO: 494989 - DNA, 1104 bp, Stenotrophomonas maltophilia
gtgagctccaattcgttcggcaagctgttcaccgtcaccacgttcggcgagtcgcacgggccggccatcggctgcgtgatcgatggctgcccgccggggctggcgctggacgcggccgaattcgcccacgacctgcagcgccgcgccaccggcaagagccggcatacttcggcgcggcgcgaggccgacgaggtcgagatcctgtccggcgtgtacgagggcctgaccaccggcaccccgatcgcgctgctgatccgcaacaccgaccagcgcagcaaggattacgccaacatcggccagcagttccggccgggccatgccgactacagctactggcacaagtacggcatccgcgacccgcgcggtggcggccgttcctcggcacgcgagaccaccatgcgcgtggccgctggcgtggtcgccaagaagtggctggccgagcgcttcggcgtcaccgtgcgtggctacctgtcgcagctgggcgacatcaccccggccggtttcgactggtcggcggtggaagacaacccgttcttctggccgcacgctgcacaggtgcccgaactggaggcgtacatggacgcgctgcgcaagtccggagattcggtcggcgcgcgcgtggacgtggtcgccgacaatgtgccgccgggctggggtgagccgatctacggcaaactcgacggtgaactggctgccgcgctgatgagcatcaacgcggtgaagggcgtggagatcggcgacggtttcgccagcgccgcgcagaagggcaccgaacaccgcgacctgctgaccccgcagggcttcgccagcaatcacgcgggtggcatcctcggtggcatttccaccggccagccggtggtcgcctcgatcgcgttgaagccgacctccagcctgcgcctgccgggcccgtcgctggatacgtccggcaacgtggtcgaggtggtcaccaccggccgccacgacccctgcgtcggcatccgcgccaccccgatcgccgaggcgatggtagcgatggtgctgatggaccaggcgctgcgccaccgcgcgcagtgcggcgatgtcggcacgatcaccccgcgcattcccgggcagatcgatggctga

SEQ ID NO: 494990 - DNA, 1038 bp, Stenotrophomonas maltophilia
atggctgacacgcggccgaccgtgtgggtgagccagccgctgatcgacgcggccatcgcgccgctgcgcgatcgcgtgcagctgcgctgcaccgacaccgtcaccgcctgggcgccggaccagatcgccggacaactggccagcgccgacggcgcgatcatcacgctcaacgagcgcatcggcgcggcccaggtggccggcgccgcgcagctgcaggtgatcgccaatgtcggggtgggctacaacaacctggacgtcgacgcgctcagcgcggccggcatcctggccagcaacacaccggacgtactgaccgaaaccaccgccgatctcggtttcgccctgctgatggccaccgcgcgccgcatcaccgagtccgagcgctggctgcgcgaagggcagtggcagcagtggtcgttccagaccatgctcggtgccgatatccacggcagcacgctgggcatccttggcatgggccgcatcggccagggcatcgcccgtcgcggcgcgcacggtttcggcatgaaggtgctgtaccacaaccggtcgcagctgccggcggcgaccgaggtggaagtgggcgcgacctatgtggacctggatacgctgctggcacagtccgaccacctgctgctggtgctgccgtacacgccggcctcgcatcatctgatcgatgccgccgcactggcgaagatgaagccgtcggcgacgctggtgaatatcgcccgcggtggcctggtcgatgagatcgcgctggccgatgcgctggccaacggtcgcctggctgcggcgggtctggatgtgtacgaaggcgagccaacggtacgcccggaactgctggcgctgcgcaacgtcgtgctcactccgcatatcggcagcgcctcgctggccacgcgcacggcgatggtacagctggcggtggataatctgcttgccgggctcggcctggacggcggcccgtcgcggatgccgagcgcgatcaacgctgacgcggcgatggccgcgcgcgtgacgctgggcaaaaaaaccgggaaacgatag

SEQ ID NO: 494991 - DNA, 1029 bp, Stenotrophomonas maltophilia
atgagcaatgcacagcgcagtttccacgtcgccgtcgtcggtgccaccggcgccgtcggcgagaccatgttgtcgatcctggccgagcgtgatttcccggtcggtaccctgagcgtcctggcctccgagcgttcggccggtggcgagatcgagttcaacggccagaaggtcacggtccaggacctggccaccttcgatccggccggcgtcgagatcgcgctgttctcggccggtggcagtgtgtccaaggaatacgcaccgaagttcgccgccgcaggtgcggtggtgatcgacaactcctcggccttccgttacgacgatgacgtgccgctggtggtgtccgaagtcaacccggaacaggtcgccaaccgtccgcgcggcatcatcgccaatccgaactgctcgaccatgcagatgctggtggcgctggcgccgctgcaccgcaagtacggcatcgagcgcatcaacgtctccacctaccagtcggtgtccggcggtggtcgttcggccaccgaggagctgggcaagcagaccggccagctgctgagcttccaggagatcgatccgcagcgcttcccggtgcagatcgccttcaacctgatcccgcacatcgacgacttccaggacaacggcttcaccaaggaagaaatgaagctgatctgggagacccgcaagatcctcggcgacgacagcatcctggtgaacccgactgcagtgcgcgtgccggtgttctacggccattccgagtcggtggcgatcgaaacccgcgacaaggtcaccgtggccgaagcacgtgcgctgctggagcagtcgccgggcatcgaagtggtggaccgtcacgaggccggtggctacccgaccccggtcacccacgcctcgggcaccgacgcggtgtacgtcggccgcatccgtgaggacctgtcgcacccgcgcggcctgaacctgtggatcgtatcggacaacgtgcgcaagggcgccgccctgaatgccgtgcagctggccgagctggtcgccgccgagcagcgctga

SEQ ID NO: 494992 - DNA, 2013 bp, Stenotrophomonas maltophilia
atgaataaacgggccaggggcgcaaagcgccccctcctctatctttccaccgcgctgctggccctggccagcagttcggcgcttgccctgggcttgggcgacatccgtgtcctgtccaagccgggccagcccctgctggccgaaatcccggtggtctcggccgatccgtccgagctggagaacctgcgtgtcgcgttggcctcaccggtcaccttcgagcgcgtcggcctgcagcggccgaccgggctggtgggcgaactgcagttcgaactgacccgcaatgcgcagggcagggcagtggtgcgtgtgacctcgcagacgccggtcgagaccccgtcgctgagcttcctgatcgaggcggactggggccagggccgcctggtgcgcgagtactcggcgctggtcgatgcaccgtccagcgcactggccgtggccgagccggaaatcattgcacccgcaggtacgctctccaacaccatcgcccgtgaggccgccccggcgcccgccgccgcggagagcgtgagcgcgcctgcgccgtccaccgccaccacgccggcacccgcaccggctcgcccgcgtgcagtggctgcacccgctgccgcaccggcagccgatggcagcgttaccgtccagcgtgggcagaccttgtcgcagatcgccagcgtggtggcccgcggcaaccaggtcagccgcgaccgcgcaatgattgcgctgctgcgggccaacccggaggccttcatccgtggcaacgtcaacctgctcaagcagggcgccgtgctgcgcatgcccggcagcgatgcactggcggcggtcgatgccgccgaggccgccgcgctggtgcgcgagcatgccgcacagtggcgtcaggcgcgcaccgtgccgcaaccggcgggtactgtcgccccggtcgccacggcgggaaccacgaacgcctcttccccggctgcggccactggggcacgacttgaaatcgctccggcgctggcctccgacgccgcgcacgcgggcacaaccaccggcactgcagccggcagcgagggtgacatgctgggcaacgaacaactgcgccaggcacgcgaggacatcgcgacccgcgatgccgagatcggcgagctgaagcagcgggtggccgacctggaaaaactcaaggaacagcagcagtcgctgatcgcgatgaaggacaacgacctggccgcggcgcagcagcgcctggcgcaggcaccggatgcccgcgatgcggcaacgccgtggtactggctgggtcttccggtgctgttgctggcggccggcgcggcctggctgctgcgtcgtcgcaagccgtcgccactgccgccgctgcgcgaggaaggcgacgccgccggcctggccgctgcggtaccggccggcgcggcgctggatacgctggccgagcagtcttcgtggtcgacggcggtgtccgacagtggccgccaggaaccggcgatgcctgcctgggcgaccgaagccgaggtgcaggatgacgtggctgccgaagcggtcgccgacgtcgccgcccagactgactggcaggcgcagacgctgcgcgatgacgaagtggtggagctgcccggggccgtgaccgacctgccgcgctgggacgagccggtggccatgcaggacacccccgtgcaggatgagccgcccgcgcaggcggtccctgacgagatcgcagtgccggactacgcgctgcacgccgaacagcagccgcagttccgcggcgtgttcgacctgccggccgagcatcatgacggcggggattcgagcgcggcgccgcacgacgcgctggccgcggccgcgcatgaagacggtactgccgcgccggccagcgatgccggctgggcgccgcgcgccgggcaggaacgcctggaactggccatcgcctacctcgacctgggcgatgcgcagaccgcacggacgttgctgctggaagtggccgagggcggcgacctgcactgccaggcccaggctcgcgaactgctggcccgcctgccgtga

SEQ ID NO: 494993 - DNA, 363 bp, Stenotrophomonas maltophilia
atgagccgcgagcgccgtatcgactacgttgaattcgcctccagtgacccggccgacagccgcgccttcttcgaaaaggtgttcgggtggtcgttcgtcgactatggcagcgactacaccgccttcgacgatggccgcctgcagggcggcttcttccgcggccagccgcaacgggccagtgacagcggcgcgccgctgctggtgctgtatgccgaccagctggcgcccatcgaggcggcggtgcgcgacgctggcggtgagatcgtacggccggtgttttctttccccggtggcagccgcttccagttcgtcgagcccggtggcaacgaactggcggtctggtccgaacgcgatccggcctga

SEQ ID NO: 494994 - DNA, 771 bp, Stenotrophomonas maltophilia
atgcgttacgcgcttggcgtcgagtacgacggcagcgatttcaggggctggcagaacctgggcgagggtggtcccagcgtgcaggccagccttgagcaggccctgtcgtcggtggccgatgcgccgctgcaggtggtctgtgccggtcgcaccgatgccggcgtgcacggccagtgccaggtcgtgcatttcgacaccgacgtggtgcgcgatccgcgcgcctggatgctgggcaccaccacccgcctgccgcgctcgatcgcggtgcgctggtgcgtgcccgtggccgatgatttccacgcccgcttctcggcgcgggcacgccgttaccgttaccgcctgctcaaccgcgaagtgcggccggcgctgcagcggcagaccctcagctgggagcgccgtgcgctggacgcgggcctgatgcatgccgccggccaggccctgctcggcgagaacgacttcagcgcgttccgctcggtgcagtgccaggcgctgcatgcacggcgtgaactgcagtcgctgcaggtcagccgccagggcgaggtgatcgaggtcgccgtgcagggcaatgcattccttcatcacatggtccgcaatatcgtcggatcgctgatcctggtgggcagtggcgagaagccggtggaatggatcgccgaactgctggccgggcgcgatcgcaccgtagccggtcccaccgcaccgccgcagggcctggtgttccttgggcccctgtaccccgacaactggcatctgcccgccgaggtcacgctatga

SEQ ID NO: 494995 - DNA, 657 bp, Stenotrophomonas maltophilia
atgagccgctcctactaccgcacgcgcatcaagttctgtggcatgacccgggccggcgacgtccgcctggccggtgagctgggcgtggacgcggtgggtttcatcttcgcccgtgaaagcagccgccgggtcgctccggccgaggcacgcgcgatgcgccaggcgatcgcgcccatggtcgacgtggtggcgctgttccgcaacaacagcaaggaagaagtgcgcgaggtgctgcgcacggtacgaccgaccctgctgcagttccacggcgaggaagacgagagcttctgccgcagcttcaacatgccgtacctgaaggcgatcgccatgggcggccgtgaagagatcaacgcccgcaccctgcagctgcgctatcccagcgccgccggcttcctgttcgacagccacgcgccgggcggcggtggcggcaccggcgtggcctttgactggggccggatcccgaccggcctgcatcgcccgttcctgctggccggcggcctgaacccggaaaacgtctacgacgcggtgctgggtaccctgccgtggggcgtggatgtctccagtggcatcgaactggagccgggcatcaaggacggctacaagatgcgcaccttcgtcgaggaagtgcgccgcgccgattgcacggttctcgagtga

SEQ ID NO: 494996 - DNA, 675 bp, Stenotrophomonas maltophilia
atgcaggagtttctcaccgtcgtactcggttacccgacgctgccgtacagcattctgctgttggtgtcggtgatgtattgggcggttgcggcgttcggcctggtcgatgacggttttggcaatctcggcgccgatggcgcgctcgaggcggggaccgacctcagtggcctgtcggccatgctggcgcgctggggcctgggtggcgtcccgatcatggtggtggtcaccctgctgagcctgttcggctggctcatcacctatttcatccatctgttcgtactgctgccgctgccggacctgctgcgctggggcctgggtacgctcgtggcggtgctggcaccgctgccagcggtaccgctcatcgcgctgatcctgcgcccggtccggcgcttcctgctgcgcctgcggccggtgccgcaggcatcgctgctcggccgggccggcgtggtcgcatcgccgaaagtggacgcacgcagcggtcatgccacggtcgatgatggcggcgccgggctggtgctgcagatccgcagcgacatcgaactgcagcgtggcgagcgcatcgtgctggtcgagcacatggccgaacaacactattaccgggtggtccgcgccgatgcgatcgccctcgatttccaggacaacctgcttccgggcaacaaggagactcatcaatga

SEQ ID NO: 494997 - DNA, 2019 bp, Stenotrophomonas maltophilia
atgacgttggcatccctcttaccgttcctggccgtcgccggcggcctgctcgtcctgctgctgggcgtggccgggctgttcaaggccttctaccgcaaggtcgaccagggcgtggccctgatcgtcaacgacatgagctccacgcccaaggtgcacttcaccggtgcgctgatcatcccggtgctgtaccgcgccgagctgatgcggatcagcctgatcaccctgcagatcgaccgccgtggcaaggaaggcctgatctgccgcgacaacatgcgtgccgacatcgctgtggccttctacctgcgggtgaacgagacccaggccgacgtgctgcgcgtggccaaggccatcggtgccgaccgtgcgtcggacaagcatgccgtcgatgagctgttcaacgccaagttctccgaagcgttgaagacggtcggcaagaagttcgacttcaccgaactgttcgagaagcgccaggagttccgcgacgagatcatcgcggtgatcggcaacgacctcaacggctatgtgctggaagacgtggcgatcgattacctggagcagaccccgaaggcgctgctggaccagttcaacatccttgacgcgcagggcatccgcaagatcaccgagctgaccgccgcgcagaacgtggtgaccaacgagctggagcagaacgagaagctcgccatcaccaagaagaacgtggaagcgcgtgaagcgctgctggcgctggaacgccagcaggccgaagccgaagcacgccagaagcgcgagatcgagaccatccgcgcgcgcgaggaggccgagaccgccaaggtgcaggaagagcagcgccagctgtccgagaacgcccgcatcgaagcacagcagctgatcgagatccgcgaccagaaccgcctgcgcgaagtggaagtggccgagcagaaccgccagcgcgccgtggccatcgaggccgagcgcgtggagcgcgcacgccagcttgagcaggtcaccaccgaccgcgaagtgcagctgcagggcgtggagcgcgacaaggtggtcgagcagggcaagatggacgtggccaacatcacccgcgaacgcatctccatcgacaagaccgtggcgcaggaggaagagcgcatcaaggaagtgcgcgaggtctccgaggccgaccgccagaagcaggtgctgatcctggaagccgaggccaaggcacaggaatcgctggtgcgcgaggtaaaggaagcgcaggcacgcgagaccgcttccaagcaccgcgcagtggaactgaccacgctggcccaggccgaacacgaagcagccggcaagcaggccgaagccaagcgcctgctggccgacgcgctgcgcgccgagcaggccgcaccgggcctggccgaagcgcaggtgcgtgaagcttcggcactggccatcgagaaggtcggcatcgccgaggcccgcgtgatcgaagccaaggccgaagccagcctgaagcagggcagcaacgaagcccgcgtgctggccgagaccctgcaggcgcaggcgcagggtgaggagaagatgggcctggcccgtgccaccgccaccgaatcgctgggcaacgccgaagccggcgtggtgcagaagaagctgctggccgaagccgaaggcctggtgcgcaagttcgaagcgatcgcttcgctgagcgaccaggcacgtggccacgaagagttccgcatgatgctggacaacagcctgaagcaggcgctggcctcgatcgaagccggcaaggaagtctcgcgcgagaacgccaacgtcatcgccagcgcgctgcgcaacgccgatatcgatctggtcggtggcgacggcggcatgttcgagaacctggtcaaggcggtgtcgctgggcaagtcgatcgaaggctttgccggcaagagcccgatcgtgcaggagctgatgcagcgctacctgggcgtggccgtggccgaaccggcgccgcgccagatcgccgaggatgccgaagcggtgccgaccgtgtcggccaccgtggtcgacagcgcccgttga

SEQ ID NO: 494998 - DNA, 5388 bp, Stenotrophomonas maltophilia
atgtctgatacccatccgtccaccgaatccactgcaccggaggccggcggcactaccgtcgaccaggccgttgcccagggcggtgcctatgaagtcctgcgccgccgcctggccgagcagggccagcgcctgcagggcctggccgaaacgctcaaccgccagcgcctggccgagttcggcgacagccgcctggaggtagtcgggcgcttccgcatccgcagcgaaaacaactgcgtcggccgtgacatcgtgcaggtcgggccggaccgcctgctgttcggctacaacgtgttcatcgggctgaagacccagacccgcatcgaggacgtgttcggcctgtaccggctggtgcagggcagcgacggctacgacgtggcggcgctggagctgaagggcagcttcctcgaccagcccggcttcgtgcacgacttcaacgaactgtacgcctactacaagcacgcgcgcctgctgcagctgatcgtggtgggggacaagctgctggcgtcgttccagatcggtgagcgcagcagcgacgtgcgcgtgttccgctgggcgctgtcgcgcgatggcgaactgacctatctggatgcgcgcggtgagcgcgatatcgcactgccgccgccgttcgacttcgaatggacccgggcgacccgcgacctggcggtcaatggccgccattcgcacctgaacatcctcgataccctgttcgtggagaccaccggcggcgacctcacgatcaaggtcgagaacaacaccgagaccgggcagggcatctacagcgaaccggtggaggacagcacgcagtcgctggacgacgcccagttcgaatttgcccgggtcggctcgctggtgctgctgaaggtgctgccgtaccgcgagacggagtggcgcgggctgatctacaacacgctgaccggcggcatcgtgcgcaacgatgcgatcgtgcaggcctgcgtgcagctgcccgaagaccacggcgtgatcttcccgggtggctattacctgcagggcggcgagcacaaggcgttcgacgcctcgatggccggcatgcagttcaagcgcagcatccgttcgcccaacggcgaggacgtgctgtacatcttctacgagcgcgaaggcgggcgctcggcgctgttcgtctacaacaccatccagcgcgtgctgcagaacccggtgttcggccatggctacgccttgatgcaggacgggcgcatggtgctgttccatgccgaaggcagcgaaccgacccgcatccatccgatgcaggtctggcagaccccgttcagcagtgacgagtttgctgcaagccggccacccggcaacaccttcatgggacgcatcggcaacgccgaactggtgcggggcatctccaacctgttcaacctggcgcgcgagatcgatggtcaggacgtgtcggtgcagcgctaccagcgcctggtggccgacacccggcgcctgttcgatgcccaccactggttgggtgacgcggcctgcgatggcgccgaggcgctgctgcggcagatcagcgccaccggcgaatcggtgctggacgagtacgagaaggtgcagtcgatccgtcagcagtcggcgcaggcgatggtcgaggcagaggccgcgcacaaggcgctgctgggccggctgcagccgcagaactggaacgaggtgcaggccttcgtcgaggccctcaatgcgatcaccgcattgcgtggacggctgctgaccatccgcgagctgcgttacatcgacaccgcgcgcatcgagacgatgacggccgagctggtggaggcgcaggatcgtgtcggcgccgccacgggtgacttcctcgccggcgatgccgcgctggtgccgctgaccacgcgcctgcaggcgctggatgaggctgcgcagcaggcgcagagtgcccgccagctggatgagcagctggaggggctgcgcgggatggcggccgatctggatatgctgtctgaactgatggccggcctgaaggtggacgatgccaccgcccgcacccgcgtggtcgagtccatttcggtgctgtacggccgcctcaaccaggcccgcgcgcgtgccgatcagcgccgcaggtcgctcggctcagccgaggccgtggcgcagttcgccgcgcagttcgcgctgttctcgcagtcgatcaccagcgcgctggcgctggccacggacccggagcgtgccgacgagcagctgtcgcgcctgctggtgcagctggaggagctggagagccagttcggcgaacacgagcagttcctcggcgacatcctgagcaagcgcgaagagctggttgaagccttcgaaacgcacaagcaggcgctgctggatgaccgccagcgcaaggcacgttcggtgctggatgcggccagccgcatcctcgatggcctggccaagcgcaccgagcgcttcgccaccgccgatgagctcaatgcgttctttgccggcgatccgctgatcctcaagctgcgtgagctggccgaacgcctgcgcgcgttgcatgacaacgtcaaggccgacgacatcgaagcgcgcctgaagggcgtgcgtgaccaggcggtgcgccagctgcgtgaccgcagtgatctgtacgaagcgggcggcaacgtggtgcggctggggccgcgccatcgcttcagcgtcaacacccaggcactggacctgaccctgctgccgcgtggtgacacgctggcgatccatctgaccggcaccgacttcctggagaccctgcacgatccggagctggatgcgctgaagccgttctggccggtcaccctggactccgaatcacctgtgctgtatcgcggcgagtatctggccggcagcctgttgatggccgcgcaggaggggagcgacgggcttgacctggccacgctgcagcacgacgtcgccacgcccgaagcactggaccagcgcgtgcgtgcgtttgccgcaccgcgctaccgcgaaggctacgagcgcggcatccatgaccatgatgccgcgctgatcctgcgtgcgttgctgcccttgcagcaggcggccggcagcctgcggcatgcaccgcgggtgcgtgcgctggcggtgctgttctgggctgccgagcagcggcgcgaagcggtggcgcaatggccggcccgccagatgggtgctgaagcgctggcacgcctgctggggtccgatgaagggcgcctggcgttgcgtgcggaaatggccgaggcactgctggcgtatgcgcaatcccacgcgttgccgttcgatgccgatgccgcagaggccgcggccgcttatctgggcgaggaactaacggccggcgaaccggtgttcagcagcagccgccatgccgtagcgctgctggaggcactggctcggcagctggaacaggccgggcaacgcgaggcggtcgaacgcgccctgcagcgcagccaggatccgctggccacgcgctgggcgctggccggtcagtggctgcgggcgctggcgcggatgccggcgcatgccccgcatgccggctacgtcgacgaggctgcagcactgctgctggtgcagcgccagttgcgtacccgtgccagcgacgccgcgctgcaggcggaggtcagtggcctgctgggtgaacacgcacgcatcagcaacggcacgctggtggtatcgctggatgacttcctggtgcgcctgaagcagcacctgcgtcatttcgtgccagcgttccatgcctaccaggcgctgcgccagggcatcatcggccgcgagcgcgagaccctgcggctttccgagttcaaggcgcggccgctgtcctcgttcgtacgcaacaagctgatcaatgatgtctacctgggcgtgatcggtgacaacctggccaagcagatgggcacggtcggcgagaacaagcgcagcgacctgatgggcctgctgatgatgatttcgccgcccggctacggcaagaccacgctgatggaatacgtggcgcaccgcctgggcctggtcttcatgaagatcaacggcccggcgctgggtcacgaggtgcggtcgctggacccggcccaggcaccggacgcgacctcgcggcaggagctggagaagctcaacctggcgctggaaatgggcaacaacaccatgctgtatgtggacgacatccagcacacccatccggagttcctgcagaagttcatctcgctgtgcgatggcacccgccgtatcgaaggtgtgtggcgcggtcgcacccgcacctacgacatgcgcggcaagaaattctgcgtggtgatggccggcaacccgtataccgagtccggcgaggtgttcaagattccggacatgctggccaaccgtgccgacatctacaacctgggtgatgtgctcggtggcatggaggcggcctttaccctcagctacatcgagaacagcctgacttccaacccggtgctggcgccgctggctacgcgcgacatggctgacctgtacacgctggtcgaccgggcgatgggcaaggaggtctcgaccaacggcctcagccacgcctacagcagcgcggagatcaacgaaatcaccgccaccctgcagcgcatgctgcgcgtgcgcgacgtggtctaccgcgtcaaccagcagtacatcgccagtgccgcgcaggacgatcgctaccgcaccgagccgccgttccggctgcagggtagctaccgcaacatgaacaagctggccgagaagatctcgccggtgatgaacgaggacgagctgcagcagttgatctccgaccactacctgggcgaggcacagctgctgaccaccggcgccgaagaaaacctgttgaagctggccgagctgcgcggcgtgctggacgacacgcaggcgcaacgctggacgcagatcaagcgcgacttcctgcgcaacaaggccatgggggccgacgacagcgatgtcggcgggcgcgtggtcgcgcagctggccgacatcgccaccgccctgcagcttccgccgccggcgccggaagcgattgccgttgccgacccggcaccgtggccggcgttgctggaggccctgcatcgtctttctgaaacacgtccggccgccgcgccggtgccggtcgcggcagccgccagtgtgccgacgacggtcctggccgacgacctgcaggctggcctggcaccgttggtggaactgttggcggaatcgcaggcgcagcaggcacaggtgtcgcagaccctggccgcgttcgccggctgggcgcggcagcaggtcgagcgtggggtgccgaacagtgcggtggcgcagcgtgcgcgtgtgcgccgtgccacgacgccggaggagcgcgcgctggatgaggcgctgatgcgtcacttctacggcgagtcgttgccgccggacgacggtgaggagattccagcgacgacaccgaagccgccgccgctgccgtga

SEQ ID NO: 494999 - DNA, 702 bp, Stenotrophomonas maltophilia
atgcaggcgccactgccgccaccgagcttgccggacacggccgatgtcgccgcgctggccgactatggtgcgccgttgctgcaggcgctggcgcggcgcgaaacaccgttgccgccgggcgcgggcgcagggctggtggccgcactggcacgcatcgcgctggccctgcaggccgataacccggcgcagatccggcagcaggcgggctggtggggccgcctgctggggcgcgatgtcgatcgcgaggcggaaggacgtgcgctgcagtcgcagctgggcgtgctggccctgcaggcgcgcgagcaggcccagcagctgcagcagcagctgcagctgcgggccatggccatcgccggacattcagcggcggccgcagcgctggacgcctgggtcgagctggcagcggtgcggctggcgtcgctggataccgccggccaggccgcgctgtcgcaacggctcgatcacctgcgccggctggccacgctgcgccgtctcgaggccggccagtggcagctcctgcaggaccaggacaacgtgctgctgcaacgcttcgcgcgcatccatgacgtcctgttgccagcctggcggcaggccgccgcggccggccaggccgcggccggcgccacattggcggcgaaggccgccacgctgcacgcacagatcgatgacgaggtcgcggcggctcaggctagactgccttga

SEQ ID NO: 495000 - DNA, 1110 bp, Stenotrophomonas maltophilia
atgacccaggacagccagacccccggtgccctcgtgcccggcacgactaccgccgttccgctcgatgaaggcgcattgcaggcgcttggcctggtccgcgaggatctgccgcgcatcgccgagatccgtctggagctggatgacctgcgcccgggcaacctgcaggtcttcggtcgcgaagcggccacgcgcaccgcagcgttttccagccagttgctggaccaggtgcgcaatcgtgacctcgatgccagcggcgagaaactgggcgaagtggtgcgcatcgcacgcagcctgaagctggacggcttcgcgcagcggtcgaaggtgccggtgatcggtggcctgatcgaccgcctgcgcgtatccaagggcgagctggtgcagaagttcagcgacaccaatgcgcagatcgagcagctgctgggtgatgtcggtgtgcagcaggcgttgatgggcaagcgcgtgggcgagttcgaccgcatgcatgacatcgtccgcgaagaacgccatgcgctgggcctgtatgctgcggccggcaagcagcgcctggccgaactgcaggccgagcagcaggccaggcagggcagtgaggatccgcagcagcgcatccgccagagcgaagtcgacaacgcgatccgcctgctcgaaaagcgcgtgtccgacctgcagctgatgcagcatgcggccgaccagtcgctgccgatgatccgcctgatccaggccaacgcgctgcagctgatcgagaagttcaacacggttcgcgagatcatcatcccgtcgtggaagcgccagttcgccatccagctttcgctgggtgagcagaaggccgcggtcgagctgtccaccgccatcgacgatgccaccaacgagctgatgcgccgcaacgccgacctgctgcgccaggcctcggtggataccgcgcgcaggaaccagcgcggcgtgatcgacgtggcgacgctgcgccacgtgcacgaccagttgatcgccacggtcgaggaagtgcgcagcatccatcgcgaaggaatgcagcagcggcagcaggccgaagtcgagctgtcgcgcctgcgcgaagacctgcagcagcgactggccaccccgactgccagctga

SEQ ID NO: 495001 - DNA, 888 bp, Stenotrophomonas maltophilia
atgagccgttcgctgttgccaccgctcaatgcgctgcgcgcgttcgaggccaccgcccgcctgggcggggttggccgcgccgcgcaggacctgcacgtgacccacggcgcggtcagccgccagctgaagctgctggaagaccacctcggcctggcgctgttccagcgggccggtcgtggcctgcgcctgaccgctgcgggcacgcgcctgcaggcagcgtgcagcgaggccttcagcggcatcgaagactgcgtgcgcgaactgcgccggccgaccgcggccccggcgctggtgctgggctgcagcggcagcgtgctggcgcgctggatgattccgcgcctgcccgcactgcaggccgccctgcccggcgtacgcctgcagtggtcggcgctggatggcagcttcaccgaggcgcaggccgcactggacgcggtgctgctgctggcgcaggggccgtggccccggggctggcaggtgcgtgagctggcgccggaacgggtcggcgtggtggtggccccctcgcatccggccgcgcagcgactgcggcatgtgccgccctcggcgctgctgcaggagacgctgctgcacaccagctcacggccgcaggcatggccggcgtgggcgcaagcgcacgatctggacacctcgaagctgcagctgggtactgccttcgaacacctgtactacctgctggaggcagcggtggccgggctgggcccggcgatcgcacccgagccactggtggccgaggacctggccgccgggcgactggtcgcgccgtggggatttgccgccaccggtggcttctgggtgctggcgcgaccggatggaccggcagatgggcgcgtggatgcgctggccgactggctgggccagcaactgcgctga

SEQ ID NO: 495002 - DNA, 1218 bp, Stenotrophomonas maltophilia
atgtctgcctcccccattgccgactaccacgccttcccggatgcccagggccatttcggccgctacggtggcagcttcgttgccgaaaccctggtcggcccgctgcaggaactcgcccaggcctatgaccaggcccgccaggatccggcattccaggccgcctacgaccgcgacctggcccactacgtgggccggccgagcccgatctaccacgcccagcggctgagcgaccatgtcggcggcgcgcagatcctgctcaagcgcgaagacctgaaccacaccggcgcgcacaagatcaacaacaccatcggccaggcgctgctggcggcgcggatgggcaagaagcgcatcatcgccgagaccggtgccggccagcacggcgtggccagcgccacggttgccgcgcggttgggcctggaatgcgtggtgtacatgggcgccaccgacatcgagcggcagaagatcaacgtctaccgcatgaagctgctcggcgcgacggtggtgccggtcacctccggttcggccaccttgaaggacgcgctcaacgaagcgatgcgcgactgggtgaccaatgtgcaggacaccttctacatcatcggtacggtcgccggtccggatccctatccgcgcatggtgcgcgacttcaacgccatcgtcggccgcgaggcacgcgagcagatgctggccgagtacggccgcctgcccgatgcgatcactgcctgcgtcggcggcggcagcaatgccatcggcctgttccatgccttcctcaacgaccgccaggtcgagatcgtcggcgccgaggccgcaggtgatggcatcagcaccggtcgccatgctgcatcgatcgccgccggtcgcccgggcgtgctgcatggcaaccgcacctatgtactgtgcgacgacgacggccagatcatcgagacccattcggtgtcggccggcctggactatccgggcgtcggccccgaacacgcattcctagccgataccggccgcgcgcgctacctcggcatcaccgatgacgaagcactgcaggccttccacctgctggcgcataccgagggcatcctgccggcgctggagtccagccatgcgctggcgcaggcgatcaagctggcgcgtgagcgtccgcgtgaccagatcgtgctgtgcaatctgtccggccgtggcgacaaggatgtgcataccatcgccgcgcgcgaagggctggtgctgtga

SEQ ID NO: 495003 - DNA, 681 bp, Stenotrophomonas maltophilia
gtgagcgcgctgctgcgcaacagtggcgtgctgctgctggcgctggggttggccgcgtgccagccgccggagccgccgctgctggcaccggccgccaaggccaccacgcagccggcacagcaggcggccgcgaatgatgacctcgacccgatggcacgtgcgccgatcgtcgatccgccgtccacggaagatatggacagcgatggcgcgcctgcggtggtctcggtggcgctggaccatgccggcgaggtgctgatcggccagcacatgggcgatctgaaggcactcgggccgtggaccgcgcaaggggcggtcgaagccatcggcggcagttgcgagtactacgacggcaaggggctgccgcccggcgtgtcgatgatgaccgatgaagatcgcgtcgtccgtttcgatctcggcctggatccggacagcggggcgccgacccagcagcccggtccgttcggcctgcgtgtcggcatgacccgcgcccaggccatggcccagttcccgaagccgccggtatccagcccgcatgcctacgatggtgaccagggcgagtacctcacctggcaggacccgggttcggacctgggtatccgcgtggaactgtttgaagggcgggtcacccagatgtactggggaaccagcgatgcgattgaactgattgaaggatgtgcctga

SEQ ID NO: 495004 - DNA, 810 bp, Stenotrophomonas maltophilia
atgtccgtatcccgactcgatgcctgtttccagcgtctgcgcgaacagcagcgcaaggcgctgatccccttcgtcacggccggtgatccctcgctggaggccaccgtgccggtcatgcacgcactggtcgacgccggcgccgacgtgattgaactgggcgtgccgttctccgacccgatggccgatggcccgaccatccagcgcagctccgagcgcgcgctggcgcgcggcgccggcagccgctacgtcctgcaggccgtggcgcagttccgcgagcgcgatgcgcagaccccggtggtgctgatgggctacctgaacccggtggagatccacggttacgcggccttcgccaaggccgccgtcgacgccggcgtggacggcgtgctgctggtcgacctgccgccggaagaagcgggcgacgcccagcaggcgttcgacgcagccggccttgcgctggtactgctggcgtcgccgaccaccagcgaggcgcgagccgacaagctgctggcgctggcccgtggctatctctactacgtcagctttgccggtgtcaccggcgcgtccgagcgcctggacagcgatgccgccagtgcccgcctgcaggcgttgcgcgcgcgtgcgtcggtgccggtggtggcgggcttcggcatcaaggatgccgccagtgccgcggccatggcccgccaggccgacggcgtggtggtgggcagcgcgctggtggcggcgctggccgaagcgggctcggcggaagaggccgcgcagcacgcccggaccttcctcgccccgctgcggcaggcgctggacgcgtaa

SEQ ID NO: 495005 - DNA, 876 bp, Stenotrophomonas maltophilia
atgagttggctcagcaagttgatgccgtccggcatccgcaccgacaacacccccagcaagaagcgcagtgtccccgagggcctgtgggaaaagtgcagcaactgcggcagcgcgttgtaccgtccggaactggaagagaacctggaagtctgcccgaagtgcggccatcacatggcgatccgtgcgcgtgcgcgcctggctgccctgttcgatgccgacagcaccaccgagatcggtgcgcgcctggggccgaccgacctgctcaagttcaaggaccagaagaagtacagcgagcgcatcaagatcgcgcagaagaacaccggcgagtacgacgcgctgatcgccatgcgcggcctgctcaagggccgtgcgctggtggcatcgtcgttcgacttcgccttcatgggcggctcgatgggctcggtggtcggcgagcgtttcgcactggccgcggaaaccgcggtcgagatcggtgcgccctacgtgtgcttctcgcagagcggtggcgcccgcatgcaggaaggcctgttctcgctgatgcagatggccaagacctcggccgcgctgggcaagctgcgtgaagccggcctgccgtacatctcggtgctgacccacccgaccaccggcggcgtgtcggcctccttcgcgatgctgggtgacatcaacatcgccgagccgcaggcgctgatcggcttcgccggcccgcgcgtgatcgagcagaccgtgcgcgagaagctgccggaaggcttccagcgctcggaattcctgctggagcacggcgccatcgaccagatctgcgaccgtcgcgaaatgcgcgaccgcctgtccgatctgctggcaatgctgggccgtcagccggcgccggaggtggcttga

SEQ ID NO: 495006 - DNA, 1362 bp, Stenotrophomonas maltophilia
atgggaggccgcaagtacttcggtactgatggcatccgtggacgggtcggccagggcgtgatctcggccgacttcgtgctgcgcctgggcaacgccctgggccgtgtcctggtcgaccagcgcggccaggatgggcgccggccgatcgtggtgatcggcaaggacacccgcatctccggttacatgttcgaagcggcactggaagccggcctggtcgccgccggtgcggacgtgcagctgctggggccgatgccgaccccggcggtggcgttcctgacccgtacgcttggcgtggacgctggcatcgtcatcagcgcctcgcacaacccgcactacgacaacggcatcaagttcttctccgcccagggcgagaagctcgacgatgcgaccgagctggccctggaagcggcgctggacatcccgttcaccaccgccgaatcggaaaagctgggcaaggcgtcgcgtgcgcgcgaagcggtcggccgctacatcgagttctgcaaggccagcgtgccgcgcgcgttcgacctgcgtggcgtgcgcctggtgctggactgcgcgcacggcgccacctaccagatcgcgccgctgctgttccgtgaactgggcgccgaggtgatcggcattggtgccgagcccaacggcgtcaacatcaacgccggcgtgggttccacccacatcgacaacctggcggccaaggtccgcgaaacccgcgccgatctcggcatcgccttcgatggggatggcgaccgcgtgctgatggccgacgaccagggcaacccggtcgacggcgatgacctgctgtatatcctggcccgtgcatggaaagccgaaggccgcctgcgcggcccggtggtcggcacgctgatgagcaactacggcgtcgagaaggcatttgccgacctgcagattccgttcgtgcgcagcaatgtcggcgatcgctacgtgcaccaggcgctgatggaaggcggcggcgtgctcggcggtgaagcctccggccacctgctgtgcctggatcgggccaccaccggcgacggcatcgtcagcgcgctgcaggtgctggtggcattgcgcaacagcgggcagaccctgcgccaggcgctggaaggactggtgcgggtgccgcagaagacggtcaacgtgcggctgggcaatgtctcggccaaggccacggtgcaggccggcagcgtgcaggccgcgctggctgtcgcgcagcagtcggtggccggtcgtggccgtgcgttcctgcgcccgtccggtaccgagccggtggtgcgggtcacggtcgaggccgatgatgcgacgctgatgcaggacacgctggatcgactgtccgcggcggtacgtgaagccgccgcctga

SEQ ID NO: 495007 - DNA, 858 bp, Stenotrophomonas maltophilia
atggctgatgcccgaaccgtaccggtgctgatgcaccaccacgtcagtccgtcgccgggcatgatcaccgtgtcaccggagaatttcgaaagccagatcgcgtggctggccggcaacggctggacgtcgctgacactggaccagtacgccggcttcctggccggcaagccggtgccgcgcaagtcgatcgtgatcaccttcgacgatggctacctggacaactgggtgtatgcgcacccgatcctgcagaagtacggcatgcacgcggtggtgttcgtggtcaccggctggatgggcgaaggcccggagcggccccacgccgggcttgccggggcaacgttgcctgccacgccggaccatcgcggctgcgaagcggcgatctacgagcagaaccgcagcgacgacgtgatgatgcgctggagcgaagcgcgcgcggccatcgccgccggcaccttcgaagtgcattgccacacccatacccacacccgctggctgcgccgcgacgacctggaccgcgcacagcgccgtgccggcctgagccacgacctggcagtctcgcgcgacgtcctgcaggacaagcttggcgaggtgtccgatacgctgtgctggccctacggcgatttcgaccaggaccacatcgaggtggcgcgcgagcacggcttccgctacctgcataccacccacccgttcggacgcaatgtggtgggcggcgacccggagcgcatctatcgtttcgcgatccgcaaccgcccggccagctggctgcgaaaacgcatcgcacagagctacaacccgctgatcgcaccgctgttcaatggcttcaaggcacgccagaagaagatggtgccggggccgtag

SEQ ID NO: 495008 - DNA, 1146 bp, Stenotrophomonas maltophilia
atgaaccgtccgctgcgcatcctgcacactgaagccgccaagggaatgggcgggcaggagatctacatcttccgccacatgcaggtgatgcgcgcgcgtggccacgaggtggcgctgctgtgccagcccgaagcgcgactggcccagctggcacgcgatgatggtttcaccgtgcataccctgcgcatgggtggcctgctgcgcctgctgcgcggcatctggtcggtctcgcgcctggtgcgccgcgaacgctatgacgtggtcaacaccaccagccgccgtgacgcactgatcgccgccgccggtgcacgcctgggcggcacgccgctggtggtgcgctcgcgccacctgatgagcccggtcaactcgctgctgacctataccggcctgccgcaccgggtgctgaccgtcagcagcttcgtcaagcagttgctggccgcgcgcggcattccggccgaacacatcggtatcgtgccgcccatcgcggtcccgccgcgctggagcgaaatccgcaaggacgacccctggcaatgcctgcaggaggtacgcgcggacgtgcgcgccgaactcggcttcggcgaacaggacatcgtggtcggttgcgtggcggtgctgcgcgaacccaagggtcatgccgacctgctgcaggcgatggtgccgctgtgcaagacgcacccgaacctgcacctggtggtggtcggcgatggccagccggtcatggaccagctgcaggcgctgcgcgacgagcacgggctgcagcagcaggtccatctgctcggctatcgcgacggcgcatgccggctgatggctggcttcgacatcttcgcgctggcatcgcacaaggaagcggccggtaccgtcttcctggaggccgcctatgtcggggtgccgatcgtggccacgcgggtgggtggcgtgccggagatggtgatggatggcagcaatgcgatcctcacccggctgggcgacaatgcagccctgacaggcgccctgcgcctgctggtggacgatccggaacggcggcggcagatgggccgcgccgggtgggactggatgcgcagcgcgcaccggttcactcccgacggccacggtgagaccaccgaacactattaccaccagtggctgaaggagctgggacatggctga

SEQ ID NO: 495009 - DNA, 1593 bp, Stenotrophomonas maltophilia
gtgctgcagggcctgtggctgtgcctgctgctggtcgacgccaaggtcttcaccctgtaccggttccacctcaatgccatggtcgtgaacatggtgttcggcggcgccctgcaggaccaggttgccctgtcctggaagacctggctgcaggtcggcctgctggttgccgcggtcttcaccgccgagggcctgctggcctgggcgtgctggaaactgctgccggccgcgccgcgccgtcgacgggtgctgcaggcctgggcggtggtcgcgctgctgatggccggcggccaggtcgccacggcctactacgacgcccgcggcgaccgtgatgtgatcgcgcagtggaactacctgccgtgggcgcagccgatcacggccaagagcttcatgcggcgcctgggcgtggtcagccaacagcacgccggcctgcccgacccgcgccatgcgcagctgctgtacccgctgcatccgctgcgctgccagagcccacatcgtcccaacgtactgatggtggtactggagtcgctgcgccacgatgtgctgacaccgcagctgatgcccaacacgtcgacgctggcgcaggatgcgcgcgtcttcgaccaccatttcagcaccggcaatgccacccgctacggcctgttcggactgctctacggcctgcccggcggctattggccgggcatgcttgacgagcagcgtggctcgcagctgttccaggtgctgggccagcagggctacgacctgcacctgtacggcagtgcgccgttgtacagcccggagttcgatcgcacggtgttcgccgatgtacgcgaccagctgcaccaggggccttcagcgctgaagtccgacggccgcgaccgcgcgatcatcactgcgctgcagcaggacatccgcgccagccaggccgcgcagcgcccgtggttcggcttcgtgttcctcgactccacccatgcgccctaccacatgcccgagggctatccggcggtggccacaccgatggccgccgatatcgatttcctcaagttcggcccggagcatgacccgacgccggaactcaaccgctaccgcaccgccgtgcactatgccgacagcctgatcggctcactgctggacgacctgcgcgcacagggcctggccgaggacaccatcgtgctggtcaccggtgaccatgccgaagagttcaacgacctcaagctgaactactggggccacaacggcaacttctccgactatcagctgcaggtcccgttcgtgctgcattggccgggcaaggccgctggccacgacgcacgcaccagctcgcacgaagactgggtgccgacactgatgcgccacgcactgggttgcgagaacgcaccggccgattacagcaccggccaggacctgctggccgagccgcagggcacgcgtgcgctggtggtcgaaagctggtcgcagcgcgcggtgcgccatggcgatgccatctatgtgttcgacaagttcggcaacgccaccgccctggacctgcgctaccggccgctgccacagcaggcgcccgatgcggccgccgtacgcactgcatgggaagcgctgacccgcttccgcaaccgctga

SEQ ID NO: 495010 - DNA, 603 bp, Stenotrophomonas maltophilia
atgatccgcatcctgctggccgaggatcaggcgatggtgcgcggtgcactgtcggcgttgctgggcctggagccggatatcgaggtgctgggcagcgccgccgatggcgaaaccgcgtggcggatgctgcagcagctgcaaccggacatcctggtcaccgacatcgagatgcccggcctgtccgggctcgagcttgcccagcgcatcgcgcgccacgagctgccgatcaaggtggtgatcgtgaccaccttcgcccgcgccggcttcctgcgccgcgcgctggaagccggcgtgctgggctacctgctgaaggatgcaccggccgagaacctggccgatgccctgcgcaaggtgaaacagggcatccgcgcgatcgacccgcagctggcactggatgcgtggtcgcaggccgatccgctgaccgaccgcgagcgccgcgtactgcggctggcgggcgagggccgcaccgccagcgagatcgccgagcagctggggttgtcgcacggtacggtgcgcaattacctgtccgagtgcatcggcaagctgggcgtggccaaccggatcgaggcgtaccggctggcgcggcagaaggggtggttgtag

SEQ ID NO: 495011 - DNA, 1224 bp, Stenotrophomonas maltophilia
atgatcggcggcgatcgtccccgcctggaaccgcccgtgccgtcgacatggcttgcctcgctgctgcgccccgcgccggactcggcggtggccgatacgctgcgccggggaaaatcgccctggagcgaggcagtccacctgctgtggtcggtgtggattttcctgacgcccttgcttggccacggcttcaccctgcgctggctgctgctgacgctggccagctatccggtgttcctgctgctgtacgccaaggtgatggtggcgccgcgccatcacgctccgcgctatgcgctgggcctgatcgcgatgtcgctggtgctgctgccctggtatccgtccgggctgacctacttcgtgttcggctgcgtgctgctgcgggtgagcggacgcggtggctggtggcagtatctgctgcagctcactggcctgaaccttctgttctgcagcctcgcgctgctgttccagtacccgtggcagagcctggtctggatcccggccgtgtcctacatcgtggggctggtcgtgaacgtggaagcgctcaaccagcagaaggatgcggcactgcagctgtcgcaggacgaggtgcggcggctggcggccactgccgagcgcgaacgcatcggccgcgacctgcatgatctgctcggccacaccctgtcgctgatcacattgaagctggagctggcgcgcaagctgcacgaccgcggcgacgcgcgcgcgcggctggagatcggcgaggccgaggccatcgcccgcgaagcgctggcacaggtgcgcagcgcggttaccggcatccgcgccagcgacctggccggtgagctggcatcggcgcggctgctgctggaatgccagcaggtccaccttcaatacgcaccaccaccggcgatgccggtggatgtcgaacgcgggctggcgctggtgctgcgcgaggccgcaaccaatatcgtgcgccatgcacaggcgacacaggcacgggtggagttcatgctggagggacgcatgctggcgatgcagatccgcgacgatggccgtggcggcgtgcaggccgagggcaacgggctgagcggcatgcgcgaacgcgtggccgccctggggggcagcctgcaggtacagtccgcaaagggcgagggcacgcgactgaccgtgcgcgtgccactggctgccgcgaccacaccgttgccgccgggagcgccgccgtcgctggcacaggacggtgccgcatga

SEQ ID NO: 495012 - DNA, 1248 bp, Stenotrophomonas maltophilia
atgaacgcttctgccgagctgttgaaggaactccgtatcgaccgcaaatcgccgccgcccgcctccggcggcagtggcggtggccgccgctggctgtggatcgcgatcatcgtggtcgtgttgttgctggccgctgtcggcttcgccctgttcgggcgtacgccggcagtggacgtggaaaccgcccccgccgtggccatccagcagggcagcgccagcagttcggtgctcgatgccagtggctacgtggtcgcccggcgcatggccacggtatcggccaagatcaccggcaaggtgcgcgaggtgatgatcgaggaaggcatgcgcgtggaacagggccagatcatggccaccctggacccgatcgatgccgacgcgcagcgcagcctgtatgcctcgcagctgcaggccgcacgcagccaggtggccgggctggaagcgcagcagaggcaggcggccgctgaagccagccgcctgcaggcactggtcggccagcagctggtgtcgcgctcgcagtacgaccaggcggtggcccagcgtgacagcctgcgtgcacagctggacaccgcacagcgcaacgtcagggtggccaacgaccagctggccatcgccgatctgggcgtggacaacaacatcgtgcgcgcgccgttctccggcgtggtcactgccaaggccgcgcagcccggcgaaatcgtctcgccgctgtcagcgggcggtgggttcacccgtaccggcatcggcaccatcgtcgacatggactcgctggagatcgaagtcgaggtcggcgaggccttcatcggccgcgtgcagccgaagatgccggtggaagccacgctcaacgcctatccggagtggaagattccgggcgaggtgatcgccatcatccccaccgccgaccgcggcaaggccacggtgaaggtgcgcgtggcgctgaaggtgaaggacccgcgcatcgtgccggagatgggcgtgcgcgtcagcttcctggaacaggcgcagccgcaggcggccgccaaaccgcagggcgtgcgcgtgccggcgggcgccgtggtccagcgcgagggcgcctcggttgccttcgtgctgggtgacgaaagccgcgtgcagcagcgcacggtcgaggccggccaggcgatgggcaaggaccgccagatcctcaagggcgtgagcgcaggtgaatcggtggtgctgaacccgccggacaccctgcgcgatggcgccaaggtgcaacagaaacaagcgcagtag

SEQ ID NO: 495013 - DNA, 690 bp, Stenotrophomonas maltophilia
atgtcgaccctggtttcactgcgcaacatcaccaagacctaccagcgtggccccgagaaagtgcaggtgctgcacggcatcgacctggacatcgccagcggcgacttcgtcgcgctgatgggcccgtccggctcgggcaagaccaccctgctcaacctgatcggcggcctggacaaccccagcggcggcgagatcagcatcgagggcgagcgcatcgaccagatgagcggcggccagctgtcgacctggcgcagccaccacgtcggcttcgtgttccagttctacaacctgatgccgatgctgaccgcgcagaagaacgtggaactgccgctgctgctgacccacctcaatgcggcgcagcgccgccgcaatgccgagatcgcgctgaccctggtcggcctggccgaccgccgcagccaccgcccgaatgaactgtccggcggccagcagcagcgcgtggcaatcgcccgggcgatcgtatccgacccgaccttcctgatctgcgacgaaccgaccggcgacctcgaccgccagtccgccgaggagatcctcggcctgctgcagcagctcaaccgcgagcatggcaagaccatcatcatggtcacccatgacccgaaggccgccgagtacgccacgcacacggtgcacctggacaagggcgagctggccgacgcgccgctggcccactga

SEQ ID NO: 495014 - DNA, 1158 bp, Stenotrophomonas maltophilia
atgaaatacttctcgttggtgtgggcgcagctgttccgcagccgtacccgcacgttgctgaccctgctctccgtggtggccgcgttcctgctgttcggcatgctcgattcggtgcgcgtggcattcacctccggcggcagcgtggaaggcgccaaccgcttggtggtcgcatcgcggctgtcgatcacccagtcgctgccgatccgcctggaagcccaggtgcggcaggtggccggcgtgcgcgacgtggcctatggcatgtggttcggcggcatctaccaggacccgaagaacttcttcccgaacttctcggtgtcccccaactacttcgatgtctaccgcgagctgcagatcgacccggcacagctggaagactggaagcagacccgtaccggcgccatcgtcggcgaaaccctggccaagcagttcggctggaagatcggcgacaccatcccgctgcaggccacgatcttcccgcgtggcggcagcaacgactggccgctgctgctcaagggcatctaccgttccaaggaccgtgcgctggccgccaacgaagaacgccagttgatgatgaactggaagtatttcgatgaatccaacgactacatcaagaaccaggtgagctggtacacggtaacgctggacaacccggaccactcttcgcgggtggcgcaggcgatcgacgcgatctcggccaactccgaccacgagaccaagacccagaccgaatcggcgttccagcaggccttcgtcaagcagttcgcggatatcggcatgatcgtcacctcgatcatgggcgcggtgttcttcaccctgctgctgttgacaggcaacaccatggcgcaggccgtgcgcgagcgcgtgccggagctggccacgctgaaaacgctgggcttcaaggacagcaccgtgctgaccctggtgatggtggaatcggtgctgctgatcggcctgggcggcctgatcggcatgggcctggccgccctgatcctgccggccatcggcccgaagagcatgggcatgctgccgccgcacgtgccgacgccaacctggctgatggggctgggcctgatcgtggtgatcggcatcatcgtcggcctgttgccggcgctgcgtgccaagcgcctgaagatcgtcgacgcactggccggtcgctga

SEQ ID NO: 495015 - DNA, 1323 bp, Stenotrophomonas maltophilia
atgttcaagagcaaactcaagaagtggctgggcaacggcgtaacagtgctgctgctggcggtcggcctggcgctgtggatcagcctgccgtggaccggcgtgctggccgtggcggtgctggtggccctgtggctgctgctgacccgcggggggcgactggcgctggccgccacccgcatcggcgtggccagcctgccgcagcgctggggcgcgtcttcggtgatcgtggtcggcatcgccggcgtggtcggcgtgctggtggcaatgctggcgatgggcgaaggcttccaggccacgctcaacaacaccggcgatgacaccaccgccatcgtgctgcgcggtggctcgcaggccgagaccaactcggtgatcacccgcgagcaggtaccgatgctgtccaccctgcccggcatcagccgcgatgcgcagggccgaccgctgctgtcgccggagctgtcgcaggtggtcaacctggtgtcgaagtccgatggcaccgacgtcaatgcgcagttccgcggcgtgggcccgcaggcgtgggcggtgcatgacaaagtcaggatcgtcgagggccgcaagttcgccactggcctgcgcgagatcgtggtcggccagggcgccaagggccagttccgcgacatggaggtgggcaggacactgaccctgggcaaccagacctggaccgtagtgggtgtgttcgccaccggcgatgcgcatgattcggaactgtggaccgacgccgatacgctggccaccacctaccagcgcagcgcctggcagtcgatcagcgtgcgcaccgagggcaaggcaggcttcgatcagttcaaggccgccgtcgccgccgacccgcgcctgaaactggacgtggaaaccacccgcgtgtactacagcaagcagggcggcgggctgaccaagttgatcgacatccttggcaaggtgatcggcacgatcatggcggtcggtgcggtgtttggcgcgctcaacaccatgtatgcggccgtcgccacgcgcgcccgcgaaatcgccaccatgcgtgcgatcggcttccgcggcctgccggtggtgacggcagtgatgctggagacgatgctgctggcgctgctcggtggcctgctcggctgtgcggtggcgtggctgctgttcaatggctacagcgtgtccaccatcggcagcaacttcagcgcagtggtgttcaagttccatgtgtcgccggaactgctgtggaccggcctgaaatgggcactgggcatcggcctggtcggcggcctgttcccggccctgcgcgcggcacgtttgccgatcaccacggcgctgcgcgaaacctga

SEQ ID NO: 495016 - DNA, 279 bp, Stenotrophomonas maltophilia
atgatccagcttgaagaagcacgccgtcgcgtggaggctgcacttgccagcgacgatgagccggttgccatcacgcatgagcacgaagtggtcgaaggctggctgttctgcttccagtcgctgcgctacctgcaatccggcgaaatctcggatgcattggccggcaatgggccgatcttcgtcgaccggcacacaggcgagcagcacgcgctgggcacggcgtatccgcccgaggaggtccttcgccagcatctggccgcgcgcggccccgccgtctga

SEQ ID NO: 495017 - DNA, 2826 bp, Stenotrophomonas maltophilia
atgtccctgaaaaccaatccgctgcgcaacgcgatcgtcatcgcgctggccgccagctgcaccacccccgccttcgcacagagcgccggcgataccccgaccaacctcgaccgcatcgaaatcaccggctcgcgcatccgccaggccagtgtcgaaaccgcacagccggtggtcgcgctcaaccgcgccgagatcgagaagaagggctacgtcaacgtcgctgacatcctgcaggacattcctgccgccggtgcgccgagcatgagccgcgcctcgtcgctgacctcctcgcgcgacttcggcggcatgtacgtcagcctgcgcaacctgggcccggaacgcagcctggtgctcatcgacggccgccgcatgggcatcagcgccggcggttactccgacctggcctcgatcccgtcgtccatcgtcgagcgcgtggaagtgctgaccgacggcgcctccgcgctgtacggctccgatgccatcgccggcgtggtcaacatcatcacccgcaagaatttcgatggtggcgaagccagcgtctatgtcggccagtacggccagggtgacggccagaagcgcgcctacagcgcgaccttcggcaagaccttcgagcgcggctggttcagcgtgggtgccgagcgcaccaaggaagatgaggtgctgggcaaggaccgcgcgttcagccgttacaccaacggcccgcgccaccccaacgatggcctcaatggcaacaccccgtggggctacgtcaccgtcggtggcaagaacctgacggtaggcccgggcggcgacccgggcaaggccggcaacttccatgcgccggacccggctgatggtgccaacaccaagtcgaacatgagcctgctgacaggcctggaacgcacctcggtgttcgccaacggtggcttctcgatcaccgacaacctgcgcatcgtcgccgacgcgttgtacagcaagcgcgagtcgaccaagcacctggccggttacccgtactcggtcagcgccgcacaggcccgcaatggcagccgtgccgccctgtccaaggacagcgcgttcaacctgtggggccaggatgcgctgttcgcgcaccgtaccgaggaactgccgcgcggcaccgagaacaacctggaaaccaagcgcgccagcattggtctggaaggcagcttcgaaaccggttcgcggtactgggactggaacgtcaactacatgtacaaccgcaacgaaggcgagcgcatcggtaccggcagcatgtaccagccgcacgtcaacctggccgtcggcccgtccttcatggacggcaacgtggcccgctgcggtgcgccgggcgcggtgatcgccggctgcgtgccgtggaacccggccgccccgatgggttacaccggccccggctcgctgagcaaccaggacgtgcaggactacttgttcacccgcttcgtcgacaagatgcagagcaccaccaaggtcgccagcggcaacatctccggctcgctgttcaccctgccggccggcgacatcctggccgcgatgggcttcgagcaccgcagcgaagaagccagctacactccggacacgatggtgcagaagggcgagatcgccggcaccagcggccagccgacccgcggcaactactcgctcaacgaggtctacctggagctgcaggtgccgctgctggccgacctgccgttcgcccgcgaactgtcgctggacatggccggtcgctactcggactacaacaacttcggttcgaccaccaacagcaagttcggcctgaagtggaagccgatcgacagcctgctggtgcgcgccacctacggcaccggcttccgtgcgccgaccgtggatgacctgtacggcggcaccgtcagcagccgcgactcgttcaccgatccgtgcgatacctccttcggtaccgccgccaccagcccgaccgttgctgcccgctgccaggcgctgaaggtgccggccaacttccgccagctcaacagcgatggcagcgtggccaccaagcccggccagcaggccaccaccgatttcagctcgggctccaacccgggcctgaagccggaaaccgccaagacctggaccgtcggcctggtctacagcccggacttcgtgcagggcctggacgtcagcctggactggtggaagatccgcatcgacaacgccatcgtcggtgagtcggccaccaacatcctggaacagtgctacgtgcagggttcggatgccgcctgcggccgcttcacccgtggcagcaacggccaggtcaactcgctggaccgctcgctggtcaacgcgggctaccgcgaaaccgccggctatgacatcaacgtgcgctaccgcctgccggaaaccgcgttcggcaagttcgccgtcaactggaacaccacctacaccgactacctggagcagcgcaacgacagcgccgccaccaccccggtggaacagcgtaccggttgggccggcgacttccgcgtgcgctccaccttcaacctggattggcagtacggcgacctcggcatcggctggaccgcgcgctactactccagcatgaaggagaagtgctcgtacatggatgagtgcaacctgccgggcttcaactcgtcgtacaccagcgcgtcgccgaccaacaaggtgggctccaacaccttccacgacctgcaggtgcgttacagcctgccgtgggatggcaccgtgtcgctgggcgtgaacaacgtgttcaaccaccagggtccgatcatgtacagccagccgaacagcagcttcacctactacggtggcttcgacatcggccgcttcatgtacatgaagtaccagcagcgcttctaa

SEQ ID NO: 495018 - DNA, 897 bp, Stenotrophomonas maltophilia
atgagcatggacgagaaagaacaacgccggggcctgctggtcaccgcgtccaccttcgtgatctggggcctggtgccggtgtactggcacctgctcaacgaggtgccttcgttccagatcatcgcccaccgcatcatctggagcaccgtgctggtgctgggctggctgctgatcagctcgcgcctgggctggtggcagaagatcgccgcgcagccgcgcgcgctgccgatcctgctggtgtcgagcctgaccatcgccttcaactggggcctgtacatctgggcggtcaacgccggtcatgtcatcgagaccagcctgggctacttcatcaacccgctggtgaacgtgctgctgggcgtgctggtgctgaaggaacgcctgcgccgcctgcaatgggtggcggtggcgatggcggcggtgggcgtggcctggctgaccatcgacgccggcacaccgccgtggatcgcgctcggcctggcttgttcgttcggcctgtatgggctgttgcgcaagctggtctcggtcgacccggtggccggcctgggcgtggaaagcatgtacctgttcctgccggcgctggccttcgcgatctgggcggaaaacggccatggcggtgcgttcttccatggctggggctggcgcaacgacctgctgctgatcttcggtggcgcagtcaccgccgtaccgctgatcggctttgcctacggagtgaagcgcattccgctgtcgctggtcggcatcctgcagtacatcgcaccgagcctgcagctgctgctgggcgtgttcttcttccacgaagcgttcgataccgccaaggcgatcggctttgccgcgatctgggccggcctgatcctgttcgtcggcgacaacatccgcacgatgcgcgccaagcgctag

SEQ ID NO: 495019 - DNA, 906 bp, Stenotrophomonas maltophilia
atgtcggctcccccctcttcgtctgcggctgccccccggggtggccttgtcgcgctggcactgctgctggtctacgtggtctggggctcgacctacctgggcatcgccaaggccctgcacggcggcgcactgccgctgacgatggtctccggcagccgcttcatcattgccggcggcctgatgttcctggcgctgcgcctgttctggaagctgccgaacccgaccctgcggcaatggcgcaacctggtcatcatgggcgtgaccatgctggtgctgggcaacggcatggtggtgctggccgagcgcgaggtgtcctcgggcctggccgccaccgcggtggcctcggtgccgctgtggatggcgctgttctcggcgctgcgcgggcagcatgccagccgcggtgagtggctgggcatcgccatcggcttcctcggtgtggtctggctcaatgccggcagcagcctgaccgcctcgccgaccgggctggtgctgctgctgatcgcgccgatcggctgggcgttcggttcggtgtgggcacgcgggctggacctgccgggcccgttcatgaccgcggccgggcagatgatctgcggtggcgtgctgctggtgctgatcggcctggcggtcggcgagcgcccgagcacgctgcccgataccggtggcctgctggcgatggcctacctgtgcgtgttcggctccatcgtcgcgttcactgcctacgtgtggctgctgcagaacgtgcgcccggcgctggccggcagctatgcgtacgtcaatccggtgatcgcggtgctgctcggcgcgctgctcaacggtgagcgcttcggctggcgcgacctgctggcgatggcggtgattctcctgggtgtggtggtactgacgatggcaaggacgcgaaagagatga

SEQ ID NO: 495020 - DNA, 1335 bp, Stenotrophomonas maltophilia
atgagcaccacgccccaacctgctgtccccgcgaacgaccgcgccgccctgcggcggtcgatctccaacaccctcaaaggctccgccggcaacctggtggagtggtacgacgtctacgtgtactcggtgttcgccgtgtacttcgaatcgcagttcttctcgcccgacgacaagaactccacgatgtacgtgtgggcgatcttcgccgcgaccttcctgatgcgcccgatcggcgcctggttcttcggccgcttcgccgaccgccatggccgccgcctggcgctgaccgtctcggtcacgttgatggcgctgtgctcgttcctgatcgccatcacccccaccgccgccagcatcggcatctgggccgcggtcatcctgctgttcgcacggctgctgcagggcttcgccaccggtggcgagtacggcgccagcgccacctacatgtccgaagccgccattcccggccgccgcggcttcctgtcgtccttccactacgtcaccctggttggcggccacgtgctggcccagctgaccctgctgctgatgctgaccttctggggcaagccggaaatctccgagtggggctggcgcatcgccttcggcatcggcggcatcgccgcggtggtggtgttctggctgcgccgtggcatggacgagtcgctgtcggagtcgtccatcgaggccgcgcgcgagggcaaggcgcagaagtccggctcgatgtacgagctgttcgtgcaccagtggcgaccgctgctgctgtgcttcctgatcaccgccggcggcaccgtggccttctacacctactcggtgaacggcccgaagatgatccagagcgccttcgccggcaacgatccgatgaccggcaccctgatcaacctgggcgtgctggccttcctgatggtgctgcagccggtcggtggctggctgtcggacatcatcggccgcaaaaccctgctggtgttcttcggcgtcggcggcgtgctgtacagctggtacctgatcacccagctgccgcaccagcatgacgccaccctggccttcctgaccctggcgctggcgttcgtcatcctcaccggctacacctccatcaatgcggtggtaaaggccgaactgttccccacccatgtgcgtgcactgggcgtgggcctgggctatgcgctggccaactcgctgttcggcggcaccgccccgctgctgtaccagggcgcgctgaagaccggccacgtcgattggttcgccctctacgtgactgccacgatcgcggtatcgttggtggtctatgtgttcttcctcaccaacaagggcccgaactggctcgacggcacccgcaagtaa

SEQ ID NO: 495021 - DNA, 297 bp, Stenotrophomonas maltophilia
atgtggatcgcggtgacgctggccgcagccacggcactggcctggctgctgcgccgccccagcgcacaggccgcatggccacgcatcggtttcgggatcgccctgctgctgttctgcgccgcactggcgctgcagctggcagtggacctgggcagcggccacagctcgctgcaactgcgcctgcatcgcggcgtcaacggcggatcgctggtcggcctgcgcacgatggtggcgtgctatctggcagcgctcgccgccagcggctggggcgcgtggaagctgctgcgccggcgctga

SEQ ID NO: 495022 - DNA, 1653 bp, Stenotrophomonas maltophilia
atgcgcgtgttgctgctgtcgtcctgcctgttcgtcggtggccttgcccatgcggccaacgacctgccgggtggcggcatcgatccgcaggcgctgtcgcgccatgtgcgcgttctggcgtcggatgaattcgagggccgcgcgccggccaccgagggtgaagagcgcacggtgcagtacctgatcgagcagttccgcagctacggcctgcagcccggcggcgtggatggcagctgggtgcagccggtcccgttggtgcgcgcgcagctggacggcccggccaaggccagcctgtcgctgaagcagggcaagcgtgcgctggccaatggcgtggacgtgaccctgcagagcctgcagccgcgcaagcgcgtgcagatcaggaatgcgccgctggtgttcgtcggctatggcatcgatgcgccggaacgccagtggaacgactacaaggacgtggacctgcacggcaagatcgccgtggtactgatcaacgatgccgatttcgaagccgatgcaccgggcgcattcgacggcaaggcggtgacctactacggccgctggacctacaagttcgaggaagccgcacgccgtggtgccgaaggcgtgctgatcgtgcacgagaccgcgccggccgcctacggctgggccacggtgaagagctcgggcacatcgccgctgttcgacatcgagcgcggccaggacgaggcgatggcgcagcacacgccgctgcgtggctggatgcagcgcgagctggccgaggcgatcttcgccgacgccggcctcgacttcgatgccgagaagcgcaaggcgatgcgcgccgacttccgtcctgtggcactggacaacgccaagctgagcgtggacttcgcgctgaagcgcgagcaggtggtgacccgcaacgtggtggccaagctgcccggtggcgagcatggcgacgaggcggtgatcttctctgcgcactgggatgcgttcggcatcggccagcccgacgccaagggggaccgcatccgccgcggtgcgatcgacaacgccaccggcgtggccacggtgctggaactgggccgggtgttcgccgccggcccgcagccgcagcgcacgctgtacttcgtggcgctgaccgccgaagagaagggcctgctgggcgccagctactacgccgcgcacccgctggcgccgctggacaagaccgccgcggtgctgaacatcgaaatgttcagcccggatggcccgacccgcgacatcgcgtcgtggggcaacggccgggtctcgctggaaggcgacctggaacgcgtggccaaggcccgcggccgcagctacagcccggacccgaacctggaagcgggcttcttctaccgcgctgaccacttcgccttcgcccgcctgggcgtgccggcaatcaccatcggcccgggcctggacaagctggacggtggggttgaagccggccgcgcgctgcgcgagaagtacttcgccgattgctaccaccaggcctgcgatgcctggacgccgagctgggacccgagcggccacgctgccgataccctgctggtctacgatctgggcgcggagctggccaacagccgccgctggccgacgtgggaaaaggaatcggagttccgcggcgcgcgcgacaagagcgaagcggcccgccgctga

SEQ ID NO: 495023 - DNA, 933 bp, Stenotrophomonas maltophilia
atgaccgccgaccccagcatccacaccatcgataccggcttccagcgcccggacttcgacgcggcttacctgatcgttgaaaacggccgcgccgcgttcgtcgactgcggcaccggcctgtccgtgccggcgatgctgcaggcgctggcggatgccggcctgggcgtggaagcggtggactggttgctgctcacgcacgtgcacctggaccacgccggcggcgccggcctgctgatgcagcagctgcccaacgcaaaggcggtgctgcacccgcgcggtgcgccgcacatgatcgacccgacccggctgatcgccggtgccacggcggtgtatggcgccgacgagatcgcgcgcagctatggccgcatcgaggcgattccggagtcgcgcgtggtggtggccgaagacggccaccgcatcgatctggccggccgcgagctggtgctgctgcacacgccgggtcacgcgctgcatcactattgcgtatgggatgcgcgcagccgcagctggttcaccggcgataccttcggtatctcctaccgcgagctggacagcgtgcagggcgctttcatcttcccgacctcctcgccggtgcagttcgacccggaggcgatgaaggcctcgatccagcgcatgctgggctacggcccgcaggcgatgtacctgacccactacggtcgtgtggaacaggcggagaaactggccggcgacctgttcgagcagatcgatgcgatggccgccatcggccgccagtgcgacggtcgaccggaccgccatcgttgcctgttggccgcgttgcaggcgctgtatctggaacgtgcacagctgcatggctgtgcgctggacgatgcggcagtgaccaccgtgctggcgatggatatcgagctcaacgcacagggcctggcctgctggctggatcgcatcagcaggtag

SEQ ID NO: 495024 - DNA, 297 bp, Stenotrophomonas maltophilia
atggcctggttgtcgatgctgctgttcctgccctggttcctgctgctgggcagcctgtactggctgttcccgcgccagccgcgtagcgcgcggcggcgcctgttcgatggcaccaccctggtactggcgttcgcgctgagcattgtgtcgatgctgtggggctaccgcatcggcgtggtgcaacccggcgccggcccgatctggccgcaggtgctggcggtgctgtacgcctacggcgcgttcctggcggtgctggtgctggcgttgctgctgcgaccgcgctggctggaccggtag

SEQ ID NO: 495025 - DNA, 1296 bp, Stenotrophomonas maltophilia
atgacgacccgagtccttaccggcatcaccccctccggcacgccccacctgggcaactacgttggcgccatccgtccggccatcgccgccagccgcgcgccggggatcgagagcttcttcttcctggccgacctgcacagcctgatcaagtcgcaggacccgcagcgcacccagcgcgcgaccctggagatcgcggccagctggctggcctgcggcctggacccggaacatgtgtggttctaccgccagagcgacatccgcgagaccaccgagctgatgtggttcctgaccgccatcgccagcaagggcatcctcaaccgggcgcacgcctacaaggcggcagtggacaagaaccgcgaggaaggcgtggacgaggacgcaggcgtcagcgccggcctgttcatgtacccagtgctgatggccgccgatatcctgatcttcaaggccaaccaggtgccggtgggccgtgaccagatccaacacatcgagatggcgcgcgatttcgcccagcgcttcaaccacgtgtacggcaaggagtacttcccgctgccggacgtggtgatcgatgagcaggtggcgacgctggccggcctggatggccgcaagatgagcaagagctaccacaacaccattccgctgttcgtgccgcgcgaggagctgaagaagctggtgttctcgatcctgaccgactcgcgcgcaccgggtgagccgaaggacaccgaaggctcggcgctgttccagatgtaccaggcgttcgccacgccggaacagaccgcagagttcgccaaggcgttcgctgccggcatcagctggggcgacgccaagcagcagctgttcgagcgcatcgacagtgaactgtcgccgctgcgcgagcgctacaacgcgctgatggccgagccggagaagatcgaagcgctgctcaagcgccgtgggcagcagctgcgcgagcaattggcggcaccgctgctggaagaactgcgccacgccgtgggcctgcgcgacctgtccacggcgggcaacatcgccagcgaagatgccggcgtggcccgcgtggcgccgccgcagttcaagcagtaccgcgagaaggacggccggttctacttcaagctgaccgccggcgacggcacgctgctgatccagagcgaaggcttcgattcgccgcgtgatgccggccagctgattgccgtgatcaagcaggccgagcagggcgaccagctgcagagcgagctgttcaagctggacgccgaggtggacgccgtgctggccgcgctggccgtgttgcgcgaagcggcctga

SEQ ID NO: 495026 - DNA, 807 bp, Stenotrophomonas maltophilia
atgaaacgcctgctgcccctgctgctgatcctgcccctggccggcttccgcccggcgccacctccgccaccggcctacgaaggcggcccggtgcgcatgaccctggtcgaccgcgaccgtggcaccgaactgcgcagctaccccgccgagggccagcgctgggtggccggcgagcgcggccaccgctacgccgtgcgcctgtacaacgacagcccgcgccgggtgctggtggtgctgtcggtggacggcgtcaacgccatctccggcgaggatgccgatccctcgcagaccggctacgtgctcagccccggccagcgcgccgacatcaccggctggcgcaagagccaggacgaagtggcgcagttcgtgttcagcagccccagcggcagctatgccagccgcaccggccgcccggacaacatcggcgttgtgggcgtggcggtgttcgaagaggcacgtcgctggcgccccgagccgatcctgcgccgtggcctgccgctgccggccccggcggccgaagcggcggccgatgccagtgccagtgccagtgccagccgcatcgaaggctacgccagcaagtcgcaggccccagcgctgggtaccggccacggtgcgcgcgagcagtcctcggtgcgcgataccgacttcgagcgcgccagccgcagccccgcacaggtattgcagctgcgctacgacagcgcccgcaacctgcgtgcgcgcggcatcctggtggattcgccctcgcgcctgccgcgcgaaccgcaggcgttccccaaccgctacgtgccggacccgccgacgcgctga

SEQ ID NO: 495027 - DNA, 222 bp, Stenotrophomonas maltophilia
atgaacaaagacatcatttccggcaagtggtcgcagctgaagggcaaggcccaggccaagtggggcgatctgaccaacgacgacttcgatgtggccgaaggtaatgccgagtatctggccggtcgcctgcaggaacgttatggctgggccaaggaccgtgcggagaaggaagtgcgcgagttccaggacgcggtgagcaaggactacccggactacaagtaa

SEQ ID NO: 495028 - DNA, 138 bp, Stenotrophomonas maltophilia
atgaagcgcgtagttgccctgatgctgttgtcgatgttctcggtggccctgctggccggttgcaataccgttgccggtgccggcaaggacgtgcagaaggccggtgaaaaagttgaggacgccgccaagggcaagtga

SEQ ID NO: 495029 - DNA, 921 bp, Stenotrophomonas maltophilia
atggcccatcccatctccgtatccctgattggcgttcccaccgacgtcggtgcgggccatcgcggtgcacggctggggccggaggcgctgcgcgtggcgggcctgccggaggcgctggaagcgcgtggtgtggacgtgcgtgacgtgggcaatctggatggcccgcgcaacccgtggaccgcgccggtggaaggctaccgccatctggatgaagtggtggcgtggaaccatgcactgatggaagccagctacgccgagctgcaggccggccgcatgcccatcatgctcggcggcgaccactgcctggggatcggttcgatcaccgccgtcgcgcgctggtgccgcgagcagggcaagaccctgcgcgtgctgtggctggatgcgcactcggatttcaacaccagcgatgtcaccccgtcgggcaacatccacggcatgccggtggcctgcctgtgcggcctcggcccggaggcgctgacccacctgggcggcagcgcaccggcgatcaccccggcgcagatgcaccagatcggcatccgctcggtggaccctgaggagaagcgcctgatcaagacccacaaggtggatgtgtacgacatgcgctacatcgatgagaacggcatgaagcgcgcggtggaggcggcgctggccggcatcgatgagaacactcacctgcatgtcagcttcgatgtggacttcctcgacccgagcatcgcgccgggcgtgggcaccacggtgccgggtggggtgaactaccgcgaggcgcagctggtgatggagatgatcgccgacaccgggcgcatgggatcgctggacatcgtcgagctcaaccccttgctggacaagcagaatgccaccgccgaactggccgtggacctggtcgaaagcctgttcggcaagtccaccctgatgcgcgactga

SEQ ID NO: 495030 - DNA, 450 bp, Stenotrophomonas maltophilia
atgaaacatgcactcaatggatttgcggtactggcaattgccctgggcggactgtttccggcagctgccaatgcctcctcgcaacgcatcacgcatacggtgaccaccgacgcgtatcccatgcagacggcgagcgcacgccaggtgctcgactgggtggcgcagcgggtaaagccgtcgttcgccccacagggctacggcaacgtacaggtggaacggcgtgcgttctccgtagggcgcgcgtctgcacgctcggatgaatcgattcccggcaagctgccggagcagggcattcccggtgagatctaccgggtggagaacctgcttcccgacggctccctgcagacgtgggaattcacctgggtggaaccctcgtccggccatggcggcggctgggatgtcaccgggtacacctacaagaagggaaatgacccggtaaaccagcagtaa

SEQ ID NO: 495031 - DNA, 771 bp, Stenotrophomonas maltophilia
atgcgtcgccatgccctgtcgctcaccgtcgcactggtgtccaccgctttcgtggccccggccatggccgcggtgccgttcttcaacgccagctgcccgggcggtatcgatgtgcacgccgacgaagccggccccgtttacgtgcagggccgcgaggcggcgctgaaacgcttcaacgaccgctacgtcgaagcgcgcgatgccagcagtggcatcacgttgtcgatcagccgcagcgacgatggcacgccgcagatcagctataccggccgtggcggcgccaatggcatctgccaggtcactgccagcggaacgcccgcgccggcagagcatcgcgaccgccgtcgccacgatgaagacaacgatgcggcgctgccacgcgaggtgacctgcgaatccaccggccagcagcaggtgtcgtgcgacatggatacgcgcggcaacgtggagatggtgcgccagctgagccacacccgctgcgaacaagggcagaactggggcctgtcgcggcactcggtatgggtgaacggcgggtgccgggcggtgttccacaatgtgtccaaggtggcgtacagcgcgccggcgggcgataccgcgctgggttcctgcaacatgcgcaagggcgcgcagggcacgctggtgacccagatgccggtgggcagcgattaccaggaactgatcatcgattatcccgatggccgcttcctgtgcatgatgcgcaacaacggccaggtgcagagcctgacgccggttcgtcgccgcggcggttga

SEQ ID NO: 495032 - DNA, 402 bp, Stenotrophomonas maltophilia
atgtccagaacccaccacccctacctgaccgccaccctgggcgaggccgccctgcgcctgccgcccgaactggcgcagccgttggaagccgctttcgccgccgccaacgaggcagccgcgccgatcaatcttcccagctgcctgcagcgcatccgcgccggtgatgccgccgatggacagccgtggacggggcccgccagcacacccggccaggccgtggccgccgcacgccgggatcgcgctgcggtgggtctggtgtcgttgttggagctgtatcacgccgccgaacgcgtgcgcgtggacggggaagagaaggacgatatcggcgatggcacgcgcgaaggactgatgctggcctgccgggggctggcggagtatgtggcgttgcaggtgcgtagctga

SEQ ID NO: 495033 - DNA, 303 bp, Stenotrophomonas maltophilia
atggccactaagaaaaaagtcgaactcaaagcatttgatgtggccgaacatcttcggacacccgaagaaatggccgcctatctcgacgcctgcatcgacgaaagcgacggcgattccgcgttcatcgccaaggcgctcggcgacatcgcgcgcgctcagggcatgagcaaggttgcgcgtgcggcaggcctgtcgcgcgagagtctgtatcgcgcactgtccggcgagcgcagccctgatttcgcgaccatcctgaaagtgacccgggccctgggtgtgcgattgcacgccagcgcagcataa

SEQ ID NO: 495034 - DNA, 288 bp, Stenotrophomonas maltophilia
atgaagatccagcgtacccgtcagttcgcgacatggattgacgctctcaaggacgtaactgcacgcgctcgcatcctggctcgcatcggtcggctcgccgaaggccagccgggtgatcaccgctatctgggggacggtatttccgaactgcgtatcgatgcagggccgggctaccgcctgtactacacccagcgcggcaggcagttgctgattcttttggtcggaggtgacaaaagctcacagcaacgcgatatcgaaaaggccagggagattgcatttgccctgtga

SEQ ID NO: 495035 - DNA, 1125 bp, Stenotrophomonas maltophilia
atggaacgtactgaagactctgaactgccgcagccgcaggaggggcctcgcccaggacccgtacgtcggccggagtccccgttggctgacccttcgttggcgccgcttctggcgaaatccccaacacttcgggcgggtctcgcacaggccgagcgcgacgatgtggatgttgtctggggacaagccggtaggggcacctatcttgttcccggtgagaagatcgttattgacgagaacgccgttgggcaaggccccagaatcgcgcgctctctttcccatgaagtggggcaccatctcttcactgaacgtcccgatccgacgtccaagcaatcctatgtaaacaccctgctacgcggagaagcagctgcgacgctcagtaatgtccaggtccagcgtgaactcattgcagctggtgggccggacattggtgtgtccggcacgggtaatcgtccacaacagtatggagctattgccgttgaactccaggccgggcggatcaatcgaaaccaagcgcttggacagatcgctgaagtgttcaaaacagaggctccttctgttggtcctcatgcgacatacgagctttactatggcgcgcactatgatcagcacataggacccacgcagcgtcgacgtaggcccgagccagaacttgacgccgagcgcacttcggctgcggaaagagtcgccgtggtcgccgacgactcactttcgctgcaacgagctaccttctcagtagctgaactctgcgatgctgaccgttctctctataagcagataagagcgggtgtggaacgcctggatgccgagagcgggaagcagtgggatgagtcgagtcaacgcatgtccgcgagtttgctggtgctcgcgaaggagcaagggctttcaagagttgaccacgttgtagtgaacaacccgacagagtcccttgcacgtggcgagagagtattcatcgtcgagggagcgatggacgatcctgcccaacgccgtggaaccatgaatacgatggacgcgctccgcgcgcctgaagcagagtcacttcatcgcgctgattcattggcagcaaatcttgaacagcagtcagcgcagcaggtccatgcgcaggacggaccatcattctcaaggtag

SEQ ID NO: 495036 - DNA, 855 bp, Stenotrophomonas maltophilia
atgctgacccgtgccctgatcgtcgtactggccgttctcaatcttggcgtcgcctgctggtggctgctgcgcgatgcaccgcagaagcctgcgccgctgccgcaacccgctggtgtggccgagctgcgctgggtgcccggtggcgcggatgccaatgccgcagccgaggtcaccgccgccgccccgaccgcaccgctgatggagcgcgaaccggccgcgaagaccgcagtggctgcgacgcctgcacccgcgccggccgtgccggccaagccggaaattcccaagccgcagacggctgacgctacgccggttgctgccgccgccaagccggcaacaccgcctgcccccgttccggcaccggaaaagcccgtaaccccgcccgcggccgccgagccgccgcgctgcgtcgcgctgggtccgttcgccgaccgcgccgccgcgaccactgcgcaaggcaaggccggcgcgctgctcagccaggcgcgcctgcgcgaacagcccgctgccagcggcagcgcccgttaccgggtgatgctgccggccgccgccaaccgtgatgaagcgcaggccaccgtgaaacgtatcgtcgccgccggcctgagcgactactacatcatcagccagggcgaggaggccaacgcggtggcgctgggccagtaccgcaaccgcgaaggcgccgagcgccgcatggcagcggtgcaggccgccggcttccagccgcgcctggtggccagcggcgacgccggccaatggtggctggaaggacagctggcggcgggcacgcagccggcccaggcccagcagcgcagcggggcggcacagagccggtcgctggaatgcacgcggttgcgctag

SEQ ID NO: 495037 - DNA, 732 bp, Stenotrophomonas maltophilia
atgagcgattggttgttcgacctcggcaactcgcgcttcaagttcgcgccgttgcagggagatcgtgccggtgacgtgcaggcctgggcgcatggcgccgaaggcatggccgggcagccgccgcacagcctgcccagcggtaccaccgcgttcgtggccagcgtggccgcaccctcgctgaccagcgccatgcttgaccagctgcaacgccgcttcgaaaacgtgcacgtggtgcgcaccagcgccgaatgcgccggcgtccgcattgcctatgccaagccggaaaagttcggcgtcgaccgcttcctggccctgctggctgccgcaaaggcacagcgcccggtgctggtggtcggcgtgggcaccgcgctgacgcttgacctgctcgacgccgacggccagcaccatggtggccgcatttccgcgtcgcccacgaccatgcgcgaagcgctgcacgcccgcgccgtgcagctgccggccaccggcggcgactacagcgagttcgccaacgacaccgccgatgcgctggcctccggttgcgatggcgctgcggtggcgctgattgaacgcagtgcgcagcaggcgcacgcgctgctgggcgtagcgccctcgctgctggtgcacggtggcggcgcaccggcactgatgccgttgctgcccggcgccgattaccacccctcgctggtgctggatggcctcgcccgctgggcggtgcaccagcccgcaggctag

SEQ ID NO: 495038 - DNA, 969 bp, Stenotrophomonas maltophilia
gtggacgatcgccaattgctggccaaactcgctgccggtcgcctgtccggcgacgccctggcccgtgagctgggccagacccgtgcggctatttggaagcgtattcaagggcttagggccgccggtgtggatgtcgagggccgtgccggcgagggctatggcctgacccgcccggttgacctgctggacccggcggcgatccgtggtggcctgccggccggggtcctgccgctgctgcacgacctgcaggtggcctggacggtggactccaccaatgctgaattgctgcggtgcagcgcgccccagcgcggggtcagcgtgctgctggccgaacgccagaccggtggccgtggccgtcgtggccgcacctgggcctcgccgctggccgcgcatatctacctgtcggtgctgcgcctgtactccggtggcctcggccgcctggccgggctgagcctggtggccggcatcgccgtggctgaagcgctgcacgacctgggctatgcccaggcacagctgaagtggccgaacgacctgatcgtcgatggcaagcgcaagctggtcggcctgctcgcagagggcggtggcgaatacgccggcccggcgcgcgcggtgatcggcatcggcatcaacacgcacatgccgccgtcgttcgccgagcagatcagccagccgtgggtggacctggacaccctggccgggaagccggtggaccgcaacgtggtcgttgccgccgtgctggcccgtctgctgccggcgctggaggaattcgatcgcgaaggcctcgctccgttcctgccgcgctacgccgccttcgacatgctggccggccgcgaagtacgcgtggaactggacgggcagtggcagcacggtaccgcgcttggcctggccgatgacggcgcattgcgcgtgcgcatcgatggccaggagcgcctgctgcacgccggcgaagtcagcgtgagggcagcatga

SEQ ID NO: 495039 - DNA, 285 bp, Stenotrophomonas maltophilia
atgcgccgttatgcccattgcctgatcctgctgatgatgcccttcgcggcgtctgcgacggcagcgctggacgacagccgcggcgcctgcgtgtcctccaacggtgatgccgcctcgcagcgcgcgccgaccgcgactgcctcggctgcgaccaccaagccggcaccggtacgccctgcggccagcagtgccaccagcaccgggggcggcggcagcgacgatgacgtgctgcagcgcatccgtgcgccgaagtggcacagctacctgccgggaatgttccgctga

SEQ ID NO: 495040 - DNA, 792 bp, Stenotrophomonas maltophilia
gtggcacagctacctgccgggaatgttccgctgatcaagtcgttgctgcagtggctgcggcctacgccgcggccgatcgacgatgcactgtgggaacacgcctgccgccgcgcggcctggctgcacggactggacgacgaacgccgcgcgcgcctgcgcgcactggctacgcgcttcctgcacgagaagaccatcaccccgatcggtgagctgcagctgcaggccggtgacggcgtgctgctggccgcgctgtgctgcctgccgctgctggcgttcggtgaggtgggcctggagggctggtcgcagctgatcgtctaccccgatgccttccgcgtgcaccgcagccacatggatgcggctggcgtgctgcacgagtgggatgacgagctgatcggcgagtcgtgggacagcggtccgttgatcctgtcctgggccgatgtgcaggccgacctggcggcgccgcacgagggctactgcgtggcggtgcacgagatggtgcacaagctggatgcgctcgatggtgcgatggacggtacgccgccgctgccgcgcgaatggcagcgcgagtgggcgggcacgttccagcgcgcctacgacgcgttctgtgcgcaggtggacgcaggcgaagagacgctgatcgatccgtatgcggccgaggcgccggaagagttcttcgcggtggccagcgagtaccacttctcggcaccggatctgctgcagcaggcgttgccggaggtggcggcgcagctgcgacggttctacggcgagccgcccaggatcgcaatgcggtag

SEQ ID NO: 495041 - DNA, 1365 bp, Stenotrophomonas maltophilia
atgctcgccgcgtccgtgggcctggtggcgttcctggccctggccggttacgcgctcgacgccgccttcgccgacacggcgaaggcgaacctgcgtgagcgcctgaagaactacgccacctcctacgcggccggcatcgacttcacccgcgaccgctcgctgtacatccgcgagcagccgccggattcccgcttcgacgtgcccggcagtggcctgtacctgcaggtagtgatgccgcacggcaagggcaattcgatgtccgctgaaggcccgatgctgcccaccgtcggcggcggcctgctggcaccgcgccaggaggtgttcgaaggcccgctgccgatgatccagatcgatggcagccaaggctcggtgtaccgctacggcctcggcctggtctggggcgccgacgccgatcctgccaccgaattcccgtacaccatctatgtgatggaagactcgcgcgcgctgggtgcccagctgcgcgtgttccgtggccgcgtctggttctacctgggcggcatcggcctgatcctgctgctgctgcagaccgtcatcctgcagtggagcctgcgcccgttgcgccgggtgatcaccgagttgaccaaggtgcagcgcggcgagaccgagcgcatgagcgagcgccacccgcgcgagctggaaccgctgaccgacagcatcaacgccttcatcgaaagcgagcgcgagaacctcgagcgccagcgcaacaccctggccgacctggcgcacagcctgaaaacgccgattgcggtgttgcgcacgcagatggacagtggtgccggcgacggcgcgctgcgtgaggaactggacgtgcagctgcagcgcatgaacaacctggtttcgtaccagctggcacgcgcggcctcgtcgggccacaagctgttctccgcgccgctgccgatcgagtccaacgccgaggaaatcgtacgtggcctggagaaggtctacgcctccaagggcgtgctgtgcgagttcgacatcgatccggcagcgcgcttccacggcgaaccgggcgacctgcaggaactgctcggcaacctgctggagaacgccttcaagtgggccaaccgccgcgtgctgctgaccgcgcagccgctgccggccccgaacgcgcgccgcgccggcctgctgctggcggtggatgacgacggcccgggcattgccccggacgacatcggcaaggtgctgcagcgtggcgtgcgtggcgacgagcgcgtgcagggccacggcatcggcctgtcgatcgtgcaggacctgatcaaggattaccgcggcgaactgaccgtgggccgttcggccgaactgggcggcgcccgcttcgaagtgcgcctgccgccagggccgtaa

SEQ ID NO: 495042 - DNA, 684 bp, Stenotrophomonas maltophilia
atgcgtatccttctggtcgaagacgaagccccgctgcgtgagaccctggcagcccggctcaagcgcgaaggctttgccgtcgatgctgcgcaggacggcgaggaaggcctctacatggggcgcgaagttccgttcgatgtcggcatcatcgacctcggcctgcccaagatgtcgggcatggagctgatcaaggccctgcgtgatgaaggcaagaagttcccggtgctgatcctgaccgcgcgttcgagctggcaggacaaggtcgagggcctgaagcagggtgccgacgattacctggtcaagccgttccacgtcgaagagctgctggcccgcgtcaacgcgttgctgcgccgcgccgccggctggagcaagccgaccctggaatgcggcccggtcgcattggacctcgccgcccagaccgtcagcgtggccggcagcaatgtcgacctgaccagctacgagtacaaggtgctggagtacctgatgatgcatgccggtgaactggtctccaaggccgacctcaccgagcacatctaccagcaggacttcgaccgcgactcgaacgtgctggaagtgttcatcggccgcctgcgcaagaagctggacccggatggcgaactgaagccgatcgagaccgtacgcggtcgcggctaccgtttcgcgatcccgcgcaacgagggctga

SEQ ID NO: 495043 - DNA, 375 bp, Stenotrophomonas maltophilia
atgtcttccgctcccttccatcgccgcattgccctggccacctgcgtggtcctatcggccgtgccgctgtcgtcggcgctggcacagcagccgccgcggggtgagcaggggcgtgcggagatgatggagcggggcgagcgcggcaaccgtggcgacgagcgttcgctgtccgatgccgtgcgccgcgtgcagcgcaccacgggtggtcacatcctcggtgccgagcgcgtgccgttcgatggtcgtgatatcaaccgggtgaagtacatggacgaccggggccgggtccgctatatggacgaccccgccccgtcgcgttcacagccgcgcacgccgcggtcggatatgtcatcactacgcggcgataacccctga

SEQ ID NO: 495044 - DNA, 1032 bp, Stenotrophomonas maltophilia
atgccagtctccacgatcaacaccccgatgccgtccgccaccgcccgttacgccgattccctgcgcctgtccgttgcccccatgatggactggaccgatcgccattgccgcgtgttccatcgcgtgctggcaccgggtgtgcgcttgtacacggaaatggtgcacgccaacgcggtcatccacggcgatcgcgcgcgcctgctcggcttcgaccgcagtgaacagccgctggcgctgcagctggggggcagcgatcccgcgctgctggcgcaggctgcgcgcatcgctgccgactggggctacgacgaggtcaacctcaactgcggctgcccgtccgaccgcgtgcaggccgggcgcttcggcgcctgcctgatgcgcgagccgaggctcgtggccgagtgcgtggcggcgatggtcgatgccgtcgagatcccggtgacggtgaagtgccgcctgggcgtggacgaggacaatgactacgacgtgttcgccgccttcgtcgaccgccaggtcgccgcaggtgccgcgatggtggtggtgcacgcgcgcaacgcgtggctgaagggcctgtcgccgaaggagaaccgcgaggttccgccgctgaagtacgactgggcctaccggctgaagcaggagcgcccggcgctgccggtggtgctcaacggcggcctggccagcgtcgaggtggtgcaggcgcaggccgcgcacgtcgatggcgtgatgctgggccgcgcggcctaccacgatccctacctgctgcatcagctggaggcgctgcagactggcgccccgctgcaggcccgcggcgacctgctgcgcgcgctgcgcccctacgtggaagcgcgcctgggcgaaggcctggcgctgaagcacatcacccgccacctgctcggcctgttccatggccagcccggtggccgcgcattccgccaggtgctgagcgagggcgcacaccgcccgggcgccgattggaacctggtcgagcaggcgcttgccgcgaccgaacgcgacgctgatcgcgccgcagcgtga

SEQ ID NO: 495045 - DNA, 2406 bp, Stenotrophomonas maltophilia
atggatgttgtgacccaggcaaagcaggcaatggacaactggcatcgcggccagacgtcggcgcatttcgaaaccggaggtcgcggccccggccacgtttccaccggcaggggcgaccatggcggcgtgtcgtatggcagttaccagtacgccaccaacgttggcggcgtggatgagtacgtcgccgcctcgcgctatggcaaccgcttcaacggcctgcaggcaggaaccccggccttcaccgaacgctggaaggaagtggcggccgccgatccggcagggtttgccagggaccagcacgacttcatccagcacaagtactacgacgtgcagatgggccgcctgaaggatgtgggcatcgatctctccggccgtggtgcggccgtgcaggatgcgctgtggagtacctcggtgcagtaccgcggcatgacccggtcggtgttccagaagggcctgcagcaggcctatggcgaagacttcaagctgactgagctgagtgacgagcagattgtccgcgcggtgcaggactacaagcacgccaatgtgcaggtgcacttccagagctcgcccaccctgtgggattcgctgcgtgatcgtgcgctcaccgagaagaccgcactggtcgggctggcgcgctacgaccaggtcaaccacaaccccgaggcttaccggggcaaggattaccagcaggtgttcggtgaacctgagcccggccagcgcggccagcgtgcggccgcatcggcgatggccgacggcgtgctggcacccggcgagcgcggtaccgaggtccaggccctgcaggccaagctgatccaggccggccataccggtcgcaacgggcaaccgctgacagccgatagccactacggtgccaataccgagcatgcagtgcgcgagttccagcaggcgcatgggctgaccgtcgatggcaaggcgggccggcagaccctgcaggccctggatacggcggtacgcgagcacacgccggcgcagcctgtggcaccggccacgcctgcaccggtcactcctgctgcggcacccgcacccgcgactgcgcgggaacccgatgccgccgccgcgcccggtggccagcgcatcgtcgtggtcgaaccctttggcaacggcagcagcaaccgcacactgcgccatggcaccagtggcgaggatgcctatcgcgaactgaagatccatcaccccaacaccaacgccgaggccgtgcgcaccggcaatgccgccaaggctgaccgcccgtcggccatggtcgagggcgaactggagacggtacggacccgcggtgatcgcaacggcatcccgctggtgcacaaggatctgatcctgagcaatgcgcgcggcgaccgggaggtgatgattcccaatccggtcgccgggtatgtgcaggtcaacaatgacaagtggaattcgatcagcatctggagccatccggccgggcatccgcagcgcgaactggtcgggcaggtgctgcacggtgcgcgtggaaccaccccttacaggaccggtgatttcgtcgagtacggtgcgccgttgatccgccagtccgatgccggtaccccgggcgccgtgcacgcgcatatcgagctcgagcccgatcagtaccgcaggttcctgggtgacatgctcaacgaccgcatcaccctgggcggcaaggtccacgcgcagggccccgaggccgcgcaggccgcacgcagtgcacagcaggcgccgatggccgatggcgtgctgaagcagggcgagcgcggcgatgaggtcaaggccctgcagggcaagctggcggcgctgggctacgccggggccgacggcaagccgctgcacgccgatggcgtgtatggcaaggacacctttgcagcggtcaagcagttccaggccaacaatggcctggacgacgatggcaaggccggccgcaggaccctggcgcaggtcgatgcgcccaacgcggtgaaggccggtatcgcgccggcggcaccggcccaggccgaacctgcagcgccggccagcatgcgcgacgccgggcatgccgacaacgcgcgcttcggccaggctttggacaggctgcaggcgctcgaacagcagcgcgcccaggccggcctgaagccgctgttcgccaacccgcaggaagccgaacgagcggctggccagctggcctacgaaagcaaggtgtccggcatgcgccagatcgaccatgtcgtggcccgcccggacggcaccggcctgttcgcggtgcagggcgagctgggtgacccggcagcgcagcggaccttcgtcgaccgccagcaggcggtgtcgcactcggtcgaggccagcagccggcagagcgaagcgctggacagtcagttcaaccagcgtgcgcaggaacagcagcaggaacaggtgcgcaaccgcgggttgtaa

SEQ ID NO: 495046 - DNA, 594 bp, Stenotrophomonas maltophilia
atgcagggaacaaaccaccttccagcggccccccgcgaaacgttcggcagggccggggccatcgcgcttgcgctggccctgggcctcagcctggcagcatgccaggccaagagcccggaggcggatacggcagttgcccccgcggccgccgcgcccgccaccgcatcgccgcccgccactgcagagcctgcacgcgccgcacctgccacgacagcggccgatgccgatgatcaggacatgccgccgcagcgcccggatgattcctacaacaaagccacgctgcggccgcagtacgccacgtgcgtgaactccagcggcggcgagacccccgcactgcaggcgtgtggcgatgaggagcttgcctggcaggagcagcgactcgagcaggccttcatgaagatcgtcgacggtcccgatggcaaggacaaggataggctgatggacgagcaggccgcctacatgtccgataccaatcgctactgcagctggaaccctgccgaagacgggcaggggcagatgctggacgcgcagtcctgccggatcaatcgcaccgccaaccgtgccgacgtgctgcaggcactgacctcgaagtaa

SEQ ID NO: 495047 - DNA, 711 bp, Stenotrophomonas maltophilia
atgaccgtcggccttgaagtcaccaacgacagcggcgtccccgttctggtcaacgcacacgcccttgccttcttcgcggcaggcaagggggtggagtccatcggtagcaacacgtcgccgttgggccagcgtggatcggtcagtttgcccgcgcagagcgtgccctacctggtgttcatccgctgcaatggcggctccacgcggatctccaccggcactgcaggtttcagctggaacatggcccagggcaccaccagtttcgaatggtgggcatggggacatgcggttcccagcaacaatactggcatgcaggtctacaacgccgacggttcgctgcagtgggacatgagcagccgcccgctgcgcatggcgggcctggtcaatacgactggcgcccgaccgccgctccccagcgagatgtccaacgagaacattctcaccggtgacctgatcaacggcccgggcgacaatcttgcctacctgctgtcagacatcggcctttgtcacgatgtctatgcgatgcccagcggtaatcccaccatccgtaccaacatgcgctatgcggcggccatcagcacgccgaacgcatcgcagatgcgcgtcaacttcacccggcaagctgccaatcgccagcgttccctcagtggagcgtcctatcagacgttcgcctcgcgtctgccaagcttcgtccttgcggcttacacctactga

SEQ ID NO: 495048 - DNA, 330 bp, Stenotrophomonas maltophilia
atggcaacaggtatgcagatattcggcccggatgggcagatgtggttcgacaccaatgatcgtgccggcaaggtaatgggtgagatgcacgtcagcaccagagacagcatctatgtgggcatggggggcatggggcagccattcgcgatcctgccgagcaccttctgggacagctggcaggacatgaatggaaaccagttctccgcgccgaacatggcatccatgtccttcaacaaaccaggcgccgccgagggcgactacctcacactcaacttcacgttcatgacgaccaccaatcccaatgcctatgtcttctacgggagtttctga

SEQ ID NO: 495049 - DNA, 3489 bp, Stenotrophomonas maltophilia
ttgaatcagaccactcatcccacgccgcgcacgcgtggtgcagccacgccagtgctggcgggcgccaagaagggcgcgagcaacgcccgaaccccggtcgaaaccgccgacagcctgcactcgatggcggtggcccgcatcatcgacctcgccagcgagggcgagatccgtggcctggtcgccggcaagcagtcgatctacctggaccaggtgccgatcgagaatccggacggcacgctgaacttctccggcgtggacgtgcagacgcgttccggcacccaggaccaggaccacatcagcggcttcccctccatcgagaacgaagtcggggtcaacgtcgagctgcgcagcgatgcgccggtggtgcgcacggtatcgggtgccgatctgtcagccgtccgtatccgctttgcggtgccggcgttgcagaagaccaacaccgagaacggtgatactgaaggctaccggatcatgtacgcggtggatctgtccaccgacggcggcccgttcagcacggtgctgaccgatgccttcagcggcaagaccaccagccagtacgagcgcagccgccgcatcgatctgcctgccggcagccagtggcaggtgcgcatccgccggctgaccgccaacgccaacagcagcaccatcgccgataccatcaacgtgctgtcgatgaccgagatcatcgatgccaagctgcgctatccgaactgtgcgctggcggcggtgcaggttgatgccagccagttccagaacattcccacccggtcctaccagctgtggggccgcatcgtacgcatcccctccaactacgatccgctcagccgtctctacagcggtgtgtgggacggtaccttcaagagtggctggaccaacaatccggcctgggtgttcttcgacatcgtcaccaacgatcgcttcggcctgggccatcgtgttccgctggactgggtggacaagtggcggctgtaccagatcgcgcgctactgcgatgaactggtcagcgatggccagggcggcaaggagccgcgcttcacctgcagcctgtatctgcagacccgcgccgaggcctaccgcgtgctgcaggacatcgccaccatgttccgcggcatcagtttctatgcggcggggcaggtgatggcctcggccgacatgcccaaggacccggtgctgacctacagccaggccaacgtcatcgaagggcgcttccactatgccggcagcagccgcacggcgcggcacacggtggccctggtgtcgtggatcgatccggacgacttcggccggcagaaggtcgaagtggtgcagcacctgcctggcgtggcccgctacggcatcaaccagaccgaagtgacggcggtgggctgccactcgcgttcgcaggcgcagcgcgtgggcaaccacatcctgcataccgagatgctggaaaccgagacgatcagcttctcggtgggcctggatgcgctgggctgcatgcccggtgatgtgatccaggtggccgacccgaaccgcgccggccgccgcaatgcgggtcgcatccgcagtgcaggtgcgcgcagcctggtgctggaccgcatgccggaacagatcgcggccggtgacaccctgcgtgccaccctgcccagcgggcagaccgaagcacgcacggtgcagtcggtggacggcgagacgttgaccgtcagcgcgccgtggtcggcggtgccggtggcgcagtcggtctgggcattggaatcgccggagctggccctgcagcactatcgcgtgctgtcgatcagcgaaggcgacgacctgacctatcagatcaccgcgctcaagcacgtgccgggcaagtacgccgccatcgacgatggcacgcgcctggagcagccgccgatcagcatcatcccgcccagcgtgcagccggcaccggccagcgtgcggatggcctcgcatgtggtggtcgaccagggcatcgctacctccgtgctcaccatcgagtgggatgctgcggacaaggcgatcggttatgacgtggaatggcgccgtggcgatctcaactgggtccgcgctggccgcgtcgggacgcaaagcctggaagtgcggggcgtctacgcaggcgagtatctggcccgcgtacgcgcggtcaatgcgctgggcgccgtatcgcagccgacgctcagcatgctcaccaccattgaaggcaagacgacgccgccaccggcattgacctcgctgaccgcgcgcagcagggtgttcggcatcgagctgggctggcaattcccggcaggcgccacggataccgaacgcacggagctctggtacagcaccagcccggatcgcgcagcggccatcaagcttggcgacttcgcctatccacagtcgcggcaccagatgaacggtctcgcggcgggcgcacgcttctggttctgggggcgcctggtcgatcgcagcggcaacgtgggtccgtggcatccggtggaggcgggtgttctgggcgagtccagcagcaacccttcggactacgatgcctacttcgccggccgcatcaacgaaagcgcgctgggccaacagctgaagggcaagatcgagcgcgtcaccgaagtgctgccgctggtctggaatgccgaggcaacctacagcccagggcagaccgtcatccacgacggcaggatctggagctggcagggcgccgctgcaggcaacgagacgccgccgggcagccactggaagaacatcggcgacgcgatcgccgaggcgggcgccatcgtcggccgtgtcgaccagctggaaatggacgtgaccgacgtcgatggcaaggtggctgcgcaggggcagaaggtcgacggcctgttcgcccaggtcagcgaccacactgccggcgaggaggactacaacgtcggcgagaacgatgtcagcgccggtgccatcaccgtctacagcgtgatggccgagaaggacgcggcgctggccaagcgtgtggatacggtcgaagcatccatcgagggtgttccgggcaagatcgaaggcgtgagcgcggcggtccagcaggtctcgcaggccgtggtgaacctggatggcaaggtcagcgcgacctatacggtcaaggcgcagatcaccagcgccgggcagatctacatggccggcatgggtctgggcgtggagcagcagccagatggcagctaccagagccagatcctgatgcaggctgatcgcttcgcgctgttcaacaccaacagcgggcaggtcagtgcgcccttcgtggtgcagggcgggcagaccttcatcagccaggcactgatcggcaacggctggatccagaacgccatgatcggcgatgtgatccagtccaatgcggttggtgccggcgggcaaccgcgatggaggctagacaagaacggcacgttgacgatgaacggccccgagaacggcggccgcctgaccatcaatgacagtgtcatccacgtttacgacagcaacggccgcgtccgcgtccgcatggggatctggtaa

SEQ ID NO: 495050 - DNA, 594 bp, Stenotrophomonas maltophilia
atgactgaccgtcttcgtacgatccgcctgtacggcaagctgggtgcgcgcttcgggcgcaggttccggctggcggtgaacagcccggccgaggcggtgcatgcgctgtgcacgatgctgcctggcttccagcagtacctgatgggcgcaaaggccaagggcatggagtttgccgtgttcaacgggcggcagaacctgtcgcgggatcagctgcacgacccgccgggacaggatgacatccgcatcgcgccggtgctggtgggcagcaagcggggcggtgtactgcaaaccatcatcggcatcgtgctgatcgttgtggggagctacacatcttgggctggcggagctgcactggtatcaaccggcgtcagcatggtggttggcgggatcacccagatgctctccccccagccaaaaggcctgggcgccaaagacacacccgaaaacgcacccagctacagcatgaacggcaccgtcaacacgcaggcgcaaggcaaccccgtgccggtcgcctatggcggccatgacaccaagggcatgttcatcggctcggccgtgatcagcggcggcatcctggcggaggaccagttttga

SEQ ID NO: 495051 - DNA, 741 bp, Stenotrophomonas maltophilia
atgcaaccgacaaccctgcaggccatccaggcgcacgccgtggccgagtacccgcgcgaatgctgcgggctgatcgtggccattgaaggccacgaacgctatcttccctgccgcaacgtggccgccacgcccagcgagcatttccgcctgcccgctgaggactatgccgtggccgaggacaagggcgaggtgctggccctggtgcacagccatcccgatgccgcggcaacgccgtccgacgccgatcgggtcatgtgcgagcgcagcgggctgacctggcacatcgtcagcgtcggccaggtaacaggcgaggcaccgctgtgcggtgatctgcagaccctgcatcccactggctacatggcaccgttggtcggtcgccagttcgcccacggtgtgctggactgctacagcctggtccgcgatttccacgcacgcgaactgggcatcccgctgtccgagtacgaacgccaggacgactggtggagccacggccaggacctgtacagccttgaacggctgcacgccgagggcttcgacctgatcgagggcgagccgcagcggggcgacatgatcctgatgcagatccgctcgccggtcaccaaccacgcgggcatctacctcggcgacgggcagatgctgcatcacctgcatggccgcctgtccgagaccgtaccgtacggcggcatgtgggccgagcgcacccgttgcatcgtccgccatcgcgaggtgcgccatgactga

SEQ ID NO: 495052 - DNA, 696 bp, Stenotrophomonas maltophilia
atgatcaccgccgatgcccagcagcttgggccgggtggccgcatcaccgtctatgaactcgacgccagcagtttcggcgccgacaagctcttcttccatgcgcacctgcagagtggcctcatctggtggcagggccaggaatatggcccctggccgatcgaggccagcggcttcgagcgcaccagcgaccagccgccgaacccgcgcctgcgcgtgagcaacatcgatggccgcatcaccgccatgtgcctgttgttcgatgacctggtcggtgcacgcatcatccgccggcagacactggccaagtacctggatgccgccaacttcgaggaaggcaatcccagcgcggatcctggcgagcacttccctgatgaagtctggttcatcgagcgcaagatcggtgaggacaagcagatggtcgaattcgagctgaccaccgcgatcgatctcaatgggcagcagctgccgggcaggcagatcatcgccggcatgtgtggctggctggtgcgtggcggctatcgcggcgcgtactgcggctacaacggtccagcggtggccgacagcgacgacgtcgccaccgatgatccggcgcgtgaccagtgcggcggtcgggtacgcagctgcaagctgcgcttcggccaggacaagccgctgccctatggcggcttccccgccgcgggcctgttgcgctcctga

SEQ ID NO: 495053 - DNA, 1137 bp, Stenotrophomonas maltophilia
atgacacgaagaatcatcgacctggacaccgtccagcccaacggcaaacgaggtgagacccagcgaccggcattcaccaagatcaacgacaacttcgccgagatctacgctggtctggacgacgcgcaatcggcgctcatgcatctggaaggccgcatggccggaaggaacccgctcatcaacggcgacttccggttctggcagcgcggtgcagcgttccctgcatccacgggctctcgctacatcgctgaccgctgggcggtcaatgccatcggcaccagggtggctgcctcacgcgaggatgtgcctccaggcggcggccagggagggcgcctgctggctgggtcgcgccacctgcttcggctggaggtgcagagcgttgccggtgccggcaacatggcgctggtccaacagcgcatcgaggatgtccggacactggccgggcgcaccgtcacgatcagtttcaaggcgcgcgcctcggtggacgacttccgcatcggcgtggagctgcagcagtcctacggaacgagtgggtctaccgcgcgcgacagcatcggcgcctcggtcgtgctcgatacgctgtggcgatggtaccaggtcaccgtggaagttcccggtcttgccggcaaggcgctgggcccggacagctacctgcaactgagcttctggctggacgcaggtgccgatttcggcggccgcgcgttcgctgccgggcagaagagcggcagcgtgcaactggccgaagtgcagatcgaagaaggcgataccgccaccgacttcgaccgccggtccgaagcactggagctgctgttgtgccagcgctactacgagacggtggatgtaaaccggatcatcggcatcacctacaccgccaacggcgacacgcgagcgtgcatcccgttcaaggtgcgcaagcgctcagcacccagaatctcctcgccgtccaccgcgctgaacctggtgggcttcggcaatgccggaaacctggtcaacttcgacggcggagcgcccagctggcagtccaccgttgacgcggcagtcatcgcctcgatgccgaacaacatgcagctctggggtgcggtggtggtgtggtcgaccacctcgcaggtgctggtccaggccgatgcggagctctga

SEQ ID NO: 495054 - DNA, 1140 bp, Stenotrophomonas maltophilia
atggcacgacgcacaatcgaccttgataccgtgcagccgaacggaaagcggggtgagacgcaacggccggccttcaccaaggtcaatgagaacttcgccgatctctacacggatctggatgaactcgaaaccacggtgcaggatctccggcgcaggcagaacggccggaaccggctgatcaacggtgacttcaggttctggcaacggggcagcagccgcactgtggtgtcgcctctggcggtgtatgttcccgatcgcttccaggtggtatgcaccggggcggggcaggtcgcggtgtcacgccgcagcttcgatgccccggcattcggggtcacgggattcatgaactgcgatctcaccggatcgacggccgcgaccgaggcgttcgtcacccagccggtggaaggcgtgcagacgctggcgggaagtaccgtgacgctgagcatgcaggcatgggccgcgacgccgggctgccgcatcggcgttcgcttcatccagacgtttggtaccaatgggtctccggatgtgacggtccgggcaggcgtccaggagatcggcaccgcggccgcgctcaggtacttcaccgtcgagttgccatccattgctggcaagaccgtgggagccaacagcaagctgcacgtcatcgtcgactttgcgacacccggtggttatggcggacagcttgtcggccagtctgggtccttttcgctgacctgcatgcagttggagaagggggcgacacctaccgactacgacatgcgtgatgacgcaaccgagctgatgctgtgccagcggtactacgagaagagcttcccgctggaacaggcaccgcagcttggcatgccgtcaccgcagggcgtcgccgccgcgttccaggcaggcctggcgcgcagtgagcagatctccttcaaggtcgccaaacgcactgtgcccgcactcacgctctactccaacagtgaagtggcgccggccctcggctactggtcgttgttcaacggcaacgggtggtcacgcggaatggctgtcccgctgttccttcgtcccgatggattcacgcttcagcttgatttcggttctggcctgacgccgttctatgcctatctggtgggcggcaactgggcggctgacgccgagatctga

SEQ ID NO: 495055 - DNA, 453 bp, Stenotrophomonas maltophilia
atgtatcaactgaccgaagagatcgacaccatcaagtgcctgcagaccggcgccttcattccacgtggccaccgtctgtggaatgactatgaagcctggtgtacggcaggcaatgagccggagccggtaccgccgctgttcgtacccggctcggcgcagttccatcgcttcatccgcggaaaggcgtgggagtggatggcccagtgtgcccgcgatcgcggctatgacagcatcgagagttgctgcagctacgcgggcagtgcggtgccgcgctatgcgcaggacgccatcgccatgattgcctggcgcgacggggtcaacctcgcattggagactattgagtccaccgccgaggagaacgtgccggactggcggcaggtccaggcgcaactgccgcagccggatgcattcggctggcctgccgagcaggcgccggaaatcatcggcggctga

SEQ ID NO: 495056 - DNA, 1122 bp, Stenotrophomonas maltophilia
atgacgagaaaaatcatcgacctcgattccgttcagccgaacggaatgcggggcgaaacccagcgcccggcgtttaccaagatcaacgacaacttcgccgaagtgtatggcgcgctggattcgctggaaagcgcattgcagagcgcggctccaggcaggaaccgcctgatcaacggcaacttcgatttctggcagcgggccagcactggcaccacccaaggcggcgagatctatgtggccgatcgttggaccgtggcagcgctgagctgcacgcataccgcaaatcgcggggccaatcttcctgccggcggtgccgcgccggaatcgcgccgtttcctcaacagcgttgtctccaaggtcagtgcaggcagcagcgcctatgtcgcacagaaggtcgaaggggtcgccacgctgtccgacggcgaagtggtggtttccggcttcgcctatggcccgccaggaaaacgcatcggtgttcgtctcatccagcactttggcaccggtggttcgccgtccgccgcggtcagcgtagagctgggaaccgtagcggtcaccgccgcgtcctggacctatttccagctcagtgcgcgattgccatcggtgaaggggaagacgctgggcagcaatgccgacagcgatttcctgtggctcgtggtggatctgtgcgccgatgcctatggcggtgtcatctccggtcagagcggagagttcggccttgcgatgatgcagctggagcgcggcgacagggcaacggcattcgacctgcgcccgctggcccacgagctgcagctgtgccagcgctactacgagaagagctacaacctggatgtgccgcctggcacggccgatggcatcggacgcgacaaccagttctacgaccgcagtgtcggcgttggcagcacctcgcatatccggtgtcgcgtgcccaagcgggccatcccagcctacacggtctacagcgatgtgaacgggcaggcagggcgcatatccggcgcaagcggcggcatcggcacggtgacatccatcgtatatgccggccagtccggcgcacaggtcaattaccaatccgccgcaggcaactggggctcctccttccattggaccgccgacgcggagctatga

SEQ ID NO: 495057 - DNA, 1152 bp, Stenotrophomonas maltophilia
atgccacgaaagatcatcgacctcgattccgttcaaccgaacggaaagcggggtgaaacacagcgcccggcgttcaccaagatcaacgacaacttcgccgaagtctacgacgcgttgactgaagtggcgaaaatcccgcagatagtggggaatgccatcaccgagcgcgttccaggcaggaatctgctcatcaatggtgccctgcagttctggcagcgccgtacatctggtcgtgttggcagtgggtcggggacgctgggcgcggaagtgttcttcgccgaccgtttcacgaactcggcgctggtctgcaaccacgacgtgcagcgggtggcgtacgacgggcaagccggatttccggaagacacacggtcgattctggtctgcaccgtatccgaggccatcgccagaagtggcgcctggatggggcagaagatcgagggtgtcggcagtgcaagtggagacatcacgatctcggtatgggcgaactctgatgcgcccggtcgcagtgtgggcgtgcgtgtcatccaggatttcggaaccggaggctcaccctcgccgcaggtggtgctggaggccggtgtgctcacactgggcaccaccgccaaacgtcacagcatcacggtgacgttgccgagtacccggggaaaggtgctcggcagcaacggcaacgaccacctctacgtagtgttcgacctgtgcggtgctggtcagaagggcgagctggtggcacagaacggctcgttcggctttacccagttccaggtcgaatcgggccgcgcagcgacatgcttcgactggcggccgccaggtgtggaactggcgttgtgccagcgctactacgagaagagctacaacctcgacatcgtacccaacacggcgcacaacgaagggcgcgaggcattctcgatcaactcaccgggaatggcgcattaccagagcgtgcgattccagacggcaaagcgtgcccatccctacgtgatgatcatctcggccgacaacatccagcaggatggacacatcgcggaagacaacatctcccgcgtgccctgcctggtcaactacgcctcgccttccgggtacgaagtcagctggaccaacaatccaggccgctggggcggctggtggcattggtgggccgacgccgagctttga

SEQ ID NO: 495058 - DNA, 1161 bp, Stenotrophomonas maltophilia
atggatcttcaacggatcgacctggataccatccagcccaacggaaagcgtggggagacccagcggccggccttcaccaagatcaaccagaacttccagcaggttggccaggcagtcgacggcctgcccgggcagctcgccgataccatgatgcgcgcgccggcacggcgcaatcgcctgatcaatggcaatttcgacatctggcagcgcggcagcagcttcggcatctccgggaactacacagccgaccgatggttcctgcagatgggcaacgtcgaagacgccgtgttcaagcgcaatcccgcagcggcaggcgacaacaacttcccgttcagcaccttcacgttgtcggtcagttcgagtggcaatacggatggcacaaaacacttctttgtcttcgagcagcgcgtggaagacgtccgcaacttcgcgggcgtggagagcaccgtttcgttcctggtgttcaacgccggcgccgccgggcggaagatcgcccttgaattcgcccagacctttggcgcggggggaagcacgcctgtgctgggaatcgcgccggaggtggtcgagctggcctccggcctgaaccggatccgcaggacggtgaccctgccttccatctcagggaaggcactgtccggtgacggtgcggccgtggtctgcatatgggtgacggcgggcacgcagttcgccagccgcaccgcaggactgggcgcgcaacagggccagctgtacttcggagagttccagtgggaggcgggcccgctcgcgacgccgttcgagtggaggccgaagggggaagagctgcggctgtgccaacgctactaccaggtggatgccactggcgtgccgttcgacggtggatcgcgcttcaacgcgggcgtgggcctgatccggggcgacaacgcggtgtacctcacctaccgattcaatcagcgaatgcggtcggtacccgcggtcgccttctcgaacccatcgcaatggcggctgctcacgggagacggtgcaaccagcctgacagcgctcagtgcggcggaagttacgtcgacccgcatgaccatcatcggtgcgctgaacactgcagcagcgggtcaggccggcatcctgcagagcggagattcggcagcggagggcactggattgaccatggatgccgaaatctga

SEQ ID NO: 495059 - DNA, 330 bp, Stenotrophomonas maltophilia
atgaccgacaccttcacctggccggcaaccagccagagtactggaaccaccaccgccgccgtgaagcgcgcgaagttcggagatggctatgcgcaggccgctgccgatggcctgaacgccacttcacgcagttaccagctgcagttcgtcggcaaccgcaaaacgatcaacgagatcgtgaccttcctggatggtcatgccggccgcagcttcctgtggaaagggccactggggcaggggctgtacatgtgtgattcctacaccgacagccatctcggcggccaggtatcgaccatcaccgccaccttcgagcagaccttccacgcgtag

SEQ ID NO: 495060 - DNA, 1365 bp, Stenotrophomonas maltophilia
atgagcactacatcgcctggcagcacacggaccaccgtggaggccagcaacgcattggaaacggccatgcaggcagcaaggcgcggcatgaccgagatgaccggcaccacacaggagttccagcggcagctggagaagatcaacacggtgcagcaggccttcaatgccgtgctgaccaccagcgcatcattggtcaccgcactgtccacgcagctgaccgccctgaacacgcagctgcaggcggcggcgaaggcaggaacaaccgcagcgggcgcggacgccggcaaggctgcaaagaaggaagagaaggcccaacaggacgacaagggcctagcaggcatccgcaagggcctgggcggcgcgctcggcgactatatcggcaagaccgaaaacaccgccacggctgccaagaaagccttcgacaaagcattcaccggcgccgacgaagcgttgaggagcttcgtgaccaccggcaagtccaagtacaaggaactggcccagtccatcctgtccgacctcaagatgatcgccgcacagcaggcactggtctggggggcgaggaagatcgccggcttgatgggggtcgacctgacgcccaaggatgcagcgacggacgcggcggcggtggctgcaggcgtggcgactgccaaggacgccaaggtcggtgatgccaaggcgggcgaaaccaaggacgccaaggacaccaagggcaccacaggactttcggggttccgcaagggcttcggcagcgcgctcggcgagtacatggaaaagaccgagaactccgccaagtccacccaggatgccttttccaaggcgttcaccggcgcagaggcggcactgcagagcttcgtgaagacgggcaagtccaactacaaggatctggccaagtcgatcatcgccgatctcaagatgatcgccatccaacaggcaatcgtctggggcgtcaaaaagatcgcgggcctgttcggatatggcacgggggtggaggccaacgccaacggtggcgtctaccagtcgccgagcctgtcggcctattccggcggtgtctacaacactccgcagctgttcgccttcgccaagggcgccggcgtgttcggcgaagcgggaccggaagcgatcatgccgctgcggcgcgggccggacggccgcctgggtgtggccgcgcacggtggcggcggtggcggcggagtgggagtcagcatccgcatcgacaacaacggtggcaaggaagtcaccaccaacgaaagcatgctgcagcagttcggcaacgagatcggccagttcgtggaacgcaagtaccgcgagctgcagagtcgtgacctgaaggcaggtggtgtgctcagcaggagtgccatgcaatga

SEQ ID NO: 495061 - DNA, 258 bp, Stenotrophomonas maltophilia
atgaagcttggattgaaggcaaagcactttccaccaccgcaggtcgagctgtggccggagtgcgtgcttcccatcgaacttttctcgcgggttgccacccagtggcgcgtcggcgcaggtggcccgatcgggctggattacaacgtggtctaccgggagctggagcgcgaagcgctcgacggcgaccagcatgacgaggtgatggcggccatccgcatcatcgaacgcgctgccttggagcagatgcaacaggaatga

SEQ ID NO: 495062 - DNA, 309 bp, Stenotrophomonas maltophilia
atgttccaggtcaaggcgccggagagcttcaagagcaccctgaccatcgtcggtcacggccgcgagcagaagctcaacctgacctaccggcacctgtcggtagccgactacgccagcctgctggagcgtctgggcgatgacacgttgagcgtggcccaggccatcctggacatcgtggtggactgggatgccgatgtggcgctggacaccgccggcgtcgagctggcgctgcagcagcaggccggcctggatggcgccatcatcggtggctacacccaggccctgcaggtcgcacgcaagggaaactga

SEQ ID NO: 495063 - DNA, 660 bp, Stenotrophomonas maltophilia
atggcactcaagcttcccaagggcacccagttcggcttcgcaccggtcgtctccaccgcgatcgccaccagcgcgatctccaaggctgcgccggcgctggccagcgttgccgccaacagcgtcgacaccggcgatgtggtggtcattgaactgccgggctggccggccctgaacaaccgcgccacccgcgccggtgctgaagccaccggcagcgttgaactgctgggcatcgacaccaccgataccgtgctgttccccggcaccagcggtgccggtgtactgcgcaaggcgggcgccttcgtcgacctggaccagcagggcgacccgaccaccgccggtggcgagcagcagtactggagcggcacgctgctcgaagacccgaccggtcgccaggtgcagatgccgaccttcaagaacgccaagaccatcaccctgccgctgttctacgatccgaagaagccgtggtattcggcactgaagaacgctgacgccaagggcgagccggtgatcctgcgggccaagctggtcggtggcgacgtgctgtactggtacggctacctgagctacaacggcgacccgaccatggccgccaacaccccgatgggcaccaccgcgaccttcaccgcgctggcagactccatcctggtcgagggcgcctga

SEQ ID NO: 495064 - DNA, 357 bp, Stenotrophomonas maltophilia
atgagttacgaagcacagctgcacgcgctgctggccccgctgctgcagggccggctgtatcccgaccttccgccggaaccggtcatctatccgtgtgccgtctaccagcagatgggtggacagtccgtgtggttcaacgaaggttccattcccgaacagaagcacgctcgcgtgcagctgaccgtctgggcagacagccgcgcccaggccaacaccctgatccgcaacatcgaggatcaggtatgcgcaggattgccgaccgccgaatcgttcggcgctgcaatcgccgtgcatgagccgatgctgcacaagtacggcgcgcggctcgatttcggcctgtggtacgtcgacccgtaa

SEQ ID NO: 495065 - DNA, 351 bp, Stenotrophomonas maltophilia
atgaacgccggccacttcaatcgccgcatccgcatcgagcgccaggacggccagctcgatgcgtgggggcagccgctggacgcctggcagccggtggcagaactgtgggccgccatcatcgccgaccgcgcagacagcgtgcagcggctgacgctggaaagccgcctgccggcaacgatccggcgccagcgcttccatgtccgattggcagccgcacgacaggcaggcatccaggccggcatgcgcatcgtgcatgacggtcgtgttttcaacatcaccggcgttgcgcccgacttcagccggcgccagaccacggtgctgttcaccgaacagtcttcaggcatcgcctga

SEQ ID NO: 495066 - DNA, 513 bp, Stenotrophomonas maltophilia
atgcccctgctgacccttgagcagtgccgcgcgcactgccgtatcgacggcgattttgacgacgccatcctgggtgacctgctggccgcagccagcgacgcagccgcggcctatctgggccgcgagctgtacgccgatcaggccgcgctggaccaggcgctggaccagctgccgcaggacatggcggcggcggtgaccgggcatgaagccgcggttgccgccgccaatgccgagaccaacgcggccaaggccaaggccatgcgtgatgtggccgatcgccgcctggccgtggcgaccgcgcgcagtgcgcgcctgctgcagggcatgccggtcaacgacagcattcgtgcagcggtgcgcctgttgctgggccacctgtacgcccatcgcgaagccgtggtcgtctctgcgcagacgttcgatgcaccggcaggcgccgctgccatcgcaatggagctgccgttcggcgtggccgcgctgcttgatccgtaccgatcggcagcaacgccatga

SEQ ID NO: 495067 - DNA, 957 bp, Stenotrophomonas maltophilia
atgcctgccaacaccgaacgcttcttcgatgcgcgtaccgaacaaggcgtgctgcgcctgtccatcgcaggctcattgctgctggctgccgctgcggtggtatttggtcttctggccaattcctcgctgatcatcttcgatggcatctacggcctgatcgatgtggtgatgacgtggctgtcactgctggtcgcgcgtctgatcgcactgtccaccagcaccgacgcgctgcagtcgcggctcaaccagcgcttcaccatgggcttctggcacctggagcccatcgtgctgggggtgagcggcacgcagatgatcggcgcggcactgtatgcgctggtcaatgcggtggatgcgctgatgtccggcggccgccacatcgcactcggcccagccatcgccttcgccgggttgtcgatcatcggcgaaggtgcgctggcctggttcgtgctgcgcgccaaccgccgcatcggttcggagttcatcgcgctggacgcgaagaactgggtgatcgccgccagcatgtcggcctgctacctgctggccttccttggcggcgtgctggtgcgcggcacctcgctggcctgggtcgggccgtacatcgacccggccatccttgccttcgtctgcgtgctggtgatgatcgccccgctcgggacggtgcgccgggcgctggccggcatcctgctggtcaccccgccggaactgcaggcgcacgtggacgcggtggcacgcgcgatcgtggccaagcatggcttcgtcgagcatcgcagctacgtcgcccaggtggggcgtggcgagcagatcgagttgttcttcgtggtacgcgaggacgacccgccgcggcccctgctggaatgggaccagctgcgcgacgagatcggcgatgcgctgggcgaggcctcgccggaccgctggctgaccatcatgttcaccaccgaccgcgagtggacgatctag

SEQ ID NO: 495068 - DNA, 426 bp, Stenotrophomonas maltophilia
atgtccatcgaaaaggttctgtataccgcccaggccacctccaccggcggccgtgaaggccgttccgtctcgtccgacaacgtgctggacatccagctgtcgaccccgcgcgagctgggtggtgccggcggcccgggcaccaacccggaacagctgttcgccgctggctactcggcctgcttcctgggcgcgctgaagttcgtggccggccaggccaaggtcgcgctgccggccgacaccaccgtcaccggcaaggtcggcatcggccagatcccgaccggcttcggcatcgaggcagagctgaccatcaacgtgccgggcgtgccgcgcgagcaggtggaagaactggtgcagaaggcgcacatcgtgtgcccgtactccaacgccacccgcggcaacattgatgtaacgctgatcgttgcctga

SEQ ID NO: 495069 - DNA, 891 bp, Stenotrophomonas maltophilia
atgagccgcattgcattcatcgggttgggcaacatgggtggcccgatggccgccaatctggtcaagaacggccacagcgtgcgcgtgttcgatctggttccggccgcggtgcaggccgctgtcgacgccggcgccagcgctgcatcgtcggcgcgcgacaccctggccgatgccgaagtggtgatctcgatgctgccggccagccgccatgtcgaaggcgtgtacctgggcgacgacggcattcttgccgcgatcccggccggtgcgctggtcatcgactgcagcacgatcgccccggccagcgcccgcaaggtctcggaagcggccgccgcgcgtggcctgcagatgatcgacgcaccggtgtccggcggtaccgccggcgcccaggccggcaccctgaccttcatcgtcggcggcgaggaagacgcgctggaacgcgcacgcccggtgctgcaggcgatgggcaagaacatcttccacgtcggcgccagcggcgctggccaggtcgccaagctgtgcaacaacatggcgctgggcgtgatcatggcggtgaccggtgaagccatcgcactgggcgtggcgcacgggctggaccccaaggtgctgtcgcagatgatggcggtcagcaccggccgcagctgggccaccgaagtgtgcaacccgtggccgggcgtgctggagaatgcgccggcctcgcgtggctacagcggcggcttcggcagcgatctgatgctgaaggacatgggcctggcggtggaagcggcgatgagtgtcggcgcttcgattccgctgggcgaagtggcccgcaatctctactcgatgaaccaccaggccggccgcggcaagctggatttctccagcgtcgtgcagctcatcaccagcgaccagtaa

SEQ ID NO: 495070 - DNA, 1176 bp, Stenotrophomonas maltophilia
atgagcacggataccgctgccgacgacgcaccggtgctgttcgaagagcgcgtggctggcaacggcacgcgcatcggcatcgccacgctcaatgcgccgcgtacgctcaacggtttctcgctgccgatggcgcacctgctgctgaagcagctcaacgcctgggccgacgacgatggcatcgccatggtggtgctgcagggcgccggcgaaaaggcgttctgtgctggtggcgacctgcacagcctgtacaaggccatggtcgccttccgtgaggccggccacagcgacatccgccagaacgcctatgccgccgagttcttcgacgtcgaataccgcgtcgattacctcatccacacctacaccaagccgatcctgtgctggggccacggcatcgtgatgggcggcggcatcggcctgatgtccggcgccagccaccgtgtggtcagcgaacgctccaagctggccttcccggaaatcaccgtcggcctgttccccgatgtcggtggcagttggctgctgtcgcgcgtgccgggcaacggtggcctgttcctggccctgaccggcgcactgctcaacccgggcgatgccatctacgccggcctggccgacgtgcacgtggccgaagaacgccgcagcgcggtgttcgatgcgctgctgcaggtggcctggtccaatgacaccgcacacaaccacgaacgcctgacccatctgctgcagtcgcatgccagcgatgccgccaccggtccactgctggcccacgcggcgcaggtcgatgcgttgtgcgaaggcgatgaccttgaagccatcgtggcgcgcattgccggcctgcagaccgacgacgcctggttgcaggcggctcagaagacccttgctgccggtgcaccgggttcggcacggttggcgtacgaactgcagcgccgcagtgccggccaggacctggccgcgatctaccgcctggagtacatcgtcgccctgcattgcgccgcccatggtgatttcgccgaaggcatccgcgcgctgctggtcgacaaggaccgcaatccgcagtggaacccggccaccctggccgaggccactggcgcgtgggcagacaccttcttcgcttccccctgggccgacgccgcgcatccgctggccgacctgggcactccccttgttgaaaggagccttgcatga

SEQ ID NO: 495071 - DNA, 798 bp, Stenotrophomonas maltophilia
atgaaggattggcgtacccaggagcacgtgggcctgaaggtggaggtcgatggccacaccgccgtggtcaccctgaacaacccgccggcgcatacctggaccgtgcacagcctgtcggcgctgcgcgacctggtcggcgcgctcaacgcagaccgcgacatctacgcgctggtgatcaccggtgacggcgagaaattcttctccgccggtgccgacctcaaccagttcgcctccggcgacaaggccgctgcacgtgaggccgcgcgccgcttcggtgaagccttcgaagcgctgtccggtttccgtggcgtgtcgatcgccgcgatcaacggctacgccatgggcggtggcctggagtgcgcgctggcctgcgacctgcgcatcattgaagaccatgcccaggtcgcgctgccggaggccaccgtcggcctgctgccgtgtgccggcggtacccagaacctgccacgcctggtcggcgagggctgggccaagcgcatgatcctgctgggtgagcgcatcaatgccgagaccgcgctgcgcattggcctggccgaagaaaaggtcggcaagggcgaagccaaggcgctggcgctggaatgggcgaagaaggccggcaagcagagcccgaccagcatcgccgcctgcaagaccctggtgcagtccacccgcaccggcacccacgcctcggcgctggtggccgagcgcgaagccttcgtcgacctgttcgacaccgccgaccaggtcgagggcgtgactgccttcctggaaaagcgcgccgcgcagtggaagaacgcatga

SEQ ID NO: 495072 - DNA, 1167 bp, Stenotrophomonas maltophilia
atgagccactcgatgacgacggaactggacgaagcacagcaggcgtaccgcgaggcggcgcgcgacttcgcactggccgaactggcgccgcacgccgcgcgatgggatgcggagggcatctttccgcgcgaggcgatcgccaaggccggtgagttgggcttctgcggtctgtacatggacccggaagtgggcggcagcggcctgagccgactggacgccgccgtcgtcatcgaggagctcgccagcgtcgacccgtcgacggcggcgtacatcagcatccacaacatggcctcgtggatggtgtccacgtggggccagccggcactgcgcgatgcctggggcaccgacctgtcatcgggcaacaagctggcctcgtactgcctgaccgaaccgggcgccggttccgatgcggcctcgctgaagaccaccgccgtgcgcgatggcgacttctacgtgctgaacggctcgaaggccttcatttccggcgccggtgccaccgacctgctggtggtgatggcgcgtaccggcggtgccggtgccggcggtgtcagcgccattgcggtgccggcggacctgccgggcatcagcttcggccgcaaggaagagaagatgggctggaacagccagcccacccgtggcatcaccttcgaaaacgtccgcgtgccggtcagccaccttctgggagaggaaggcggcggcttcaagctggcgatgaaggggctggacggcggccgcatcaacatcgccgcctgctcgctgggtgccgcacagggtgcactggatgctgcgcgccgctacatgggcgagcgccgccagttcggcaaggcgctggccgagttccaggcgctgcagttcaagctggccgacatggtcacccagctggtggctgcacggcagatggtgcacaccgcggcacgcaagctcgatgccggtgccagcgatgccaacgtgtggtgcgcgatggccaagcgcttcgccaccgatgccggtttcaacgtctgcaatgaagcgctgcagatccacgggggctacggctacatccgcgaatacccgatcgagcgcctgctgcgtgactgccgcgtgcaccagatcctggaaggcaccaacgagatcatgcgggtgatcgttgcccgtcacctgctcaacaccgaagaggaactgcgatga

SEQ ID NO: 495073 - DNA, 1506 bp, Stenotrophomonas maltophilia
atgactgttgcagcgccccgtatccgcatgctgatcgatggccagttcgttgaatcggccacttcccactggcaggacgtgatcaatccggccacccaggacgtgctggcccaggtgccgttcgccaccaccggcgaagtggacgccgccgtcgccgccgccaaggaagccttcaagacctggcgcaagaccccgatcggcacccgcgcgcgcatcttcctgaagtaccagcagctgatccgcgaaaacatgagtgagctggcccacatcctcaccgccgaacagggcaagaccctgccggacgccgaaggtgatgtgttccgcggcctggaagtggtcgagcacgccgccgccatcggcaacctgcagctgggcgagctggccaacaacgtggccaatggcgtggacacctacacgatcatgcagccgctgggcgtgtgcgctggcatcaccccgttcaatttccctgcgatgatcccgctgtggatgttcccgatggcgattgcaacgggcaacaccttcatcctcaagccgtccgagcaggacccgatggtcaccatgcgcctggtcgagcttgccctggaagccggcattccgaagggcgtgctgaacgtcgtccacggcggcgaggaagtggtcaacgcgatctgcgaccacccggacatcaaggccgtgtcgttcgtcgggtccacccgcgtcggcacacacgtctacaaccgcgcctcgctggccggcaagcgcgtgcagtgcatgatgggcgccaagaaccacgccgtggtgctgccggacgccaacaaggaacagaccctcaacgcaatggtcggtgccgccttcggtgccgctggccagcgctgcatggcggcttccacgctggtgctggtcggtgaagcgcgcaactgggtgcaggacctggtggccaaggcccagaccctgaaggtcagcgccggcaccgtgtccggtaccgacgtcggcccggtcatctcctgcagcgcccgcgagcgcgtggaaggcctgatcgcctcgggcgtggagcagggcgccaagctggtgctcgatggccgcaagccgcaggtcgatggcttcgagaagggcaacttcgttggcccgaccatctttgccggtgtcaccaccgacatgcgcatctaccaggaagaaatcttcgggccggtgctggtcatcctcgaagcggaaacgctggaagaggccatcgcgatggtcaacagcaacccgaacggcaacggcaccgcactgttcacccagtccggtgctgccgcgcgcaagttccaggaagacatcgacgtcggccaggtcggcatcaacgtgccgatcccggtgccggtgccgctgttctcgttcaccggttcgcgcgcctccaagctgggcgacctgggcccgtacggcaagcaggtggtgctgttctacacccagaccaagacggtcaccgcgcgctggttcgatgacgagacgctgagccacggcgtcaacaccacgatcagcctgaagtaa

SEQ ID NO: 495074 - DNA, 1368 bp, Stenotrophomonas maltophilia
gtgaattattcagctccccagcggcaactcggcctgcgcctgctgcggctgcgcgagcagcgcggctacagccaggccgatctggcgcgtgcgctggggctgtcggccagctacctgaaccagatcgagcgcaacaagcgccccctgacaccggcggtgcagaagaagctgggagaggtgctgggcgacgtttcctcgctgttcgatgacgatgagcccgccgccctgcaggaggcgctgggcgaaaccctgcgcgacctgggcctggccgaggtcagcgcgaccgaactgcgcgccctggccggcaacctgccgcaggtcagccgcgcgctgttggacctgcaccgtcgtcacctggcgctgcgcgagcacgcggccgcactggagttccagctgggcgagcccggcgccggcagcaccctgcccgccggtgaccaggtgcgcgagttcttcaaccgcatgcacaaccacattcccgagctggacgagctggccgagcagctgttcgccgaatgggggctgtcgcccgggcatgtggcaccgcggctgcgccagctgctggccgaccgccatggcgtgctggtggaagtggccgcactgcaggccgggcgcgaaaagcggcactacgatgccggtgcgcggcggctgtggctgcccgattacctggagcccggacagcaggcgttccagatggcggccgagctggccctgcacggctacctgccgcagatcgatgcggtggtggcgcgcgccgggttcaccgatgaggcacgcatcgcgcaggcgcggatcggtctctccaactatttcgccggtgcgctggtgatgccgtacatgcgcttcctgcgtgcagccgaaaccagcagctacgacatcgaactgctggcgcaccagttcggcgtcggcttcgaagcggtctgccaccgactgagcacgctggcacggcgcagcgcgcccggcctgccgttcttcttcatccgcgtggatcgggcgggcaacgtctcaaagcgccattcggccaccgatttccacttctcgcaggtgggtggatcgtgcccgctgtggatcgtctacgaggcgttcaaccaacccgggcgcatcctcacccagaccgcgcgcatgcccgatggccgccgtcatttctggctggcgcggcaggtcagcagtggcccggtcggccatggccaaccgcgcaagaccttcgcggtggcgctgggctgcgacctgcagcatgccgaacgcctggtgtattcactggggctggatgtgcagagcccgggcaattcggtatcgatcggcccggggtgccgggtgtgcccgcgcgaggactgcatgcagcgcgcgttcgcgcagttgccggggcgatag

SEQ ID NO: 495075 - DNA, 1893 bp, Stenotrophomonas maltophilia
atgctcgggggcaagacagtggcggacaagtactgcgatctggtcatgaaaggcggcatcaccagcggcatcgtgtaccccaatgcggtactggcgctggcccgcgagtatcgcttcaagagcatcggcggcacttcagccggcgccattgcggcagcggtggcggctgcagcggcctgcggcgatcgccgccagcaggccggcgagcaactggctggcgacgccggctatggcgggctgtcggcggtgtcggcacagctgtcgcggcgcggcttcatctacagcctgttccagccggcgcgcggcgcgcgcgcggcctatcggctgctggtggtgctgaccggcaatgcccgcctgccgcacaaactgctgtgcctggccgttgcggtattcgagatcgcgccgctggaagtgctggtgtcgctggcgctgctgctcggcctgggctggtggggcggtggctggagcggcgtggccgccacgctgctgccatcactgctgtgcgcctacggtgcgggtgtggccggtgccgcgctgcgggtcgcgcgggtggcgcgtcgcaacctgctgggcctgtgcagcggcctcagccgcgatccacgcacgccggcgctgaccgagtggttgcatgaatgcctgcagcagctgtccggcaagccgctggatgcaccgttgaccttcgccgacctgcacgatgcgccgcgctacgccggtgagccggacagcccgcatgcgatcagcctgcagatgatcaccacctgcatctcgcacaacgagccgcgcacgctgccgctcggcggtgcgcagttctggttcctgcgcgaggagttcgaacagctgtttcctgccggcgtggtgcagtggctggtgacgcaggccggcccgccgctggaggtggacgggcggcagtactaccacctgccgcagggcccgaagctgccggtgctggtggccacgcgcatgagcctgagcttcccgctgctgatcagcgcggtgccgctgcatgaaccctcacgccgcgaacgacgctgcgaaccggccgcccctgcggccgaccaggagcacaacgttgccgacagcatggaagggctgaccagtgccgggcagacctgcggcccggtgatcaccgccttccgcatctgctggttctccgatggcggcatcagcagcaacttcccgatccatctgttcgacgccgccctgccgcgttggccgaccttcgccatcaacctggtctatccacagcacgccgaagcggtgagccagggcagcggcggccgccaggcgctggaacatgcggtgttcctgcccaccgaaaaccgccacggctggcaacggcattaccagtccatcgccacgccactggccgcagccgagctgggtcgtttcctgttcgcggtggtggcgaccatgcagaactggcgcgacctgctgcaggcgcgcgcaccgggttatcgcgaccgcatcgtgcacgtcagcctgcagggcgacgaaggcggcatgaacctggacatgccgcaggaggtactctcccgcatcgccgacaagggcagcctggccggtgcgcgcttctgttcgttctcgttcgagaaccactactggatccgctggcgcaacctggcctcggcctaccagcgctacacgctggaagtggcgcgcaccgatgatccggcgcagcaggtgctggcctaccgcgcggcgtacgcgatggtcgccagcggtcagccgacgccaccgtcgtacaagctgggctcggaagacaaacggctggcctcgcagcagttgtggggcttgatggtcgagcagggccgcacctgggaggacctcggcccggaccttaccgacggcgcaccgcgtccgctgccgcagatgaaggtgaccccgatctactga

SEQ ID NO: 495076 - DNA, 1050 bp, Stenotrophomonas maltophilia
atggaattcgactatctcgtcttcatcgggcgattcgagcccttccacaacggccacgccgccgttgcccgcctggccctgagccgggcccgcaagctgatcttcctggtcggctctgccgataccccccgcagcctgcgcaatccctggaccgtggccgaacgcgccgtgatgatccaggcggccctcgacggccacaccgaccgtctgctgatccgcccgctgcgtgaccacctgtacaacgaagcacagtggatcgccaacgtgcagcgccaggtggctgacgccctgcgcaacgacggtgccgccgccgatgccagggtaggcctgatcggcatggacaaggatgcgtccagctactacctgcgcgagttcccgcagtggccgctggtggacgtgcagcacaccgccaccctgtcggccaccgagctgcggcgctacctgttcgaggccggcgacgtcgacttccacggcgcgctgctgatgctgcgtggcaatgtgccggcgccggtgtacgacatgctcgaagcgttccgcaagagtgcgcctgcgtatggccagctggtggccgagtaccgcttcatcgaacagtacaaggccgcctggaaggatgcgccctacgcgcccaccttcgtcaccaccgatgcggtggtggtgcattcgggccacgtgctgctggtgcgtcgccgctcggaacccggcaaggggctgtgggcattgcccggcggcttcgtcggccaggaacagagcctgctcgacagctgcctgcgcgaactgcgcgaggaaacccgcctgaagattccgttgccggtgttgaaggggtcgctgaagggccagcaggtgttcgaccacccggaccgcagccagcgtggccgcaccatcacccacggtttccacttcgagtttccggccggcgagctgccgccggtgcgcggcggcgacgatgccgacaaggcacgctggataccggtgagtgaggccctggacatgggcccgcagctgttcgaagaccacctgcacatcctggagtacttcctcggccgcggctga

SEQ ID NO: 495077 - DNA, 1410 bp, Stenotrophomonas maltophilia
atgcactacctcgataatcttctcctcaacaccgacagctacaaggccagccattggctgcagtacccgccgggtaccgatgccacgttcttctacgtcgaatcacgtggcggcctgcacgatcgcacggtgttcttcggcctgcaggcgatcctcaaggacgcgctggcacggccggtcacccacgccgacatcgacgacgctgctgcggtgttcgccgcgcatggcgaaccgttcaacgaggccggctggcgcgatatcgtcgaccggcttggcggccacctgccggtgcgcatccgcgccgtgcccgaaggcagcgtggtgcccacccaccaggcactgatgaccatcgaatcgaccgatccggccgcgttctgggtgccgtcgtacctggaaacgctgctgctgcgggtgtggtatccagtcaccgtggccaccatcagctggcacgcacggcagaccatcgccgcgttcctgcagcagaccagcgatgatccgcaagggcagctgccgttcaagctgcacgacttcggcgcgcgcggtgtatcgagcctggaatcggccgcgctgggcggtgccgcacacctggtcaacttcctcggcaccgataccgtatcggccctgtgcctggcgcgcgcgcactatcacgcgccgatggccggctattcgattcccgccgccgagcacagcaccatcaccagctggggccgcgagcgcgaggtggacgcctaccgcaacatgctgcgccagttcggcacgcccggtgcgatcgtggcggtggtatcggacagctatgacatctaccgcgccatcagcgagcactggggtaccaccctgcgcgatgaagtgatcgcctcgggcgccaccctggtcatccgcccggactcgggggacccggtggaggtggtggccgaaagcctgcgccggctggatgaagcgttcggccacagcctcaacggcaagggctaccgcgtgctcaaccacgtgcgggtgatccagggcgacggcatcaatccggacaccatccgggcgatcctgcagcgcatcaccaacgacggctacgccgccgacaacgtggccttcggcatgggcggtgcgctgctgcagcggctggaccgcgacacgcagaagttcgcactgaagtgctcggcggcgcgggtcgagggtgagtggatcgacgtctacaaggatccggtcaccgacgccggcaaggccagcaagcgtggccgcatgcgcctgctgcgccgcctggacgatggcagcctgcacacggtgccgctgccggccaacggcgacgacaccctgccggacggcttcgaggacgcaatggtgaccgtgtgggagaacggccgcctgctgcacgaccagcgcctggacgacatccgcacgcgggcggccgcggggcattga

SEQ ID NO: 495078 - DNA, 687 bp, Stenotrophomonas maltophilia
atgcggtacctgacgatgaccgagctccaacgccccaccctgaccctgcccgccgacggcaagcgcctgctgctgcattcgtgctgcgcgccctgttccggcgaagtgatggaggcgatcaccgcctccgggatcgactacgcgatcttcttctacaaccccaacatccacccggtgaaggaatacgagctgcgcaagcaggagaacatccgcttcgccgagcagcacggcattcctttcatcgactgcgactacgacaccgacaactggttcagccgtgcgcggggcatggaaaacgaacccgaacgcggtatccgctgcacgatgtgcttcgacatgcgcttcgagcgcactgcgctgtacgcgcacgagcacggttacgacaccatcagttcttcgctgggcatctcgcgctggaagaacatggcgcagatcaacgactgcggcatccgcgccgcctcgcgctatgaaggcctgcagtactgggactacaactggcgcaagggcggcggcgccagccgcatgatcgagatcagcaagcgcgagcagttctaccagcaggaatactgcggctgcgtgtactcgcttcgcgatgcgaaccgccatcgccgcgagaatggccgcgagcggatcaggatcggcctgctgtactacgggcaggacgctgggacgccacagggcgattga

SEQ ID NO: 495079 - DNA, 627 bp, Stenotrophomonas maltophilia
atgaccgccctgcccgccgatgtcgccctgctggtgatcgacctgcagccggacttcatgcccggtggcgccttggcctgcgaccagggcgatgcgctggtggcaccgatcgccgatctgttggcgcagcgccgctaccgcaccgtggtggcgacccaggactggcacccggccgaccatgcctcgttcgccagccagcaccccggccaacgcccgttcgagaccatcctgctgcacgcgcagccgcagaccctgtggccggaccactgcgtgcagggcagcgccggtgccgcgctgcacccgggcgtggactggaccgtggccgacctgatcctgcgcaagggcacgcgccaacaggtggattcgtacagcgccttccgcgagaaccatggccccgatggcgagcgcccggccaccggcctggccggctggctgcacgagcgccgcatccgcgaagtgcacgtgtgcggcctggcccgcgattactgcgtgctgtggagcgcgcaggacgcggtgaagtccggcttccgggtgaagttcctgtgggacctgacccggccggtgaccgaagccaacgacgcgatggtgcgcgatgcgctgggcaaggcggggatcgcgaccgcctga

SEQ ID NO: 495080 - DNA, 852 bp, Stenotrophomonas maltophilia
atgcgccccgattccatcctcaccctgtcctgccccgaccgtaccggcatcgtctaccgcgtgtccggcctgctgttcgaccacggctgcaacatcctcgacgcccagcagttcggcgatgaggaaagcggccgcttcttcctgcgcgtgcatttcgaccgtgacgccggcctgccgctggagaccgtgcacgccgcgatggccacgcttgccgaaggcttcggcatggactggcagctgcatgatggccgccgccgggcacgcctgctggtgctggtcagcaagcaggggcactgcctcaacgacctgctgttccgcgcccacagcggccagctgaaggtcgacattgccgcagtggcctccaaccacgccgacttcgcgccattggccgcgtcctaccaggtaccgttccaccacctgccggtaaccgccgatacgcgtgcggtgcaggagcagcagatcatcgacctggtcgagcgcgagcgcatcgacctggtggtgctggcacgctacatgcagatcctgtcacccacgctgtgccgcgcgctggccgggcgtgcgatcaacatccaccacagcttcctgcccagcttcaagggcgcgcagccgtaccaccaggcgcacgcgcgcggggtcaagatcatcggcgccaccgcgcactacgtcaccgaggatctggacgaaggaccgatcatcgaacaggacgtggcccgcgtggatcacgccatggcgccgcgcgagctggtgcggctgggcagcgataccgaatcgctggtgctggcacgcgccgtgcgccgccatgtggagcaccgcatcctgctcaacgggcatcgcacggtggtgttccggtaa

SEQ ID NO: 495081 - DNA, 912 bp, Stenotrophomonas maltophilia
atgaacctgttgcaactgatccgcagcttcacccgcaccgcagagaccggcagcattgccgccgcggcccgcatccttggcatcagcgccaccgcagtcggccagaacatcaaccggctggaagcgcatctgggcgtacggctgctgaaccggagtacgcgccagctggcgctcagcgaggccggcgcgctgtacctggcgcaggtgcgccacatcgaggccgacctggcgcgcgcgcaggcgatggtcacctccggtgatatcgaaccggccgggccgctgcgcatcgccagcagcagcgcgttcggccgccacgtgctggccccgttgctgccgtcactgcagcaacgctacccgcagctgcagctggaactgcggctgaccgaccgcgccgtgcagcatggtccagaggcggtggatgccagcatccgcatcggcgcgcagctggaagacggcgtggtcgcacggcagctggcacgcgtaccgttcgtgttctgcgcctcgccggcctacctgaaggcccatggcaccccgcaggaaccatcggatctgggcagccatcgcgggctgctgcaccgcttccccaccgatggccggccgttgcgctggggcctgctgaaggacggccagcgtgtggacgccgcgctaccgccgagcatggtctgcgatgacatcgatgcgctggcgtcgctggcggcggccggtgccggcatcacgcggttggctgcgttcgtggccgagccctacctgcgcgatggacgcctgcaggccgtgttcggcgccgacagcacgtggcgtccggagccgatggaggtctatttctgcgtcagcgatcgccgcgacttcaccgccaagatccgcgcgctgttcgagcacctgcaggccggcatggcgccggcctggcgggtgtga

SEQ ID NO: 495082 - DNA, 1137 bp, Stenotrophomonas maltophilia
gtgcaatacgcaccccctacgtcgttcatcacccccttgagccagctgttttcgccgatctcgttcggccccctgaccctgtccaaccgcatcgtcatcgcgccgatgtgccagtactccgccgaagacggccgcgccagcgactggcacgccatgcacctgggcaacctggcgcagtccggcgccggcctgttgatcctggaagccaccgcggtcgagccgcgcggccgcatcagctgggccgacctgggcctgtgggatgacggcaccgaggccgcgctggcacaggtgctggccagcgtccgccgctggtcgccgatgccgctgggcatccagctgggccatgccggccgcaaggcatccaccgcccgcccgtgggacgggggtggccagttgccggccggcgatgcgcgtggctgggccaccgtggcgccgtcgccgctgccgttccatgccgccgatccggcaccgcaggaactggacgaagccggcatcgccgaggtcatcgccgccttcgctgccagtgcggtgcgcgccgagcgcctgggcttcgagctgatcgagctgcatgccgcgcacggttacctgctgcaccagttcctgtcgccgctgagcaaccgccgcaccgatggttacggtgggtcgctgccgaaccgcctgcgcctgctggtggaagtgttcgacgcggtacgcgcggcggtgtccgacaaggtcgccgtgggcgtgcgcatttccgccagcgactgggtcgagggtggttgggacctggtgcagagcgaagcactggcccaggtgctggacgcgcgcggctgcaatttcctgcatgtctccagtggcggcctggacgagcgccagaagatcaccgtcggccccggttaccaggtgccgttcgcggcggcgatcaaggccaaggtgcgcatgccggtgatcgccgtgggcatgatcaccgaaccggagcaggccgaatcgatcctgcgccatcgccacgccgatgccgtggccctggcgcgcggcatcctctacgacccgcgctggccgtggcatgccgccgccgcattgcgcgacagcgttgaaccggcgccgcagtacctgcgctgcgagccgcgcgatgcgcgcggcgtgttcaaggcgcgctga

SEQ ID NO: 495083 - DNA, 807 bp, Stenotrophomonas maltophilia
atgaccctgccactgaccgacttcatcgaccgcgccgagcgcctgttcgtgctgaccggcgcgggttgcagcaccgcctcgggcatacccgattaccgggacgccgacggccagtggaaacgcacgccgccggtgacctaccaggccttcatgggcgaggcgaccacccgccagcgttactgggcgcgcagcctgctgggctggcctcgcttcggcctggcccggcccaacggcacccaccaggccctggccgccctggaaagccgcggcaagctgcaggtgctgctgacccagaacgtggacggcctgcaccagcgcgccggcagccgcaacgtgatcgacctgcatggccgcctggatctggtgcgctgcatgggctgcgagcgccgcagtggccgcgaggatttccagcagcggctgctggacgccaatcccggctgggacgcgctggaggccggcatcgccccggatggcgacgccgacctggagaccgatttctccacgttcgtggtgcctgattgcccgcactgcggcggcgtgctgaagccggacgtggtgttcttcggcgagaacgtgccgcgcgagcgggtggcggcggtgcacgatcatctgcagcaggccgatgcagtgctggtggtgggctcgtcactgatggtctattccggcttccgcttcgtgcaggcggcggcgaaggcagggttgccggtggcggcgctgaaccgcggccgcacccgtgccgacgacctgctgttgttcaaggatgagcgggactgcgctgaagccttgtccggttgggtggcgggctga

SEQ ID NO: 495084 - DNA, 402 bp, Stenotrophomonas maltophilia
atgaccccgatccccgagaccgtgccgcccaccgaagtgcgcatggctgaaatcgtcttccccaaccacaccaaccacctgggcaccctgttcggtggccaggcattggcatggatggacaaggccgcgttcctggccgccgcccgctattcgcgccgcaccgtggtgaccgcgcgcagcgaccaggtcgacttcaagctgccgatccgcatcggccagatggtggaaaccatcggccgcatcgtcgaagtcggccgcagctcgatgaaggtcgaggtggaactggtcgccgaggacctgcacagcggcgagcgcaagctgtgcacccgcggccacttcgtgatgatcgcgctggacgaggaaggccacccgatcgcggtggcgccgctgccggccgcctga

SEQ ID NO: 495085 - DNA, 636 bp, Stenotrophomonas maltophilia
atgcccgccacttccgacctgctggccttcgcgctggtttcgctggccatggtgctcacgcccgggccgaacatgatctacgtcatctcgcgctcgatctgccaggggccgatggctggcctgatctcgctgggcggggtggcgctgggctttgtgttctacatgctgtgtgcggcactgggtatcaccgccctgctgatgaccgtgccgttcgcctacgacgcgctgcgcatcggcggcgcgctgtacctgctgtacctggcctggcaggcgctcaggcccggcggccgttcgccgttcgcggtgcgcgacctgccgcaggacagcccgcgcaagctgttcacgatgggcttcctgaccaatctgctgaacccgaaggtggcggtgatgtacctgtcgctgctgccgcagttcctgcacccggacggcgaaggcagcgtgctgatgcagtcaatcgtgctgggctccacccagatcctggtcagcgtcagcgtgaacggcatgatcgcgctgaccgccggcagcatcgccggcttcctggccgcgcgccccacctggcagatggtgcagcgctggctgatgggcacggtgctggccgggctggcggtgcgcatggcggtggaagggcggcgctga

SEQ ID NO: 495086 - DNA, 1020 bp, Stenotrophomonas maltophilia
atggccgacaagcccaagcagatgctgctcgatcccggttttgaactgaccctgcgcccgatgcgctacccgcagttctatgacatgtaccggaatgcgatcaagaacacctggacggtggaagagatcaacttccagatcgacatcaccgacctgcacagcaagatgtcgccgggtgagcgccacctgatccaccgcctggtcgcgttcttcgccaccggcgattcgatcgtgtccaacaacctggtgctgaacctgtaccagcacttgaatgcgcccgaagcgcgcatgtacctgtcgcgccagctgtatgaggaagcactgcacgtgcagttctacctgaccctgctggacaactacctgccggatccggaagagcgcgccaaggcgttctcggcggtggagaacatcgactcgatcaagaagaaggccgatttctgcttcaagtggatcgactcgatccaggacctgacccgcatcgagacccgcgaacagcgccgccagttcctgctcaaccagatctgctttgccgcctgcatcgaaggcctgttcttcttcgctgcgttcgcctacgtgtactacttccgttcgcgcggcctgctgccgggcctggcctcgggcaccaactgggtgttccgcgacgagagcgcgcacatggagtttgcgttcgagtcggtgcgcgtggtgcgtgaggaagagccggacctgttcgacgacgagatgaagcagcaggtctacgacatgctggccgaagccatcgaatgcgaagtgcagttcgccgaggacgtgttgtccggtggcgtggccggcatctcgacccgcgacatgcgccagtacctgcagcactgcgccgaccagcacttcgccaagctgggcatggaaaagaagtacaacgtgcgcaacccgctgccgttcatggaactgcaggacgtgcaggagctgaccaacttcttcgaacgccgcgtctcggcctaccaggtcggcgtgcagggcgaagtcgccttcgacatgaacttctga

SEQ ID NO: 495087 - DNA, 2403 bp, Stenotrophomonas maltophilia
gtgagcaccgaatccagcgccaccatcgagaaggaaagcgaattcctgttgacgtcgccgccgacggccaacgcgatgagtgtgaccaagcgcaatgggaccaccgaactggtggacctgaacaagatcgtgcgtgcggtgcagcgttcctccgaaggcctgcacgccgtcgacccgatgcgcgtggccacccgcaccatttccggcctgtacaacggtgccaccacccgcgagctggacgaactgtccatccgcaccgccgccctgctgatcggtgaagagcccgagtacggccgtctcgccgcgcgcctgctggccaactacatcgccaaggaagtctcgggccaggaaatctacgccttctcgcagtcggtcagccgtggccatgaagtcggcctgatcaacgaccgcctgctgaacttcgtgcagaccaacgcacgcaagctcaacgatgccatcgacatctcgctggacctgaacttcgattacttcggcctgcgtaccctgtacgaccgttacctgctgcgccacccgcacacccgcaaggtgatcgagaccccgcagcagttcttcctgcgcatcgccagtgcgctgagcgaggacgtgtccgagaccctggcgctgtacaagcgcatgggcaacctggactacctgccgtccagcccgaccctgttcaattccggcaccacccacgagcagctgtcctcgtgcttcctgctggactcgccgcaggactcgctggaatcgatctattccaagtacggcgacatcgcccagctgtcgaagttctccggcggcatcggcgtcagctacacccgcgtgcgttcgcgtggttcgctgatcaagtcgaccaacggccattccaacggcatcgtgccgtggctgaagaccatggattcgtcggtggccgcagtgaaccagggcggcaagcgcaagggcgcggcctgcgtgtacctggaaacctggcacgccgacatcgaggacttcctcgagctgcgcgacaacaccggtgacgaagcccgtcgtgcgcacaacctgaacctggccaactgggtgccggacctgttcatgaagcgcgtcgaagccgaccaggaatggtcgctgttcgatccgcgcgtcgtgccggagttcaccgacctgttcggcgaagccttcgagcaggcctacctgcaggccgaagcccagggcaaggccaaccgcaccatctccgcgcgcaagctgtatgcccgcatgatgcgtacgctggccgagaccggcaacggctggatgaccttcaaggacaagtgcaaccgcgccagcaaccagaccctgcgtccgggcaacgtgatccacctgtccaacctgtgcacggaaatcctggaggtcacctccaacgatgaaaccgcagtgtgcaacctgggttcgatcaacctgggcaaccacttcgacgagcacaacgagttcgacttcgagaagctggccgagaccgttcgcctggccgtgcgccagctcgaccgtgtcatcgacctgaacttctacccgatcgagaccgcccgccgcgccaacctgcgctggcgtccggtcggcctgggctgcatgggcctgcaggacgtgttcttccgcaagcgcctgccgttcgacagcgccgaagcccgcgccctgtcgaagaagattgccgaagcgatctacttccacgcgctggaaacctcctgcgagctggcccaggaacgtggcaagcacccgtcgttcaacgacacccgtgccgccggtggcgaactgcagttcgacgcctggaacgtggtgccggaagacaccgcgcgctgggatgccctgcgcgcccgcatcaaggaacacggcctgcgcaactcgctgatgatcgcgatcgccccgaccgcgaccatcgcctcgatcgccggctgctacgagtgcgtcgagccgcaggtgtccaacctgttcaagcgcgagaccctgtccggtgacttcctgcaggtcaaccgttacctggtgaacgagctgaagaagctgggcctgtggacgccggaaatgcgcgatgccatcaagctggccgaaggctccatcgcgggtctgccacagatcccggaaacgctgcgcgaggtctatcgcaccgcgtgggaactgccgatgcgttcgctgatcgacatggccgccgaacgtggcgccttcatcgaccagtcggcctcgctcaacctgttcatggaaagcccgaacatcggcgcgatgtcctccatgtacatgtacgcctggaagcagggcatcaagaccacctactacctgcgttcgcgcccggccaccaagatcgccaagaccacggtcagcgctgcggccccggccaaggtgttcagcccggacgaagccatcgcctgctcgctggaaaacccggaagcctgcgaggcctgccagtaa

SEQ ID NO: 495088 - DNA, 837 bp, Stenotrophomonas maltophilia
atgcgcctgtcagcacccgccttggccctgctggctgctgtggtcaccgtacctgcaattgccgctgacaccccgaagctgcgcgcggaccagtgcggtatccacaccgactatgacgtgctggtggacagcggtggcatctggctgcggcatggcccgcaggcaccgcacgaggtggtgttccacgatggcgtgctgagcctggacgacacggtcgtgccggtcagcgaggccgacgcggcccgccttcggcagatggaggccggggcacggcagctgatgccggccgccacggcgctggcccatgaagtgagcggactgagcttcgacgtgctcgacggggtctatgaaagcctcaccggtaccgccaacagccgcaaggtccggcgcctgcgccggcaggccgatgactggatcggcggcacgctgggcaagggctactgggaacaggctgtgttcgggccaggcttcgaggccaaggtgcaggacatggccgagtcgctgtccgcctccatcgcccgcagcatgctgtggcagatcttcaccggacgcagcgatgcgatggaggcacgcgccgaccgtctggacgcgcagatggaacagcagctggaaggccgcgccgaacgcatcgaggcccaagcacagtcgctgtgcccgctggtgcagtcgctggccgacacccatgacgcgctggaagtgcgctaccaaggccaaccgctgcggctgctggagcgcagcgagagcgtacgggtggagcacggcgatggctcgggcctgcaggtgtcggccgggccggatgagcggccgcgtgggaatgcggtggcgccttcccgatag

SEQ ID NO: 495089 - DNA, 1101 bp, Stenotrophomonas maltophilia
atgagtgcacccgagctgaccccgtcgcagcggtatgcggaaggggttgcccgtggcgactggcagaacgatccggcccagcatgcggcgctggccgagctggaccgcatccacctgggcctgctggacagtgccgaggatggctggctggaccgcctgtcttcgttctggaagaagcccgagccggtcaagggcctgtacttctggggcggcgtcggccgtggcaagaccttcctggtcgacctgttctacgacgggctgccgatcaagcagaagtaccgcacccatttccaccgcttcatgcgcagcgtccatgagcgcctgcgcgagcaccagggccagagcgacccgctggcgaagatcgcccaggaatggcgcagcaacctgcgcgtgctggtgctggacgagttcttcgtcaccgacatcggcgatgcgatgctgctggcgcggctgctggagcggctgttcgccgagggcgtgaccctggtcaccacctccaacaccgcagtggagaacctgtacctcaacggcctgcagcgcgagagcttcctgccggccatcggcctgctgcagcgcttctgcgtcgagctgtacgccgaaggtaccgaggattaccggatgcgcgcgctgacccgctcgccggtataccgcgcaccgctggcggccgacagcgacgactggctggccacgcgctggaacgagctgagcggcggccagccggccaagcccggcaacatcgagatcgagggccgcaagatcccggtgcgtggccgcggcaagagcattgcctggttcgatttcgccgcgctgtgcgaaggcccgcgcgggccctcggattacatcgagatcgcgcacgagttcaacacggtgctgctgggcggcattcccgccttcgaccgcttgaatgaggatgccgcgcgccgcttcgtcaacctgatcgacgagctgtacgaccgccacgtcaacctggtctgcaccgccagcacctcgccgatcgagctgtacaccggccagcgcctgcagggcgcgttcgaacgcaccgcctcgcgcctgatcgagatgcagagcgccgagtacctgggtaccccgcaccgggcgtga

SEQ ID NO: 495090 - DNA, 672 bp, Stenotrophomonas maltophilia
atgcacaagcccttgttccccgttgcccccggcgaaaccgcctgcctcgaactggacggcccggccggcccgctggaagtggtcgtcgacctgcccaaggccgatgtgccggtgcagccgatcgtggccatcgtctgccatccgctgtccaccgaaggtggcaccctgcacaacaaggtggtcaccatgaccgcctccaccctgcgcgagctgggcatcgccacggtgcgcttcaacttccgcagcgtgggtggttcggctggcaccttcgatggcggcgtgggcgagcaggatgacctgaaggccgtcgcggcctgggtgcgcagccagcgcccggacgaccgcctgtggctggccggtttcagcttcggcgcgttcgtgtcgctgaaggccgccgccacgctgcagccggaagcgctgatctcgatcgcgccgccggccggtcgctgggatttcgacggcatcgcgccgccggcgcgctggctggtgatccagggcgagcaggacgagatcgtcgacccgcaggccgtctaccagtggctggactcgctggatttcccgcatgagctggtgcgcatgcccgagaccagccacttcttccaccgcaagctgatcgacctgcgcggcgcgctgacccacggcgtcaagcactggctgggcgcggcggcatga

SEQ ID NO: 495091 - DNA, 858 bp, Stenotrophomonas maltophilia
atgctctatctgtcactggccgtgatctgcagtgtgctggtttcggtgttgttgaaggtggccgcacgccgccagctggatgttgcgcagatggtcacctggaactatctggtagcggcaacgctcaccgccgtggtgctgcagccaccgctggatgcgctgcgcgcgccgcatgcgccgtggctgtcactgctggcgctggcggtggtgctgccctcgatcttcctggtactgggccgcgcggtggcggtggccggcatcgtccgcagcgacgtggcgcagcggctgtcgttgctgctttccctggccgccgccttcctgtgcttcggccagaccgcaacgccctggaaactggccggcctgggcctgggcctgctggcgatggtggccatcagcctgcgcccgcgcggcccggcggtggcgtcctcacccggcggctggggctggctgctgggcgtatgggccggattcgcagtggtggacgtgctgctcaagcaggtggcgctgtccggcacgccgtcgatggcggcggtgctggccagtttcagcgtcgccttcgtgctgatgctggcaatgcagctgtggcggcatgtcagtggccgcagccgactggcctggcgcaacctcggcgcgggtgcactgctgggcctgctcaatggcggcaacatcctgttctatgtgcatgcgcaccaggcgatgccagagagcccggccaccgtgttcgccggcatgaacatcggcgtggtggtgctgggcgcgctggtaggcatgttcgtcttcggcgaggccaccacgaagtggaaccgcgcgggactggcgctggcggtgctggcgatcgggatgatcgcctgggggtga

SEQ ID NO: 495092 - DNA, 1446 bp, Stenotrophomonas maltophilia
atgcgccgccgttccctcgcccttgccctgtccctgctgctgccggccggcgcctttgcccaggcccagccgcaggccacgccggtcgcgccgccctccgtcgcgcgcggcagcgccactgtggtgctgaccgctgcgccggccgactggcgcgcgctggatgggcagcgcgtgcgcatcgccgcgccgcttaccctggccggtaccgatggcctgcagcacttcggccagctcacggtggcgttcgatggccgcctctggcagccgaccgaagtggccgcgccgggcactgccggctatgagcaggtgatggccgacaaccagcgccgccgcctggtgctggaggatggcagcgatgcccgcgaccccgccagcgtgccctacctgccgggcaacccggtgctgcgcaccggcatgcaactgcgcaatgtggagggcatcgtgcgcgtggacgcgcagggccatccgcgcctgcaggtcgaaggcgcgctgaagctgccggaactgaagcgcccggcagtacccacggtgccgggaagcctgcacgtggccgccttcaacctggagaatttcttcaatggtgacggccagggcggtggcttcccgacgctgcgcggcgcgcgcacgctggacgagcacaaggcgcagctcgccaagctggtcaccacggtcaatgcgctgggcgccgatgtcgctgcgctgatggaactggagaacgacggctacggcccgcagtcggccatcgccgaactggtcgatgcgctcaaccgcgaccgcggcgcgcagggcgactggcgcttcgtcgacgccggcaacggccccggcgacaacccgatccgggtcgggatcatctaccgaagcacgcgcctgcagccggtcggcaagccggccacgctgaccggcggcccgttcgtcgagcacagccgcgtaccgttggcgcaggccttccagggcaagcagggcgcgccgtttgtggtggttgccaaccatttcaaatcgaagggttgccgtgacgcggccggtgccgacgccgatcgcaacgacaatcagggctgctggaacgccacccgtgtgacgtcggcgcagcagctgcacgcctggctgcagaccgatccgaccggtaccggcgccagggacgcggtgctgctgggtgacttcaatgcctacgcgatggaagacccgatccgcgccctgcatgatctgggctggcaggacgcgttcaaggtggccaaggtcgagcatccctacagctacgtctacaacggctacaccggccgtctcgaccacgcgctgctgaacccgggcatggccaggcgcctgcgcggtgccgccgaatggcacagcaacgccgacgagcaggacgccagcggctaccagggccgcaacgtgcagggcccgtggcgcagctccgaccacgacccgctgctgctgggcttcgacaagtaa

SEQ ID NO: 495093 - DNA, 519 bp, Stenotrophomonas maltophilia
gtgcggaattacgatctggagttcctgaaacgcttctccatggtgatcgcgctgctggcgaccatcaccctcggcctcatcctccttgccgcctacatccacacccggattccgcccgaggtgtcgccgaccgcggccaagcgcactgaacagcgcatctcgcccaccggcgcggtctatgccggcagcaccggcgccgccgcgcaggccgcggccaaggccgccgcgctggccaaggcggcgtcgcaggtggcctacggcggcaccaaggatggcaaggtgatcttcgacaacctgtgcaccgcctgccacaccaacggtgtgggcatggcaccgacgctggaccattcgcattgggacaagcgcatcgcgcagggcaaggacaccctctacaagcacgccatcgagggctataccggccccgacggcgggatcatgccgcccaagggcggcaacccggcgctgaccgaagaacagatccatgccaccgtggactggatgctgggcaacctgaagtaa

SEQ ID NO: 495094 - DNA, 618 bp, Stenotrophomonas maltophilia
atggcctataaacgctctgcattgatggaagaacgcctggcgggcgcccgtgaacggatcctgctggccacccgcgagctggtcgccaccggcggctggcgcaacgccccggtgaccgccgtggcgacccaggcgggggtgtccaccggcctgatctatcgccacttcccgtccaaggccgagctgttcgtggaggtgctcaacgccgcggtggcccacgaggtcgcgatcatggagcgcatcgccagcggtccggaggtggccagcgagcgcctgcggctggcaatcaccgccttcgtccgccgcgccctggccgggccggggctggcgcacgccttcatcgtcgaaccggtcgatccggacgtggaggccgagcgcatgcgcggacgtcgcgcgttcggcgacgtgttcctgcggctggtggaggaaggcgtggccgccggtgagctgccggcgcaggacgcgcatgtggccgccgcgtgcctggtcggcgccttcaccgaggcgatggtcggtccgaccgcgcccagccgcgaagcgcaccgcgacgaagacgcgctggtggatgcgatctgcagcttctgcctgcgcgcgatcggtgccccggtaatccggtag

SEQ ID NO: 495095 - DNA, 1164 bp, Stenotrophomonas maltophilia
atgcacgtgccatccctgaacttcgatcttggcgaagacgtcgacctgctgcgccagagcgtggcccattttgccgccgccgaggtcgcaccgctggccgccgaggctgatgccagtaaccagttcccgctggccctgtggccgaagctgggcgaacagggcctgctcggcctcaccgtggaagaagaatacggtggtaccggcatgggctacctggcccacgtggtggcgatggaagaaatctcgcgcgcctccggcggcatcggcctgtcctatggcgcgcactccaacctgtgcgtgaaccagctgcgcaagaacggcaacgaagaacagaagcagcgcttcctgcccggcctgtgcaacggcagcctggtcggcgcgctggcgatgagcgaaccgggtgccggttcggatgtggtgtcgatgaagctgcgcgccgacaagcgcggggaccgctacgtgctcaacggcaacaagatgtggatcaccaacggcccggatgccgacgtgctggtggtctacgccaagaccgacatggaggccggtgccaagggcatcaccgcgttcctggtcgagaagggcatgaagggcttctccaccgcgcagaagctggacaagctcggcatgcgctcctcgcccacctgcgagctggtgttccaagactgcgagattcccgaagagaacgtgctgggccaggtcggcggtggcgtgcgcgtactgatgtccggcctggactacgagcgcgtggtgctgtccggtggcccgctgggcctgatggccgcagccatggacgtggtcatgccctatgtgcacgagcgccaccagttcggcgaaccgatcggcagcttccagctgatccaggccaagatcgccgacatgtacgtgggcctgggtgcctgccgcgcgtatgtctatgccgtggcgcgcgcctgcgaccagggccgcaccacccgccaggacgccgccggtgcgatcctgtacgccgccgagaaggccacctggctgaccggccaggcgatccagatcctcggcggcaacggctacatcaacgaatacccgaccggccgcttgtggcgcgacgccaagctgtatgaaatcggcgccggcacctcggagatccgccgcatgctgatcggccgcgaactgttccagcgcaccctgtaa

SEQ ID NO: 495096 - DNA, 1611 bp, Stenotrophomonas maltophilia
atgaccgtcctgaacagccagctgcaaccaggcagcgaaacgtttgaaagcaaccgcgcggccatgcaggccgtggtcgacgacctgcatgccaccctcgcgcgcactgcgctgggtggcagtgaggcggcacgcgccaagcacaccgcgcgcggcaagctgctggtgcgcgatcgcatcgacgccctgctcgaccccggcagcgccttcctggaaatcgcgccgttggccgcgcacggcatgtatgaagacgccgtgcccgccgcgggcgtggtggccggcatcggccgggtgagcggcgtggaatgcgtgatcgtggccaacgacgccacggtcaagggcggcacctactacccgatgacggtgaagaagcacctgcgcgcgcaggagatcgccgagcagaaccacctgccgtgcatctacctggtcgattccggtggcgcgttcctgccgctgcaggacgaagtcttccccgaccgcgaccatttcggccgcatcttctacaaccaggccaacctgtcggcgcagggcattccgcagatcgcctgcgtgatgggcagctgcaccgccggtggcgcctatgtgccggcgatgagcgacgagaccgtgatcgtgcgcgagcagggcacgatcttcctcggcggcccgccgctggtgaaggcggccaccggtgaagtggtcacggccgaggaactgggtggcgccgacgtgcacacccgcatctccggcgtggccgaccacatggccgacaacgatctgcaggcactggcacgggtgcgcgcgatcatcgcccagctcaactggcgcaagccggaaccggcgatggcggtgcgggcccctgaagcgccattgctgccggcccatgagctgtatggcgtgatcccggccgatacgcgcaaaccctacgacgttcgcgaagtgatcgcgcggctggtggatggctcgcgcttcgacgagttcaagccgcgctacggcgcaacgctggtgaccggtttcgcccatctgaacggctacccgatcggcatcatcgccaacaacgggatcctgttctccgagtcggccttgaagggcgcgcacttcatcgagctgtgcacccagcgcaacatcccgctggtgttcctgcagaacatcaccggcttcatggtcggccgcaagtacgaacagggcggcatcgccaaggacggcgccaagctggtgatggcggtggcctgtgccagggtgcccaagttcaccgtggtgatcggcggctcgttcggtgccggcaactacggcatgtgcggccgtgcgtactcgccgaacttcctgtggatgtggccgaacgcgcgcatcggcgtgatgggcggcgagcaggccgccagtgtgctggccacggtcaagcgcgatggcattgaagccaagggcggccagtggccggcggcggaagaggatgccttcaaggcaccgatccgcgaccagttcgaacagcagggccacccgtactacgccagcgcgcgcctgtgggacgacggcgtgatcgatccggccgacacccgccaggtgctggcgctggcgctgtcggccagcctcaacgccgccccgcagcagacgcgcttcggcgtgttccgcatgtga

SEQ ID NO: 495097 - DNA, 1998 bp, Stenotrophomonas maltophilia
atgaagcacgttgccatgttcagcaaagtcctgatcgccaaccgcggcgaaatcgcctgccgcgtcatcgctacctgccgccgcctcggcatcgccaccgtggcggtgtattccgatgccgaccgcaacgcacgccacgtgcgcctggccgatgaagccgtccacatcggcccggccgccgcacgcgagagctacctgcgcagcgatgccctgcttgatgccgcgcgcgctaccggtgcacaggccatccaccccggttacggcttcctgtccgagaatgccgacttcgccgatgcctgcgccgccgccggcatcaccttcatcgggccaccgcccagcgcgatccgagcgatgggtgacaagagcgcggccaaggcgctgatggccaaggccggtgtgccgctgacgccgggttaccacggtgaccagcaggcgccggacttcctgcgcgcgcaggccgatggcatcggctatccggtgctgatcaaggccagcgccggtggcggtggcaagggcatgcgcaaggtcgaacgcagcgaggacttcgtcgatgcgctggccagctgccagcgcgaggcggcctcggcgttcggcaacgaccacgtgctggtcgagaagtacgtcgagcgcccgcgccatatcgagatccaggtgttcggtgacagccacggtgaggcggtctacctgttcgagcgcgactgctcggtgcagcgccgccaccagaaggtgctggaagaagcgcccgcgccgggcatgagcgcggaacgtcgtgctgcaatgggcaaggccgcggtcgatgccgcacgcgcagtgggctatgagggtgcgggcacggtggaattcatcgccggcccggacggcgatttctacttcatggaaatgaacacccgcctgcaggtcgagcacccggtcaccgaatacatcaccggcaccgacctggtggagtggcagctgcgcgtggcttcgggccaaccgctgccgctgcgccaggaccagctggccatccatggccacgcgatcgaagcgcggctgtacgccgaagatgccgatcgtggcttcctgccctccaccggcaccctgcgccgcctgcgcctgccggcagcgtcggccaacgtgcgcgtcgataccggcgtggaggaaggtgacagcatcaccccgtactacgatccgatgatcgccaagctgatcgtctgggacgtggaccgcgacgccgcgctgcgccgcatgagccaggccctggccgactgccaggtggtgggcgtgaccaccaacgccggcttcctgcgccgcctggtgaataccgattcgttcgcgcacgccaggctggatacggcgctgatcgaacgcgaacaggcggcattgagtgccgtgggcgacgcgggtgcggacctgtggctgctggccgccgtggctgcggtggcaagcacggtgcccgccagcaccgacgtgcgcgatccgcattcgccgtggcggtcacaggatggctggcgcctcggcgcgtccgcgccgcgcgtagtgccgctgcagcagggcgaacgcaagcacacgctgaaggtgtgggcgcaggccgatggctggcgcgtgcagtgcgatgacgctgcaccggtgcggatgatcggcacggccgatgtgcacggcctgacggtgcagctgggcgagcgccgcgggtcgctgcagctgctgcgcgacggtaaccagctgtacctgttcggcgccgacggccagcaccgcttcaccctgcatgatccagtgggtgaatcggaccacgccgtggccgacgccggcagcctgctggcacccatgccgggcaggatcgtggccacgctggtcgcggccggtaccgaggtcaagcgcggcacgccgctggtggtgctggaagcgatgaagatggagcacacgctgcaggcaccggcggacggcacggtgaagggttaccgcgccaaggccggcgaccaggtggttgatggtgcggtgctggtggacttcgaagcggcgtga

SEQ ID NO: 495098 - DNA, 1167 bp, Stenotrophomonas maltophilia
atgcgcctgcgccgctgcgccagcctgatgttcgagcctcgcgaggcggtcaccctggacctgcgtgcgatgctggccggccacgccgagatggacagccagatcagctgggtggcgctggccgcccacctggaccagccactgccggtggacgccgaggagcgccagctgctgggcgggctcagcgcgcaccgctggagcgaaccgcccgccgatgcctgcccggccatgctggcccgcctggtcgaacagggcctgctgttgaccgacccaccgagcgaggttgggtaccagatgcgcgacgaggcgctgcggcgcagccagtggtggccattggctgcgctggcccatcgccatgcgcgctggcaggccgtggacagcgtggaggacatgcgccggcaggggttggacaccgcggccggcctgcgccagcgcctggggccgccaccgccggtggtgcagccgatgcagggcgactaccagccgctgccgcgcagcgaagaggccgcgttcgatgcactgctggcgcgtcgcaccacctgccgcaatttcgacccgcagcgcgcgttgccgctgccactgctggcccaggtgctgcagcggacgttgatggcgcacgcggtgcagaaggtcgagcgcgataccgagttcctgaagaagaacgtgccttccggtggcggcctgcatcccaccgagggcttcctgctggtgcagaacgtggaaggattggcaccgggcttgtaccactatcatccggtgcagcacgccgtgctgccgctgccctcgccaccgccgcaggcgttgcctgcgatggcgcggcggatgctgtccgggcaggcgtggttcgccgatgcgccagcgctgctggtactggcaccgcgttatgaccgctgcttctggaagtatcgcaaccatgccaaggcgcaccgtgcggtgacgctggacgtgggccacatttcgcagttgctgtacctgtgcgccaccgagcgcgggctggcagcattcgtgacagcggcgatcaacgatgccgatgtcgatcgtgcttttgggttcgatggcatcggccagagcgcgatggccatctgtggcctgggctggcgcagtgccacgctggacacggccgaattcgatcccgctggccgggtggtggcgggcgacgaccgctga

SEQ ID NO: 495099 - DNA, 294 bp, Stenotrophomonas maltophilia
atgagccatccccgtctttccgccgccgacgccagcaccctgctggaccacctgatcggcagcgaagcgttccgcagccacttcaccgcttcgccggccaaggccctggcctcgatcgggctggacggtgccgttggcgaaaacgactgcatgaagatcggcaccctggcctcggtcgaggaactgagccgggtgcgtgatgggctgcaggcccacctgtccgggtcggtagcggccatgaccgtggtgttctgcttcgaagccggcaaggtcggcgaacgcatcgacggctga

SEQ ID NO: 495100 - DNA, 2493 bp, Stenotrophomonas maltophilia
atgaatggcgacaacggaacgtcagccccgcatagcccacagctgcgcgccctgctgttcaccgatctgtgtgattcgctgcagctggtcgagcggatcggcgatgtggcggcggcaagcctgttccaggaacacgatcgcctggtactggtgctgcagcagcgctggaacggccagctgatcgatcgctccgatggcttgttcatgctgttcgagcgcgtcgtcgacgcactgggcttcgccctggactaccagcgcgaactgcacgcgctgggccagcagcgcgcgattgaactgcgcgcgcgcgccggcctgcacgtgggcgacgtgctgacctgggagaacagtgccgaggcggtccgtgccggtgccaagtcgatggaggtggaaggcctggccaagccgatggcggcgcgcctgatgatgctggcccgccccggccagatcctgctgtcggcggtggccgaatcgctgacccgccgtgccaccgatgcactgggcgagcgtggcacgcgcctgctgtggaaatcgcacgggcgctggcgcttcaagggcgtgccggtggtgcaggaagtgatcgaagtgggcgagatcggttcggcgccgctgcgcatgccgcgcgccaacgccaaggcgcgccgcgacctgccgctgtggcggcaaccgctggtgctggccgccgaaggcctgatccttgccgcggccgtgctgggcggctggctgctgctgcggtcggagccggccattgccttcgccgaacgtgactgggtggtgcttggcgatgtcgacaacctcaccggcgatccgatcttcgatgactcgatgcggcacgcgatccggatcgcgctggaacagtcgcgctacgtgaacgtgctgtcggaaggcaagatccgcgaaagcctggaaatggcgcggctttcgggcgatacccggctcaaccgcgataccgcggtcgatgtggcggtgcgtgagggcgcacgcgcggtgctgctgccgaccgtgcggcagaagatcggtggctacgagctggccatcgatgttgccgcaccgggcagtggccaggtgatccagaccttcaccgccaccgccgatcgatccgaccagatggtgttcgccgtggacgacgtggtcggtcgcctgcgtcgcggactgggcgagtcggtggccagcctggagcaatccctgccgctgccgcgcgcctcgacccaggacctgcgcgcactgcgtgcgttcgcgctggccgagagcgcactgggtcagcgtcgcttcgaagaagcacgcaacctctaccaggccgcgatcgacatcgatcccggttttgccctggcctacatgggcgtggccaagctgcatgcgcgcgtcgaggaagggcggcgcgcgcgcgaagccatgcagcacgcgctggacctgcaggatcgcctgccgccacgcgagcggctgtacctgaaggcctggatggccgagctggagcccggtggctggccgctggagcactggcgcacgctggccaaggtctatccggattcgttcgcggggctgtccaacacgtcctggtacctgttgcaggccaaccagttcagcgaggccgaaccctatgcgcgtgcggctgcggtgccgcaggatccgctgcgcctgtatccgctggtccacctggtgcggatacagatcgccgccaaccagccgcagcttgcggccgggacgctggcccaggcacaggtcctgcgcggtcgtgatgatgtcgatgagaccggcgtggacgtgctggtggcgcagggacagtatgcgaaggccgcgcagctgctgccgcagatccgtgccaccgatgccctgcagcagcgcatgaagctgcgcgcgcagctgctgctggcggccgcgcagcgcgattgcgcggccatgcagcaggcggtacgcgaagacgcaccggcgccgacgctggccgacttccaggtgcagcagcgactgcagcacgccagcgtatcggcgctgtgcggcacggcggaccggaccggactgcaggccatcgccgcactgctgcagccgatgctgcaggagcgcgatgatcccatgctgcatgcgcgtgtcctgcaatggctggcgctggtgcacctggcccagcgccagggccagttcgatctggccaggcgctggctggacgagcagcggccgctgctgagcagcctgcgtagtccagtcgcggaacgctggctgcgcatcgtcagcgcggaggatcaactgcagatgcagcgaccggatgccgcccgcaccctgatcgagccgatgctcgacggcaacgagccggtgcaggcccacgtggtgctgctgctcgcgttgcgtgcgcagggcgacgccgccgccgtccgccgccagcaggcctggctggcccagcaccggggccgggcgattgccgaggtcaccgcgctgcaggtgtggcaaccgctgaacgtgcatgacgtctccacgtgggcgacgccggccacggccggcgcaccgtga

SEQ ID NO: 495101 - DNA, 1041 bp, Stenotrophomonas maltophilia
atgaccggcaggggtgcggccgagaacagtgatgtgacgacaggtatcgcccgggtggcgatggccgagatcgtgcacgctctgttgtccgatgccgaggtggcattgttcgccagattcgcccgcgcatgcaagctccgtgccggacagtggctgttccagcgtggccaccgcggcgagcgcatgtatgtgatcctcgaaggccagatcgaactggacttcggcgaggacctggtgatcaagacgctcgggcagcacgagttcttcggagaactgggcctgctggtcggcgaccacctgcgcagcgccagtgcgcgcgcgctggtcgactgcgatgtgctggagctgggcccggccgatttccatcggctggtcgaatccgatcccggcctggtggcctatttcctgcgccgcacgatcatgcgcgtgctggccaacgaacaggcactgatcgcacagctgcgccggcgcaaccacgatctggaaaccgcgctggacaatctgtacatcactacccatcagttgacccacacccgtgagctggtgcgtaccgatgaactgaccgggctgcacaaccggcgaggcctcaccctgtacctgcaggagtgccgcgagcgggccgaggggccgccgcaggcgctgctgctgatcgattgcgaccgcttcaagcagatcaacgaccgccacggccaccaggccggcgaccgcgtgctgcagagcatgggcaacatcctgcgctcgatggccggcgagcaggacctggcctgccggcttggtggcgatgagttctgcctgatcctgcgccgtggcaatcacgagatcgtgcagcacgcggccgagttcatcatcagtgcggtgcatggcctgctcgagcgcagccatggcacgccgcatgtgagcctggtcagcatcggcgcctgcctgttggcgccggaggcaggctggagcgagtggtatgcctgcgcggatcgtgcgctgtaccaggccaagcgcgatggcggcaactgcctgcgctgggcggatgatccggacggccaatag

SEQ ID NO: 495102 - DNA, 1302 bp, Stenotrophomonas maltophilia
atgagcaagctgcccactgccgaacagatccagcacgactgggataccaacccgcgctgggaaggcatccagcgcaactacagtgccgccgacgtggtgcgcctgcgcggcaccgtccacatcgagcattcgctggcccgcctgggtgcggagaagctgtgggcatcgctgcatgagcgcgagttcgtcaacgcgctgggtgcattgaccggcaaccaggccatgcagcaggtcaaggcgggcctgaaggcgatctacctgtccggttggcaggtggcggccgacgccaacctggccgggcagatgtatccggaccagtcgctgtacccggccgattcggtgccggcagtggtcaagcgcatcaacaacacgctgctgcgcgccgaccagctgcaccacgccgaaggcaaggatgacatcgacttcctgcagccgatcgtcgccgatgcggaggccggtttcggcggcgtgctcaatgcgttcgaactgatgaaggcgatgatcgaggccggtgccgccggcgtgcacttcgaggaccagctggcctcggtgaagaagtgcggccacatgggcggcaaggtgctggtgccgacccgcgaggcgatcgagaagctcaacgccgcgcgcctggccgccgatgtgctgggcgtgccgaccctgctggtggcgcgcaccgatgccgaagcggctgatctgctgaccagcgacatcgacggcaacgacaagccgttcaccaccggtgagcgcaccgtcgaaggcttctacaagacccgcaacggcctggaccaggcgatcagccgcggcctggcctatgcgccctacgccgacctggtgtggtgcgagaccggcaagccggacctggagttcgcacgcaggttcgccgaggcgatccacgcgaagttcccgggcaagctgctggcctacaactgctcgcccagcttcaactggaagaagaacctggacgacgccaccattgcgaagttccagcgcgaactgggcagctacggctacaagttccagttcatcaccctggccgggttccatgcgttgaactacggcatgttcaatctggcccacggctacgcacgccgccagatgagcgcgttcgtcgagttgcaggaagccgagttcgaagcggccgagcgcggcttcactgcggtcaagcaccagcgcgaggtcggtaccggctacttcgatgcggtgacccaggcgatccagcagggccagtcgtcgaccaccgcgctgaccggctcgaccgaggaagaacagttccatggcgggcgcagcgaacgcgcggcgtga

SEQ ID NO: 495103 - DNA, 1623 bp, Stenotrophomonas maltophilia
atgtccgccgtcgcttccgctgttcccacccctgccagcaaggctacccccggcatcgccctggcgacccgcgtggccggccaggacaccgtgctgccggcgccgctgctggccctgctggtgtcgctgcaccgtgcggtggaaccgggccggcaggcacggctgcaggcgcgccgcgagcgccaggcgttcttcgaccagggcggcctgccggacttccgcgaggacaccgctgcgatccgtagcggcgactggcgcgttgcgccgctgccggccgcgctgcaggaccgccgcgtcgagatcaccggccccaccgacccgaagatggtcatcaacgcgctgaactccggcgccaaggtgttcatggccgacttcgaggattcgacctcgccgacctggcgcaacctgctggccgggcagcagtcgctggccgccgcggtgcgtggcgatctcgactacaccgcccccaatggcaagcactacacgctgcgcccgtatgacgagcaggcggtgctgatcgtgcggccacgtggctggcacctggacgaaaagcacgtgcgcatcgatggccagttcatcgccggcggcctgttcgacgcggcggtgttcgccttccacaacgcccgcaccctgcaggcgaaggaccgcggcccgtacttctacctgcccaagctgcagagcatggaagaggcggcgctgtgggaaaccgcgctgtcgcacatcgaaggcatgctcggcctgccgcacggccagatcaaggtaaccgtgctgatcgaaacgctgccggcggtgttcgagatggatgagatcctgcacgcgctgcgtgaccgcatcgtcggcctgaactgtgggcgctgggactacatcttctcgtacctgaagaccttccggcgccacgccgaccgcgtgctgcccgagcgcggccaggtgaccatgacccagccgttcctgaaggcctattcggaactgctgatccagacctgccatcgccgtggtgcacatgcgatgggtggcatggccgcgcagattccgatcaacaacgatgccgccgccaacgaacaggcgatggcccgcgtgcgcgctgacaagctgcgcgaagtgaccgccggccacgacggcacctgggtcgcgcatccggcgctgattccggtggcgatggcgatcttcgacgaacacatgcccggtgcgaaccagcacagcgtgctgcgccaggatgtgtgcgtcggccgcgacgaactgatcgcacggccgcccggcaccatcacccgcgccggcttcgaaggcaacgtggaagtctgcgtgcgctacctggcggcatggctggatggcaacggctgcgtgccgatccaccacctgatggaggacgcggccaccgccgagatcagccgcagccagttgtggcagtggctgcatacgccgggccagcagctggacgatggcaccgccatcgacctggcactgctggatgccacgctggcacagctgccggcacggctgggtgacaccgccacgctgcccggtggcgcacgcatcggcgaggccatcgccctgctcggcgaactgagccgcagcgacgaactgaccgatttcctgaccctgccggcctacgcgcgcatcgactga

SEQ ID NO: 495104 - DNA, 969 bp, Stenotrophomonas maltophilia
atgagcacacgcaccccgccaagtccgcgtttttcctacaaatccgaccggctgaagccattgcgtgcgttctgccagacggtgcgcctgggctcggtctcacgggcggctgaggcacttttcgtcagccagccggccatcagcctgcagttgcaggcgttggagcgcgagctgggagtgccattgttcgagcgcagcgggcggcgcctggtgcccagccgcgagggccagctgctgtacgagatggcgcagccactggtggaaaacctggacgggctggaggcgcgcttccgcgacaaggtgcgcggcctggatgcgggcgagctgaacatcgccgccaacagctcgacgatcctgtacctgctgccgaagatcgtcgagcgcttccgcctgcaccacccggacgtgcgcctgaccctgcacaacgcgatcagcgccgatggcaccgacctgctgcgcgaggacgccgccgacctggcgatcggttcgatgaccgatgtaccggccgacctgacctacgccccggcctaccgcttcgagcaggtactgatcgcgccgcacgaccatccgctggccagtggcggcgagctggagctggctgacatcgcgcgctacccgctggtgctgccgccgaagcggcagatcacctaccggctggttgaccaggtattccagcgccaccgcatcgcctacaccgtggcactggaagtgggcggctgggaggtgatcaagcagtacgtggcgatgggcatgggcatttccatcgtgccggcgctgtgcctgaacgaggccgaccgcgagcggttggcggcgcagtcgatgaagcgctggttccccgagcgcagttacggggtgatcgtgcgccggggcaaggcgctgtcggcgcaggcgcgcgcgttcatcgagctgatccagccggagttgttcagtccgcgcgattacgaccagagcgggcattcggagcggtga

SEQ ID NO: 495105 - DNA, 1122 bp, Stenotrophomonas maltophilia
atgctcaccctcggcctggtcgcctgcgcgacccagccgaagtccccaccgtcttcgccccaggccagcagtacgccgcgccagcccgccgccaaggcccatggcccggccgaggccgcgcctgaagccaccgccgccaccgcggcgcctgtcgatctcaccccggtgccgttcgaggtcgcacgggcccgcttcattgccgataccgccaagcgctatggcctgaagccggagcagatcagcagcgtgctcgaccaggcgcaggtgcgccagccgatcatcgccgcgatgtcgcgcccggccgaacgggtcaagccgtggaatgagtaccggccgatgttcatcagcaaggcgcgcatcgatggcggccgcgcgttcctggccgaacaccgcgccgaactggatcgcgtgcagcagcgcaccggcgtgccggccgaagtgatcgtcgcgatcatcggtgtggaaaccagctacggcaggaatgctggcagccatcgcgtgctcgatgcgctgtacacgctggcgttctattacccgcgcagcggcgacccggccaagctggaacgcgaagtgcgccgcgagctgttcttccgcgatgagctggccaagctgttcgagttgggccacgaagagaaactggatatcaccacgctcaagggcagttatgccggtgcgatgggcatgggccagttcatgccgtccagctatctcgactacgccgtggacggaaacggtgatggccgccgcgacctgttcaccagctacgacgacgtgttctcgtccatcgccaactacttcgtgaagaagggcggctgggtgcgtggcgggcaggtggccgtgccggccacgctggcgccgggccgcgaggagttcaatccgaccgaatggatgccgacctggacgatggacgacctggcgcagcgcggctaccagccgggcgcgccggtgcagccgggcgccaccgccacgccgatcacgcttgaaggcagcaccggcaagcagtactggctgggcttccagaactactacgcgatcacccgctacaacctctcgaagatgtacgcgatggccgtgttccagttgtcccaggccatcgccggacaggagctgcccccggcatga

SEQ ID NO: 495106 - DNA, 1269 bp, Stenotrophomonas maltophilia
atgaacatcagatggctggtcccaggcttgatcgtcctcgcgctggctgcctgcagcagcgcgccgaagaagccggccacggccggccatggtggcaagtccggcggcacgctggtgcaggggcgtggctcgcgcccggcacactgcccggaagggtcaccgtacgcggcggccaaggaagacctgagcacccgcggcaactacactgccggtggcctgtacaagccgggcgtgcgtgacagcacgccggattacattcccaacgtggcctgcattcccgagccggaagtgaccgccgaggagcgctcggcgatcggcaacaagtcgccgtacgtggtgctggggaagtcgtacaaggtgctcgacgatacccacgactatgtcgagcgcggtaccgcgtcgtactacggcgccaagttccatggccgcctgacctccaaccgcgaggtctacgacatgtaccagttcaccgccgcgcacaagacgctgccgctgcccagcttcgcccgcgtgaccaacctcgacaatggcgagtcggtgatcgtgcgcgtcaacgaccgcggcccgttccacgatggtcgcgtggtcgatctcagttatgccgccgccgtgcgcctgggcatcacccagcgcggtaccggcaacgtggaagtgcgcgcgctgcagccgggcgagagcaacctgctggcgcagaagccgtcccgccgcgagcgtcgtgccgccgaagcggcagctgcggtggccagtgcacgcccggcagcgaccgcgcgcgccactgccgacagcgatatcgatcgcctggtcaagcgcctgccggccgatggcatgccggcacgcggccagccggccaccacccagggcgtggccagcaccgtgccggacgtggcggtcagcagcctgccgccgagtgcaccgctgcgcaacaccgcaccggcgccggttgcagtcgccagcgccgcgccgcgcgccgtcgcgccggcacccgtgcgcaccgtcgccgccacgccggcggcacccagcctgtcgcagcaggtggtgggcgcggtgatggtgcaggtcgccagcttctccagtcgcgacaacgccaaccgcgcgatgggccagctcaacgctgccggcatcgtcggcgcgaccatcagcgacatcgccgccggtggccgcaccctgttccgtctgcgcgttcctgccaccgaccatgccagtgccgcggaacttgccggccgcatcgccggtctgggcctgggttcgccgcagatcgtcaaggattga

SEQ ID NO: 495107 - DNA, 1221 bp, Stenotrophomonas maltophilia
atgaatttccgttccgccgccaccgccctggccgccaccctggtggtgggcctggcttccgcccagacgccgctgccgaccccggccacgccggcgcctgccgccgccgctgccgccccggccaccgtcgcgaccccgccggccccggccccgagcgtgtccaaggcctgggtcctgatggactacgccaccggtcaggtgctggccggcgagaacatccacgagcagctggccccggccagcatcaccaaggtgatgacgtcgtacgtggttgccgccgaggtcaagaacggcaaggtccgtgcagatgaccaggtgatgatgagcgagcgcgcctggcgcgaaggtggcgccggtactgacggcagctacagcggcttcccggtgaaccagaccgcacgcctggaagacatggaaaagggcatggcaatccagtccggcaatgacgccgcgatcgccctggccgagcatgtggccggcagcgaagaggcctttgcgtcgctgatgaacagctacgccgccaagatcggcatgaaggactcgcacttcgtcaacgcccacggcctgaccgcacagggccaccacagcaccgcctacgacctggcgctgctgggccgcgcgatggtgcgtgattacccggaaacctacgcgtataacaagatcaaggaattccaggtcggcaacatcaagcagccgaaccgcaacctgctgctgtggcgcgatggcagcgtggatggcatcaagaccggccacacgtccgaagccggctactgcctgatgagctcggcccagcgtggcgaccagcgcctgatcgccgtagtgctgggtggtgcgtcggagaagcagcgtgccgacgacagcctggccctgctgaactggggcttccgcttcttcgagacccaccgcctgtacgaaccgggcaaggccgtggccgagcacaaggtctggaagggcaccaccgacaaggtacagctgggcgtggcccagccgatgctggtgagcgtgccgcgcggccgctacaacgatctgaagccgagcatcgacgtgcccaagaccctggaggcaccgttcactgccggccagcagatcggcaccgtgaaggtcacgctggatggcaaggtcatcgccgaggcaccgctggtggccgtggccgccgtcgagcaggccggcttcttcaagcgcctgtgggacagcttctggatgtggtgggaatcggaatga

SEQ ID NO: 495108 - DNA, 1059 bp, Stenotrophomonas maltophilia
atgcgtagtgtcgcagccctcgggctggccggcctgctggcctctgccctcccctttgccgcccaggcggccgaacaatgtggcccggacgcgatgcgcgatcacccgccgcaggtcaatttccgcgtcgacaacgacctgttcggcggccgccaccaggaccagggctataccaacggtgcgctgttgaccctggtctcgcccaatctggtcgattacaccgacgacccgtgccttccacgcatggcgcgctgggtgaaccagtacctggaaggcctgcatccgggcaggttcgaacagcagaacatgatcttcagcatcggccagggcatcttcaccccgaccgatttcagccgcagggacctgatcgaggacgaccgcccttacgcgggcgtactgatcgcaaatttcggtttcaatgcgcgcagcggcgaccgcctgcagaccacccagctgacgttgggcgtagttggcccgtgggcacagggcaagcaggtgcagaatgccgtgcacgaagtgctgggcgacgagaaattcaagggctgggacaaccagctgcacaacgagccgctgttcatgctgacccatgagcgcatgcgccgctggccgggtgatgccagcatcaatgccgacggctggggttgggacgcgatcagccactacggcggctcgatcggcaacctggaaaccaaggccaacctcggcggtgaagtgcgcttcggctggaagctgccggacgacttcggcagcacgccgttgcgcccggccggtgagaacacggcaccgacccgcagcggccgtcccaatggctggtcctggcacctgttcgcgacctcggacgcggcctgggtgatccgcgacatcacgctggatggcaacacgttccgcaacagtcacagcgtggacaagcgccatgtggtggcctacggcggctatggcgtggccgtgatgtacggacgctggaagttcgccgctgcgcgttaccacagcacgcgggagttcaacggccagcgccaatcgccggtgttcggcagcttcacgatcagccgctcgctgtag

SEQ ID NO: 495109 - DNA, 279 bp, Stenotrophomonas maltophilia
atggaaatcaagtccgacaaccccgaccacggcttccagttccccggccagttcgagctcagcgccatgggcccggccaaccgcggcctggagcatgagcttccccgtctgctgctggctgccggcatcgatgtggtgaacgaacgcatcagctggaagcattcgtccaacggcaagtacgtgtccgtccgcatcgtgttcaaggccgagagccgcgagcagtacgacctggcgcaccaggcgctgcgcgaccacccggaagtgaagtggacgctgtag

SEQ ID NO: 495110 - DNA, 711 bp, Stenotrophomonas maltophilia
gtggacgctgtagccgacagctgcccggccgaagccgccccggaagaccgcgcgccgcgtccggcggtggtccgcgacctcggccgccaggcgtacgagccggtgtggcgcgccatgcagcgcttcaccgaccagcgcagcgacgccgacgccgacgaactgtgggtagtcgagcacgatccggtgttcaccctgggccaggccggcaaggatgagcacgtgctggcgccgggtgacatccccgtgctgcacgtggaccgtggcggccaggtgacctatcacgggcccggccagatcgtggtctacccgctgttgcgcctgccgcggctgggcatcggtgtgcgcgactacgtgtgccgcatcgagcaggccctcatcgataccctggccgagtggaacatcggcgccgaacgccgcgagggcgccccgggcgtctacgtcggtggcgccaagatcgctgcgcttggcatccgcgtgcgccgcggctgcactttccatggcctggccttcaacgtgaccatggacctggaacccttccaccgcatcaacccctgtggctatcaggggttgcaggtgacctcggtggtagacttgggcggcccctccgggctggatgccgtcaagccggtgctgctggaccacctggcccgccagttcggcctgctgctgcagcacacgccggaactgcccgatctttctgcggccgcctga

SEQ ID NO: 495111 - DNA, 1011 bp, Stenotrophomonas maltophilia
atgactgaaaccaccgcccgttccattcccctgcagatcgtgcagggcgactctccgtccgccgcgccgttgcaggccggggtcaagcagctgggcggtgacaagatcaaccgttcgccggtgcagttcgccgacgcgccggtgctgcgcaagccgtcctggatccgcgtgcgcattccctcgggcaacgccgtgcagaacctcaaggccaagcttcgcgagaaccgcctggtgacggtgtgcgaggaagccagctgcccgaacatccacgaatgcttcggccatggcaccgccaccttcatgatcctcggcgaggtctgcacccgccgctgctcgttctgcgacgtggcccatggccgcccgaagccgccggatgccaacgaaccggccagcctcggccagaccgtggccgacatgggcctgaagtacgtggtggtgaccagcgtcgaccgcgatgacctgcgtgacggcggtgcccagcacttcgtcgactgcatcaccgccatccgcgaaaagtcgccgggtacccgcatcgaagtgctgaccccggacttccgtggcaagggccgcatggagcgcgcgctggagatcctggcgcagaacccgccggatgtgttcaaccacaacatcgagaccgtgccggaactgtaccgcaacgtgcgcccgggtgcggactaccagtggtcgctgaacctgctgaagaacttcaaggcgcagcacccggacgtgccgaccaagagcggcatcatgctgggcctgggcgaagacttcgaacagatcaaggccaccatgcgcgacctgcgcgcgcacgatgtggacatgatcaccatcggccagtacctgcagccgaccgcgcatcaccacccggtactgaagtactggacccccgaggactacaaggcgctggaagactacggctacgcgctgggcttcagccacgtggcgtccggcccgatggtgcgctcgtcgtaccacgctgacgtgcaggccaagggcgccggcgtctcctga

SEQ ID NO: 495112 - DNA, 2178 bp, Stenotrophomonas maltophilia
atgaaattcaaagcccccgcattcctgatggccctggcgctggtcgcgccgctggcgctggcggccaaggccgactcgcccgcattgcccgcggcggccaccgccgatcaggtgaccacctccaagctggtgtacggcctgttgtccgacagccgctacgcctaccgccctcgcgcgctggacgaggccacctccaaggacgtgttcaagcgttacctggagaccctggacggcggcaagcagtacttcacccaggccgacgtggcgcgcttcgcgccgttcgaagccaacatctcttcggccatccgtggcggcgagctggagccggcgttccaggtgttcgcggtctacaagcagcgcgtcggcgagcgcgtggcctatgcgcgcaagctgctcaagcaggagccggacttcaccaccgacgagcgcttcgaatacgaccgcaagaaggttccgtgggcggccagcagtgccgaactggatgagctgtggcgcaagtcggtgaagaacgactggctgcgcctgaagctggccggcaagaagccggacgacatccgcaagacgctggacaagcgctacgcgacgctggagaagtcggtcaacgagctgaagggcgaagacgtcttccagttcttcatgaacgcctacaccagcgcggttgatccgcacaccgactacttcaccccgcgcaccgccgagaacttcaaccaggcgatgtcgctgtcgctggaaggcatcggtgcgcagctgcagcggcaggacgacatggtggtgatccgcgagatcatcgccggtggtccggccgcagtggacggcaccctgaagcctggggaccgcatcgtcggcgttggccagggcaagtccggcctggtcgaggatgtgatcggctggcgcatcgacgacgtcgtggccaagatccgcggtgccaaggatacccaggtcaagctggaattcatcccggccgccgagggcgtggacggcaagcaccacacgctggtcctgacccgccagaaggtgcgcctggccgaacaggccgccaagggcgagaccatgagcatcccggccgccaacggcgaaccggcgcgcaggatcggcgtgatcaagctgccgaccttctaccaggacttcgaaggccgtcgccgcaatgccgctgactacgcttcggccacccgcgacgccgccaagctgctggccggcttcaggaacgacaagctggatggcgtggtgctggacctgcgcaacaacgggggcggctcgctggatgaagcgatcgaactgaccggcctgttcattgaacagggcccggtggtgcaggtgcgcgagtccggtggccgcgttaccgtcaacagcgaccgcaaccagggcgtggcgtgggacggcccgctggcggtgctgatcaaccgcggttcggcctcggcctcggagatcttcgccggtgccatccaggactacggccgtggcctggtgatcggtgaaaccagcttcggcaagggcaccgtgcagaacatcgtcgacctcgatcgctggccgagcggcgaaacccagcgcttcggccaggtcaagctgaccatcgcccagttcttccgcatcagcggcagcagcacccagcacaagggtgtggttccggacctggccttcccggccagcgtcgatgccaccgaattcggcgaaagcacctacgacaacgccctgccgtggacccgcatcgccgccgtgccgcacacccagtacggcaacttcgcgccgctgctgccgaagctggagacccgccacgacgcgcgcatcgccactgacaaggaattccagtggtggaacgaggacgtggagcagttccgcaccgaggccgcgaagaagtacatctcgctcaacgaggcgacccgtcgtgccgagcgcgagcggcaggacgcccagcgcaaggagcgccaggtgcagcgcaaggaactgggcctggccctggacccgctggccgacgacagcagcgacgatggcctgaccggcaacgagcgcgacatcgtcaaggatgccgcccgtgagaaggccgctgaaaagcgtccggacccgctgctgcgcgagtcggcctcgatcctcgctgacgcggtcaatctgctggccaatgaccgcccgctgtcggcccaggtgctgccgcagtccaccggcgcggggcgctgggcggactga

SEQ ID NO: 495113 - DNA, 597 bp, Stenotrophomonas maltophilia
atgcgggcctcccgtctttccagcgccgccgtggcgctcaccagtgccctgatcctctcggcctgcggtggccgtgccgccgacagcaccgtgttgcgcgagtccttcgactccggcgataccttctcgcgcacggtcgatgggcgcccgggcgaagcctgcgaagcggcgcgccgcacgctgctcagccagggctatgccatcgcccgttccgacgatgcacaggtggaaggcaacaagaacttccagccgcgcgaggatgaccatgagcagctggtgctgcgcatctcctgcgccccgcgtggcggccagacgctggtgttcgtcagcgcagtgcaggatcgctatgcgctgaagaagagcccgacctcggccagtgtcggtgtgggagcgctgggttcggtatcgctgcccttcggcagcaacgacgactcgctggtgaaggtggtcagcagcacggtcaccgatgccgagttctatcgtcgcttcttccagcgcctgcagcagtacctgccggccgcggcgggcaagccgtcgccatcgccggccgcggcaccggagcccgcacccgcaccggcggtcacggaccagggctga

SEQ ID NO: 495114 - DNA, 1254 bp, Stenotrophomonas maltophilia
gtgcgcggcaggtggctgattgcagccctgctgctggcgcccgcgtgggtcgtcgcagcgccatccccggactgtacgcagggcctgctgcagcggttggggtggcgcttcgaggatgccgagctgcgtgcaccgcaggtacacaagggcccggtgtgtacgcgttcctcgctcgccgcggcacaggcagcgggtgacctgcgcgtacgctggccggcggatctgcctgcaggcgaacgacaggcactgctgcagcagctgctggaagaccctgccacggtctgcgcctatgccttcgagctgggggcggccacgcggcgcgcgacctcggcattgcagggcaatgccacgttccgtttctccggcccacaactgggctggatcggctttggtctgcgcggcgcgccgacacagggctggcagcgtacgcgcagtttcggccgtggcttcgtgcccagtgcgggcaacagccatgcgctgcaggcgttctacagcggtgccgtgcgcgccgagtgcggtgtcggccgccaggtcgcgcagctggccacccagcgcgagctgtatggcgatgctgcgttcgatacagagttcgcagcggatgaactgtcgatcggcaccttcctcgcgctgcacgccaccgacagcatcctgcttggcgcgcacgcgggcgagttcttcgccgacggcaaggcggtgcgcacctcggcgatggggcggcaggcgttcgtgggtgtgcccggcttcatcgaacatgtgtacgacaacggtacgctggatgacctgagcaaccaggccgagaacttcgtggtcgtcactgtgggcgagggcgctgcgcaggccctggcgcagcacggcggcctggcctggtacgaccagcgcaatgccgaactctggaacctggcgcaggacatcccgcgcatcggccagcgctacttcgagcgcctgctgttcgagcgcgatccgcagttgcgcgcacggctggcgccgcgctaccacgacacgctcgcgcgcatggaccagctgctggacgatccgttctaccagcagttcgtgatctatgtgcatccacgcggtatacgtcccatcggctaccacgtcgcccgcctgctcgatcgcaacccgcgaaccccgttttcgatcgacctggcggtgcacaatctgcataccacgctctaccggcgttggcgcgaggcgcagctgcgccactgcgcggctaccggcaggccaggcagcctgaccctagaccccaactga

SEQ ID NO: 495115 - DNA, 906 bp, Stenotrophomonas maltophilia
atggatattgcaatgatcggcctcggccgcatgggcgccaacatggcccagcgcctgcatcgcggcggccaccgcgtggtcggctacgacccgggcgaaagcgcccgccagcgcgccgccgaggccggcctggaggtggtcgattcgctggccgccgccgtggccgcgctgccggtgccgcgcgtggtgtggctgatggtaccggccggcgaaaccgtcgatcagacgctgggccagctgaccccgcacctggccgagggtgacatcgtcatcgacggcggcaactccaactaccaggactcgatccgccgcgccaaggcgctggccgaggatgatctgggctacgtcgactgcggcaccagcggtggcgtgtggggcctgcaggaaggctacagcctgatggtcggtggcgaagcgtcggtggtggagcagatcgcaccgttgctgcgcacgctggccccggccgaagatcgtggctgggggcgcgtcggcccgtccggtgccggccacttcaccaagatggtccacaacggcatcgagtacggaatgatgcaggcctatgccgaaggcttcgcgctgatggagcgcaagcaggagatggaactggacctggcgcaggtggccgaggtgtggcgccacggcagcgtggtgcgttcgtcgctgctggacctgagcaccgaagccctcaagcgcaatccttcgctggatggcattgccccgtacgtggaggattccggcgaaggccgctggaccgtggccgaagccatcgcgctggatgtgccggcgccggtgattacgctgtcgctgctggaacgcctgcgctcgcgcgaatcgaattcgttcaccgaccgcctgctgtcggcgatgcgcaatgaattcggtggccacgccatcaagaagtcgtaa

SEQ ID NO: 495116 - DNA, 1044 bp, Stenotrophomonas maltophilia
atgcgccccgacctgcaactggccctgatcggctacggcctcgccggccgcgtcttccatgcaccgctgatccagcacacccccgggctggcgctgcacagcatcgtcagttcacaacgcgacaccctgctgcgtgcgttcagcgatgtgcacgtgcgtgccacgccgcagcaggtattcgatgatccggccgtggatgccgtagtgatcgccacgccgaacgaacagcacgcgccactggccatcgcggcgctggcggcaggcaagcatgtgctggtcgacaagccgttcgcgctggatgtggccgaagcggaaacggtgctggctgcggcacgcgatgccgggcgcatcgccaccgtgttccagaaccggcgtttcgatgccgacttcctcaccctgcagtcgctgctggccgaaggcagcttgggcgacgtggccgagtgccacgcgcacttcgaccgttaccgtccgcaggtgcgcgaccgctggcgcgaacagggcgggcccggcagtggcctgtggtacgacctcggtccgcacctgctggaccagatgctggtgctgttcggctggcccgaggcaatcgatgccgacctggccgtgcagcgcgaaggtggcggcggcatcgattacttccacgcgatactgcactacccacggcatcgggcgatcgtccacgccggttccctggtggcagcgcagacgccgcacttcagtgtgcatggcagcgccgccagctggatcaagcacgggctggacgtgcaggaggcgcagctgcgccgcggcgtcgcgccgggcgcaccaggctggggcatcgatccgcggcatggcgagctggtgcgctgcgataccgaagacaacgtgcaacgcagcaccgtcgacaacctgcccggcgactatcgccggttgtatgcgcagttcgcagcggcgatgcacggcgagggcgaagccacggtcagcccggtgcaggcgctgcagctgatgcggttgctgcaggccggcatggacagcgcgcgcgaagggcggcggatcgcgttggggtga

SEQ ID NO: 495117 - DNA, 384 bp, Stenotrophomonas maltophilia
atgagcaataccacccgcacgctgattgcttccgccctgaccctgggcctggcgctgtcctcctcggccgcattcgccaaggacccggccgcgaagagcccgccgaccagcacccatccgacgacccatgctgatcgtcacgactccaatgagccggtgaccgatacctggatcaccaccaaggtgaaggccgatctgctggccagcagcaacgttccgggcaccgagatcaaggtggaaaccgtgaacggcgtggtcagcctgagcggtgccgtcgctacgcaggcggagaaggacaaggcggtcaacaccgccaagggcatcaagggcgtgacccgcgtcgatgccgccgcgcttaaggtcagcgccgctgccaagcgctga

SEQ ID NO: 495118 - DNA, 1818 bp, Stenotrophomonas maltophilia
atggcgctggttttcagtgacgacatctgggaccgctggcggttgccggccctggcgctggcggctgccgcgatcatcgtggtgccgtggttgaccctgcgcaaactgcagcaggacagcgaagaggcgatggcctgggtcaaccacacccagtccgttggtgtggcgctgcaacagctgcaggccgatgtgcgcgacgtcgaatccgccgccctgaccctgtccaagggcgtggatgcgcccggcctgcgcgagcggatggccaaggccaacgagatccccgggcgcctggccgaactgggccggatgacgcgtgacaatcccgatcagctgatccgcattggtcggatcgaatcgatgctcgaaggccgcatggcgcttgcccgcgagctggcccggtccgaaccgaactccgaccagcgtgagctggtgcaggacctgagcacgcgttatccgatccgtggcctggtggaggagctgcaggccagcgagcagaatctgctggcactgcgcgcccagcaggccgcgcgccagcgcaagcagaccgaactggtgtcgtggagttcgctggcgatccagctggccctgctcggcctggtgctgtggctgctgcagcggcagatcggccgccgcctgcatgcggaacggcaatcgctgcgctcggccgcacgcgcggcgtcggtgctgcagaccgtgcgcgaaccgatcgtgctgctcgaccgcgacctgcgcgtgcagctgcacaacccggcgttcgccgaactgtatgacctgcaggacgagcgcgccgatggcctgctgctggaaaacatcggcgacggcgcctggcgggatccggtggtgcgccagcgcctggccgatgtgctgtcgcgtggccgcgaactctgggacttcgagcatgagcagcgtaccgccgatggcatggtgcgctacatgctgctcaacgcacggcgcatgccgctgcccgacaccgatgacgaagtggtgctgctgaccatcagcgacgtcaccatgcagcgcgcagtgcagctgcgcgtggaagagctgaaccgccagctggagggcaaggtcgcgcaggtgtccgaggtcaaccgcgagctggaagccttcagctactcggtttcgcatgacctgcgtgcgccgcttcgccacgtggccggattctccgacaagctgtcgcgccacctcggcgacgccgccgatgacaagagcaggcattacctggaggtgatctccagttcggcccggcgcatggcggcgctgatcgacgacctgctggtctattcgcggctgggccgcgcggcgatgcgccagcaggcggtggacatgcagtcgctggtggccgatacccgcgccatgctcgatgccaacctgcaagccgaggccgagaacagcggccatgcgcaccacgtggagtggagcatcgcgccgctgccgatcgtggtgggcgacgagaacatgatccgccaggtctggctgaacctgctcggtaacgcggtgaagtactcgggcaaccgcgagccggcgaagatccgcgtggactaccagccgcagcccgatggcggccatcagttcacggtcagcgacaatggtgcaggctttgacatggcctacgccggcaagctgtttggtgtattccagcgcctgcacaaggccagcgactacccgggtaccggcatcggcctggccagcgtgcgccgcgtgctgacccgccatggcggccgtatctgggccgaggccgaaccggacgtcggcgccaccttccacttctacctgcctcccgcgatcgacgcggacaaacaagggccttctgcatga

SEQ ID NO: 495119 - DNA, 441 bp, Stenotrophomonas maltophilia
atgaccactctgcgcaccattcttctcgccgaagacagcccggcggatgccgaaatggcgatcgatgccctggaagaggcgcgtctggccaatcccatcgtgcacgtcgaagacggcgtggaagtgatggactacctgctgcgccgcggcgccttcgccaatcgcgaggaaggcctgccggcggtgctgctgctggatatcaagatgccgcgcatggatggcctggaagtgcttcggcagatccgcgagcatgaagaactcaagcgcctgccggtggtgatcctgtcgtcctcgcgcgaggaaagcgatctggcccgcagctgggacatgggcgtgaacgcctacgtggtcaagccggtggacgtggaccagttcttcggcgcggtgcagaccctgggcaagttctgggcgttgatcaaccaggcaccggaactcgagtga

SEQ ID NO: 495120 - DNA, 1512 bp, Stenotrophomonas maltophilia
atgcccctgaccggtcccgccctgggggcgctgcgcatcctgctggtggaagactcaccagaggatgccgagctgatgtccgaacagatgctcgacgcgggcctggacgcccgcttcgagcgtgtcgagagcgaggcggaactgcgccaggcactggctgcgttccagccggacatcgtgctgtccgacctgagcatgccggggttctccggtgatgacgcgctgcgcatcgtgcgcgagacctcgccggacgtgcccttcatcttcgtctccggcacgatgggtgaggagaacgcggtggcggcgctgcagaagggcgccaatgactacatcatcaagcatctgccggcgcgcctgccgtcggcggtggcgcgtgcgatccgcgatgcacgcagcgcggtggagcgtgcacgggtggaaaccgagctgatgcgcgcgcagcgcctggaaagcctgtcgctgcttgctgccggcctcagccatgacctgcgcaacatcctgcagccattgctgatcatgccggacctgctgaaggcgcgcaccgaggatccgcagctgcaccacctggccgatgtcatcgccgagtgcggtcgccgtggccatgagatggccgaatcgatgctgtcgttcgtgcgcggttcgcgcaagccgagcgagcgcatcgagatcgatggcctgttcgatgcggttgcactgctgttgcgcagcaacgtgcccgacgccgtgcgcctggaactgcaggtgcaggacgaaggcctggtggtcgatgccaactacaccgagctgcagcaggtgatgttgaacctggcgctcaacgcgatccaggcgatgcccaacggcggtcgcctgagcctgaccgccagccatgccggccagcgcgatggcgtggactggatgcggatctgcgtggccgatgaaggcatcggcatggatgcagacacgctgtcgcacctgttcaatccgttcttcaccaccaaggccgacggcaccggcctgggcctgatttcctgcaagcgcatcgtcgaaggtgccggcggcagcatccatgtcagcagccagccggggcagggcacctgcttcgaactgcacttgccgatgcacgaagccagcgacggtagtgagccgatcgagcagctggtggccctgggcagtggccagtcgatcctggtggtcgatggcgaggccacgcgcctgtcgttgctcggcaatgcgctgtcaagccagggatatcagctgcagctggcctccgatggcccggcggcgctgcgctggatgcagcaggaggcaatgccggcgctggtgattgccgacgccggctcgaagttgttgccggccagccagctgctgggcgagatggccacgctgggctatcgcggcccggcgctggtgctggaagacgcagcggtggaggtggcggccgatgcatttcccgctggcgtgcaggtgcacgtgctgcgcaagccgctgcagatgcagcaggtgttccgcgcggtgtccgaagcgctgggctga

SEQ ID NO: 495121 - DNA, 744 bp, Stenotrophomonas maltophilia
atgacctattgcgttggaatcgaggtggacgagggcctggtcttcgctgccgacacccggaccaatgcctcgctggacgatgtgcgcgtgcaccgcaagctgcacgtgttcgagtatcccggccaggcagcctacgtgctgatggcggctggcaacctggccaccacccagctgctggtgtcgcgcctggggcgcgatgccgacgaacggcgcgcgcccaacctgcgcgacatgacccacctgttcgaagccgccgagtacgtcggccagctgctggtggacagccaggtgcacagcaaccacagcgaacatggccacgatggggtcaatacccaggccacgctgatcttcggcgggcagatcgccggcgagcgccccgggctgtacatgatctatccgctcggcaacgccatcgccgcctcgccggagacgccctacctgcagatcggtgaatccaagtacggcaagccgatcctcgaccgcatcctcagcccggccacgcgcctggaggatgccgcacgcacggcgatcgtctcgttggactccaccatccgttccaacctgtcggtgggcctgccgatcgacctggcgctgctgcgcgacggcgaactgcgcatcggccagcagctgcggctgggtgcggattccacgctgtatgcggacatccaccagaactggtcgcggcggctggaacaggcagtggacgccctgccacgcttcccctgggaacctaccgaacggtag

SEQ ID NO: 495122 - DNA, 486 bp, Stenotrophomonas maltophilia
atgacgaccgtgctcctgagcctgggcagcaatgtccagccccgccgctacctccacgccgcggtggcggccctgcgcgagcgcttcggcgcgctgcaggtatcgccggcctaccgtaccgccgcggtcggcttcgatggcccggccttcctcaacaatgcggtggcgatcgagaccgatctgccgctgcaggagctggacgactggctgcacgcgctggaagacgcgcacggtcgcgaccgcagcgggccgcgcttctccgaccggaccctggacatcgacgtggtgttctatggcgacctggtgctggaaggtccggggtacctgcgcatcccgcggccggagctgaagcacgcgttcgtgctgaagccgctggccgacatcgcgccgggcttcatcgacccggtcagcggccaggacctggccacgctgtggcgcgcgcacgcgcagtttggcgaggcgttcgaggtggtggatctggagtga

SEQ ID NO: 495123 - DNA, 738 bp, Stenotrophomonas maltophilia
atgagcgatacccaccccgtggtcctgatcaccggcagcgcgcgccggatcggtgcggccatcgcccgccagttccacgcctgtggctggtcggtggtgctgcacgccaacacctccagcgccgagctgcagcaggctgcgttcgatttcgacaacgtgcgcccgggcagcgtgctggccctgcaggccgacctgcgtgacgccgacgccctggccgatctggtcgaacaggccgtcacccacttcggccgcctggacgcgctggtcaacaacgcctccaacttcttccccaccccgctcggccaggtcaccgccgaggcgatggacgcgctgtatgcggtcaatgcacgcgcgccgctgctgctgtcacaggcggcagcgccctacctgcgccgccagcagggctgcatcgtcaacctcaccgacctgcacggcaccgacccgatgcgtgaccacatcgcctacaccatggccaaggccgcgctggagatggcaacgcgcgcgctggcgctggagctggcgccgaaggtgcgggtcaatgcagtagcgccgggtgcgatcctgtggccggaacagggcaaggatgatttcgcccgcgaggcgctgctggcacgcacgcctttggcgcggatcggcaccgtcgaggagatcgccgaggcggtgtactggctggtggccgaggccagcttcgtcaccggccacaccctgcgcgtggatggcgggcgtacggtcagctga

SEQ ID NO: 495124 - DNA, 1185 bp, Stenotrophomonas maltophilia
atgcagcccaccttccccctgcccgaagccgatgccttggcccacagcgaccagctggccgctgccctgcgcgccgaaatccttgcgcagggcggggcaatgccgttctcccgcttcatggagctgtgcctgtacagccccggctggggctattacagcgccggcgccagcaaattcggcggcagtggcgacttcaccaccgcgcccgagctcggcagcctgttcgccgggagcgtggccaacgcgctggcgccggtgttcgcccagctgggtacgcaggcgcggatgctggaactgggcggtggtaccggcgccttcgccgaagcggtgctgctgcgcctggccgaactggacgcgctgccgtcgcgctacgccatcctcgaacccagcgccgacctgcgcgagcgccagcagcaacggctgcagcagaacctgccggccgagctggccgcacgcgtggactgggtcgatcgcccgttcgaagaggactgggagggcgtggtgtttgccaacgaagtgatcgacgcgctgccgacgccgcgcttcctgatccgggatggcgaggtctacgaggaaaccgtggaactggacgccgaaggcaacttcatccgtggtgcgcagccggccgacatcctgctcaacggtgcggtgcgccacatcgagcgctacctggagcgccccttcgccgagggctaccgttccgaggtgctgccgcagctgccgtactggttgcaggcggtggcgggcggcctgcagcgcggtgcgatgctgttcatcgactacggttacaaccgtggcgagttctaccagcacgaccgcgatgagggcaccgtacgcgcgttctaccgccaccacgtgcacaacgacgtgcaccgctggccggggctgcaggacatcaccgcgtcggtggatttcaccgcgatggccgaggccggcatgcacggcggtttcgagctggcgggctactgcagccaggccagcttcctgctcggcaacggcctggaccaggtgctgtcgctggccgaggagcgcactgatgaggtcggccgcatccagctgcgcgaccaggtgaagaagctgaccctgccgaccgagatgggggagcgcttccaggcgatcggcctgcagcgcggcgtcgacttcgagcccgccttcgagctgggtgacctgagctggcgcctgtga

SEQ ID NO: 495125 - DNA, 393 bp, Stenotrophomonas maltophilia
gtgaacgatgcgctgccgctgatcaaaccactgcggcggctgcggctgtggaccgcactgtggttcagcgcggtgttgctggtgatcgtggtctgcctgatcccaccgccaccgattccgttgccggaaaacggcgacaagggtgagcacttcctcgcctatttcatcctggctggcagcgcggtacagctgttccggcacggacgtccgctgctgtgtgtgggcgtgggcctggtgctgatggggatcggcatcgagttcgcgcagggcgcattgaccgatgaccgcatggccgatccgatggacgcgctggccaacacgatcggcgtgctggccggcctggctacggcactgaccccgctgcgcgatctgctgctgcgctggcgcgggtaa

SEQ ID NO: 495126 - DNA, 2358 bp, Stenotrophomonas maltophilia
atggtcaagccttcccgcgcccggatgcgcagcgcagtgctgctgggcagcctgctcgccctgttgccggcactgccggcacttgccgccgaccccatgccggccgctgaggcacccggcccgcagctgcgtgccggcagtctgatgctgattcccgcccccagcaatgtgcagcctggccagggcagcggcatcaccgtgcgcgccgataccgtgctgcaggccgaaggcgaggccgcacagcgcgtcgccagccagttcgccgacctgctggcgcgcagtggcggcccgcgcctggggctggccaagggcaagacggcggccaggaccggtggcatccgcttccagatcgtgcccaccttccgcgacagcggcgagggctacacgctggaaagcaccgcacagggcgtagtggtacaggccggtaacgaaaccggcctgttctatggcgcaaccaccctcgcccagctcgccaccggcggcagcaacggcgtgctgccagcggtgcagatccaggacgctccacgcttcagctggcgcggtttcatgctcgactcggcgcggcatttccagagcctggacgagatcaagcgcgtgctcgacgcaatggccgcgcacaagctcaacaccttccattggcacctgaccgatgaccagggttggcgcatggagatcaagcgctatccgaagctgaccggagtgggcagctgccgcctgccggccggcgacggtggcatcgatccggtcactggcaaggagcatccgtattgcggcttctacacgcaggaccagatccgcgaagtgattgcctatgccgcgaagctgcatatccaggtgattccggaaatcgatgtgccggggcacgcgaccgcagcgattgccgcatacccggaactgggttcgatcaataccccgctgaagccgatcagcgaatggggcgtgttcccgaacctgttcaacgtggaagacagtactgtcaccttcctcgagaacgtactggaggaagtgatcgaactgttcccggccaagtacgtgcacgtcggcggcgacgaggcggtcaaggaccagtgggaagcctccaggcaggtgcagcagcgcatgcgtgcgctgggcatcaaggatgaaatggccatgcagagccacatcatcaagcgcctggagaccttcctggaggagcacgaccggcgcctgatcggctgggatgaaatccttgaaggcgggctgccgccgcaggccacggtgatgtcctggcagggcaccgaaggtggcctggccgcggccagtgctggccatgacgtggtcatgtcgcccgtgggctacctctatctggattacctgcagacggcctcgccgaacgaaccgccgggccgcccggcccaggtcaacctcggcaagctgtacaacttcgagcccgtgccggccgagctggccgctgacaagcgcgggcacatcctcggcctgcaggccaacatgttcaccgaacacacgcgcacctatgcgcgcctgcagcacaacctgttcccgcgcctggccgcggtggccgagaccggctggagcacgccggaacatcgcgacttccgcgatttcctcgcgcgcctgcccgcgcagctgcaacgctaccgcgcctggggcctggcctacgcgcagaccccgttcgaagtgggcgtggactacaccgacaaccgcgccgccaacacggtgaccgtgtcgctggccaacccgctgggctatgaggtgcgctacagcaccgatggccagccggtgacggcgcagtcgccgctgtaccagcagccgctgaccagtacgctgccgaccacggtgcaggccgccgcgttctaccagggccagatgctggcggcgaagccgacggtcgcggacttcagtgcgcaatcgctgctcagccgccgcagtgacgaactgctcagctgcgtaggcaagaaggggctggtgctgcgcctggaagacgatggcccgcgcgagggaaaccgcgcagtgttcaacgtggacatcttccagccatgctggcgctggccacaggcacagctggacggcatcggcagcgtggaagtccgcgcggggcgtattccgtactacttccagctggcccacgacgagcccaagcgtcgcttcgagaaggccaagcgtgcgcatggcgagatgctggtgcgtcgcggcgactgcagcggcaaggtgctggccgaagtgccgctgccggccacgccggatgccgatggcttcgtgacgctgcgtgcgacgctgccgaagggctcccagggcaccggtgacctgtgcatcaacttcaccggcgacacgcgcccggcgatgtgggtgctggatgaggtcacgctggggaagtga

SEQ ID NO: 495127 - DNA, 2664 bp, Stenotrophomonas maltophilia
atgaatacccgcaagaccctgctttcggccgccatcgtcagctgcatcgccttcagtgcgcacgcgcagcaggctgccccgaccgccaccgacctggacaccgtgaccgttaccggcatccgtggctcgatggaaaaatcgctggacaccaagcgcgaagccaatgcgcgcgtggaagtggtcaccgccgaggacgtgggcaagctgccggcgcacaacgtcgccgacaccctgcagcgcctgccgggcgtcaacatcagctcgtccagcgccgatgaaggcggtttcgacgaagccgaccgtgtcagcctgcgcggcaccagcccgagcctgacccagaccctgatcaacggccacaccgtcggttcggccgactggttcgtgctcagccagggcaacaacgtcggccgcagcgtcagctactcgctgctgccgtccgaactggtcagctcggtggaagtgaacaagtcctcgcaggccaagctgcaggacggcggcaccaccggtaccgtcaacatcatcacccgcaagccactggaattctccaagccgttcaccgcggaaggctcgatcggcctggtgcgctcggaccaggccaagtcgaacgacccgcaatattcggcgctgttcaactacaagaacgacgaaggcaccttcggcgtgatggtgcagggcttcagccagaagcgcgaactgcgccgtgaagcgcaggaaatcccgggtggcttcttcaagatcggcgcaaacgatccggtcgccaagaccaatccggacctgatcggcgtcaacgttccgggcctgctgggttcgaccctgttcgaacagacccgcgagcgcaagggcggcctggtctcgctgcagttcaagccgagcgacagcctcaccctcggcctcaatggtttcagctccgagctgaaggcgaacaactacaaccgcaacttcatgatgttcggcaacagcttcgccaagtcgcaggcgccggatccgggctatgtggtcaaggacggcgtgctgaccaacgccaactacaagggcgtgcccggcaccgactatgcggtgtacgacatgatctaccgcgagtcgaaggccaagtcgagctatgtcaccttcgatgccgactggcagatcagcgacagcctgaccgccaagttccaggccggcagcaccaagggtaccggcgagacgccgcgccagtacatcgccgaggtcaccctggccaacggcggcggcgccagctgggctacccacggcaatggctcgccgatcgactggaacgtcggcggcgacatctcgcccaacggcgtgaccagcttcggcacctggggcaaccagcaggtcaccgctgaagacaaggagaagtgggccacgctcgatttcaaccagtacttcaacgatggcggcgtgctgagctcgatcgacttcggcctgcgtttcgccgaccacaagcgcgaagcgctgtcgccggaaggtgcaaccccgggtgacatctggagcgcgctgaagaacggtgcgacggccaactatcccagcggctttgccggtgacatcggcggcaccttcccgcgcaacctctggtacttcaccccgggcgcgctgaaggacgcggtgaccaacaactccacctggctggccggcaatgatggcccgaccggtcgccacaactatggcgccgagtggaaggtgaaggaaaagaacttcgccggctacgtgcaagccaacttccgcggcgactggtggagcggcaacgtcggcctgcgctacgtcaacatcaagcaggacatcgacacctacaacgccgtcagcaaggccgccgatgccgatgtcagcagcctgttcggcatgtgggagcgcctggccttccagaacaagcgcaaccgcgtattgcccagcgccaacatcaagttcgacctggacgactcgctggtgctgcgcgtcgccgcctcgcagacccagaccctgccggactactcggcactgggtgcctcctcgtacggttcggacctgaaccgcaccggcggcggtggcaatccgaacctcaagccgaccctgtcgaccaacctggacgccaacctggagtggtacttcatgccgcgcggcctgctgtcggtgggcgcgtaccacatggacctgaaggactacatcgccttcgacgtggtctcgcgccagctgtacagcgaactgaccaaccagcttgagacctaccagatctccaccccgatcaatgccgacggcaaggtcaccggcgtggaagtggcctacgaacagccgatcggcgagtacttcggcgtcaatgccaattacacctacgccaacggcaccacctcgcacacctggtcggacggctcgcacaacctgctgggcacctcgaagaacacctacaacgtgggtgcctacttcgagaacgagcgctttggcgcccgcgtcagctatacccgccgttcctcgttcctgatcagcctgtcgggcaccaatccgtactaccaggatgacttcggcacgctgtcggcgtcgctgagctacaaggccaccgactggctgagcatcaccctggatggcctgaacctcaacaacccgacctacaagtactaccagactgcggccatcccgacctcgttctacagcaacggtcgccagtactacctcaacttccgcttcaagtactga

SEQ ID NO: 495128 - DNA, 1020 bp, Stenotrophomonas maltophilia
gtgaccgccagccaccccgccccgtcgcatgtcctgtcccgcgtcgcgccctcgttcctggccgcggacgtcggtggcacccatgtgcgcgtggcccgggtccaggccagcggtgacaccgcccatccggtgcaggtgctggaataccgcaagtaccgcaacgccgaccatgccggcctcagcgcgatcctgtctgacttcctcggcgaaggcccgcggcccacgcattgtgtggtcgccagcgccggctacgcccgcgaggacggcacggtgatcaccgccaacctgccgtggccgctgtcggcacgccaggtggaggccgatgtcggcctgcagcgggtctacatcgtcaatgacttcgaagcggtggcctatgccgccgcgcaggtggacgccagtggcgtgctgcacctgtgcgggccggacaccgctgcgcgtggcccgaccctggtggtcggtcccggcaccggcctcggcgccgcgctgtggatccccactgcgcacggcccggtggtgctgccgacggaagccggccagccgaccctggccgcaagcaccgaactggaaatggccatcgtccgccacatgcagcgcgaccgcgcgcacgtgtcgatcgagcatgcgatctccggcccgggcctgatgaacctgtaccgcgcggtgtgcgcgctgcaggggcaggcaccgacgctggccagccccgatgcggtcaccgccgccgccatggccgataccgatgcacacgcgcgccaggcgctggacgtgttctgcggcctgctcggcagcaccatcggcgacatggccctgttctatggtgcccacggtggcgtctacctggccggcggcatcctgccgcagatccgcgaatacctgcacgccagcaccttcgtcgaacgctacctgcagaaggggccgatgggcgaagcactggcacgcatcccggtgaaggtcgtcgaacacggccagctgggcgtggtcggcgctgccagctggtacctgcagcagcagtcggccgcctga

SEQ ID NO: 495129 - DNA, 1293 bp, Stenotrophomonas maltophilia
atgtccgccgtccccgctgcaagcgcgcgcccgaacgtggccacctccatcgccatcgtcggcgtgctgttcttcctgatcggcttcttcacctggctcaacggcccgttgatcaccttcgtcaagctggccttcgaactcagcgaggtcggcgccttcctggttctgatggtgttctacctgtcctacttcttcctggccctgccggcgtcgtggatcctgcgccgcaccggcatgaagaagggcctgagcctgagcctgctggtgatggccggtggtgccgccctgttcggcgaattcgccacccagcgctggtacccgggtgcgctcggcggcctgttcgtgatcggcagcggcctggccctgctgcagacggccatcaacccgtacatctcgatccttgggccgattgaaactgcggcacgccgcatcgcgctgatgggcatctgcaacaagatcgccggcatgctggcgccggtgctgatcggcaccctggtgctgcatggcatcggcgacctggacaagcaggtgcaggccgccgacgcggtcaccaaggtcgcgctgctcaacgaattcgccgccaagatccatgcgccgtacctggcgatggccgcgctgctggtggtgctggcggtggccgtgctgttctcgcctctgccggagatcaagtcctccgaagccaatgcaacgccgtcaggtgcaccaggaaccgccgagcgccgcagcatcttccagttcccgcatctgtggctgggcgtgctgtgcctgttcgtgtacgtaggcgtggaggtcatggctggtgatgcgatcggcacctacggccacggtttcggcttgccgctggaccagaccaagatgttcacctcgctgacgctgggtgcgatgttggccggctacgtggtcggcctgctggcgatccccggcctggtctcgcagtcgcgctacctgaccatttcggcagtgatgggcgtggtgttctgcctgggcgcctgggctacgcacggctacgtctcggtgggcttcgtggcgctgctgggctttgccaacgccatgatgtggccggccatcttcccgctggcgatccgcggcctgggccgcttcaccgagaccggctcggccctgctggtgatgggcatcgccggcggcgcgatcattccgcagctgttcgccgtgctcaagcagcacatcgacttccagctggtgttcgtgctgctgatggtgccgtgctacctgtacatcctgttctattcggtggtcggccaccgcgccggcctgccgcaggacaaggtctga

SEQ ID NO: 495130 - DNA, 1068 bp, Stenotrophomonas maltophilia
atgcgcagagcgaccatcaaggacgttgcggagaaggccaaggtctcgctgaagacggtctcgcgggtgatcaacaacgagccctcggtgatgcaggccacccgcgcgcgggtgctgcgtgccatcgccgagctggactacgaacccgatccgtccgcgcgcaacctgcgcagcggcaccaccttcgtgatcgggctggtctacgacaacccgaacccgtaccacatcatcggcgtgcagaacggcgtgctcgccgcctgccgcgagaccgggttcggcctgcagatccatccctgcgattccagttcgccgctgctggccgatgaactggctgactgggtgcagcgttcgcgcctggccgggctggtgctgaccgcaccgatgtccgagcgccgcgacctgatccaggcgctgaccgcgcgtggcatcaagctggtgcgcatcattgcggccaccgaagatccggccgacggtgcctgcgtgttcgtcgacgaccgcgaggccgcctacgagatcaccgaacacctgatccagctggggcaccagcgcatcggcttcctctggggcggcagctcgcaccgctcctcgggcgaacgctatgccggttatgaggccgcgttgaaggactacggcatgaccgtggacaagcacctggtggtgcagggcgactacaccttcgacgacggtttccgtggcgcgcgccgcctgctggcgctgcgcgaaccgcctaccgccatcttcggttccaacgacgaaatcgctgccggcgtgctggccgccgccaagtcggccggcatgaacgtgccctacgacctgtccattgccggtttcgaggacagcccgttctcgcgccagtcgtggccgccgctgaccaccgccaagcaggccaccgaagacatcgcccgccatgccgcgcgcctgctgatcgcgcagctgcgcagcgacgcctacgacgatgcgccggcaccgctgcacaaccagggcttcgtgccgcagctggtggtgcgcggttcgaccgcgccgatgcgcccggccggcgcacgcccccttccttccgatcctgcctga

SEQ ID NO: 495131 - DNA, 1029 bp, Stenotrophomonas maltophilia
atgtcgctgtcagaccccaccgctaccctgatgttcgccgaggccgctgaagcggccgacgtggttgcccgccagttctcgcgaaaccacgccaccctggaaaccctggccgccagcctgcgtgccgcgccgccgccgttcgtggtcacctgtgcacgcggcagctcagaccacgccgccacctatggcaagtacctgctggaaacccagctggggctggtggtcgcgtcggcctcgccatcagtgggctcggtctacgccgcaccattgcagctgcgcggcgcactgttcatcgtcatctcgcagtcgggcaagagcccggacctgctgcgcaacgccgaggcggccaaggccgccggcgcgcgcgtgatcgcgctggtcaacgtcgaggattcaccgctggcgcagttggccgacacggtcatcccgctgcatgccggccccgagaagagcgttgcagcgaccaagagctacctggcctcgctggccgcattgctgcagctggccgcgtactggaagcaggacagcagcctgcgtgcggcgctggacctgctgccggacgcgatgcgtgaagcctggcagtgcgactggagcgcggtgaccgagggcctggtcgaggccaccaacctgttcgtgctcggccgcggcctgggcctgggtgcggcgcaggaagcggcgctgaagttcaaggaaacctgcagcctgcacgccgaagcctacagctcggccgaggtcaagcacggcccgatggcgctggtcggccgtggcttcccggtgctggccttcgcccagccggacgagaccggcgccggtacccgtgcggtggtcgatgaattcaacgcacgtggtgcgcaggtgtggatggccggtgccggcggcaacctgccggtggccgccgcgccgcatccgctgtgcgcaccgctattgaccgtgcagagcttctatcgcgccatcaatgcgctggcgctgcgccgtggcttcaacccggacctgccgccgcatctgaacaaggttacggagacggtgtga

SEQ ID NO: 495132 - DNA, 1149 bp, Stenotrophomonas maltophilia
atggcgacggtgctgcgcaatgcccgcatcctggccggcgatgagttccgcgacgacctggcggtggtgatcgaggacggtcgcatcagcgcgctgctgcccgatgccgcgccgcagctgggccacgcggccgagcaggtggacctggggggcggctggctgctgcccggcttcatcgatgtgcaggtcaatggcggcggcggcgcgctgttcaacaacacgccggacgtggcggcactgcgcaccatcgcgcaggcgcaccgccgtttcggtaccaccgcgatgctgccgacgctgatcagcgatgacgtggcggtgatgcgcgaagccatcggtgcaatgcgcgaggccatcacgcagggcgtgccgggcgtgatcggcatccatctggaggggccgtacatcgcgccggcgcgcaagggcacgcacgatgccagcaagttccgcgtgccggacgaagcggagattgcgctggccgcatcgctggataacggcgtgaccctgctgacgctggcgccggagcgcgtgccgctggagaccatccgtgcgctggtcgagcgtggcgtgatcgtcgctgctgggcacactgcaggcacctacgaagagatccgcgccggcctggatgccggcgtgcgcggcttcacccatctgtacaacgcgatgtcgccgttgcagggccgcgagcccggcgcggtgggcgctgcgctggaagaccgcgacagctggatcggcatcatcgtcgatggcgtgcatgtgcacccggccagccttcgcgtggcgttggcggccaagccgcgcggtcgcctgctgctggtgaccgatgcgatgccgccggttggagccgacgatcccagctacgtgctgtatggcgaaaccatcaccgccatcgatggcgtggtgcgcaatgccgccggttcgttggccggctcggcgctggacatggccaccgccgtgcgcaataccgtgcagctgctcggccaaccgctggccgaagcggcgcgcatggcatcgacgtacccggcgcagttcctcaatgtcgatgatcgcctgggccacatcgccgagggctaccaggccgacctggtgctgctggacgacgccctgcaggtgcgtggtacctggattgccggacagtacgaggccgcctga

SEQ ID NO: 495133 - DNA, 1068 bp, Stenotrophomonas maltophilia
atgaacagttcgccgccacgccggctgggctcgatcgatgccctgcgcggcatcaccgtggcggcgatgctgctggtcaacaatccgggtgactggagtgcggtgtttgcaccgctgcgccattcggaatggcatggctgcacgcccaccgacctggtgttcccgttcttcctgttcctggtgggtgtgtcgatggccttcagcgtggcaccgcgcgcgctggatgccgctgcacgcccagcattggcgcgcggcgtgctggagcgtgcactgcgcatcctgctcgccggcgcgttgctacacctgttgatctggtgggcgctgcatacccatcacttccgcatctggggcgtgctgcagcggattgcggtgtgcgcagcgttggtgggtgttctggcggtgtatgcgcggccgcgcgtgcaggctggcgtgctggtcacgctgctggtgggctacaccgtgctgctgatgggcatcggtgatctggcgccatggaccaacccggccagccgcctggacaccacgctgttcgcaccgtggatctaccagtggcacgccgataccggactgggccatgacccggaaggattgctgagcacgctgggtgcgctggccagtaccgtgctcggcctgattgccggtggcctgctgcgcaacggtcgtgcggcggcattggctggcctgggtgtggcaaccgccgtgctggggctgctgctggccacggtgctgccgttgaacaagcagctgtggacgcccagctatgtgctgtggaccggcggcctggccgcgctggcgctgtggctgggccatgtgttgatcgaccagaagcgatggccgccgctgggccgccgtttcggggtcaacgcaattaccgcctatcttggcgcatcggtgatgtcggtggcgctgatggcgaccggcgcgtggggctggatctggcagcaactggccgccgcgatgccgcacgcgctcgagctggcgtcgatgctgcaggcgctggcgttcgtcgcgctgtggtggggcgtggcgtggtggctggaccggcggaagatctatctgaagatctga

SEQ ID NO: 495134 - DNA, 3027 bp, Stenotrophomonas maltophilia
atgtcccgtgccgtcccgcgcgcagtgcgtatgcgccgcctcactgtttccgtactgcaggctttggctgttccctccgtcatgctgttgaccgccagcgccgcctgggccggctgtgacagcgtcgcccccgtcgccggacagacggtcacctgcgatgccaatgcgccgaacccgcagaccgttcccgtcaccgccaatggcgccgccggcatcaccgtcactgtcgccagcacggcgcagctgcagcaaagcggtggcagcagcgcgatttcgcttgtcggggccggtgggcacctgttgtccaacctgggcacgatcagttcggtgggcggcgtggcggtgcagctcggtggcggcagccgcgtcgagaactcgggcagcatcagcaccggcaacaacaccgccctgcagttcgtcggcgcgggcgacagcgtgctggtcaaccgcggaacgatcagcgggcgcaccggcgtgcagttcggtgccggcaatgatcgcctggacatgcaggctggcagcatcagcggcagtgtgctgcagggcgatggcaatgatgcgctgctgctggacaacggtacgatcgacagcgtcgaccagggcagtggcgatgaccagatgaccgtcaccggcggcaccgtcaccggcgtggtggcgcagggcagtggccgcgatgatttcgtcatgagtggcggcacggtcggcgcgctgcagcagggcgacaacatcgataccttccgcatgagcggtggccgcatcatcggtgcgttcgaggatggtgaccaggcgtggatgaccgctggccgcatcggccgggtcaacatgaagctggacaagaacctgtgggaccagtccggcggcaccgtggacggcaacgtggtgaccggcttcgacaccgacaccatcatcatctcgggtacggcctatatcggcggcaacatcagcgtcagcggcggcaacgacagcgtgaccatcaccgacggcaccgtgcgcgggcaggtactgctcagtaccggcaacgacaccttcaactggaatggcggcggcatcgtctacggcgcgatcgacatggggccggacagcgacgtcgccgacctcggcaacctcaaccagggcaacctgggggcggtgccgctgttcgacggtggcggtggcatcgaccagctcaactttcacaacgtcaagactgccggcgtgggccgcttccagaactgggaggcgatcagcctggctaacagcaccgagctgacctttgatggcgacctggtgctgggcgacagcggaaccggcaccggcacgctcaccgtggacgacaccagcaccgtctacgcgggcagtggcggccatgcagtccgtccgttcaacagtggtgcactggtggagatggtcaatgccgggcgcatcgacctgaccggcaccggcgcaggcgacgtgttcaccgtgcgtggcaactaccgtggtgacggcggtggcctgtacctgcgtaccgtgctgggtgcggacaattccagcagcgaccgcctggtgatcgatggcggaaccgccaccggtaccaccggcatcggcgtgctcaatgccggcggcagcggcgccgccacgctggccgatggcatcctggtggtgcaggccttgaatggtggccgcactgcgccgggcgcgttctcgctgttcgcaccggttgcagccggtgcctacgagtacttcctgttcaagggtggtgtcagcgccggcaccagcgagaactggtacctgcgatcgacgctggtgaccggaccaacgccggcacccaacggcggcggcactgccacgccaccgcccctgacgccgccggtcgcaccgccgccggcgatcaccccggcaccgccgccgccgcctgaaggcgctaccgatccgaacctgaccgccggcgaggccgcgccgccaccgccgccaccggaaccggcgccggtggcgccgcccagcgacccggcggtgccggacgtgccggtggccggcggtgcgttgcccggtaccggcaccccaccaacgccgggtgcacgcccggccgaaggcgcggtggtgccgctgtaccgcgtggagaccgccgcctacgccgtggtgccaccgctgctgcgcgagacctcgctggccagcctcggtaccttccacgagcggcagggcgaacagcgcctgctgtacaaccagggcacagtccgcaccgcctggggccggttggtggggcagagcagcgagatccactggaagggtgatgcgcagccgggcttcgatggcgatgtgatgggcctgcaggccggtctcgacgtgtgggctgcggcgtctgacaaccaccgcaaccagatcggcgtattcgttggccgcacccgcgcgcagggcaagaccacgggtctggcactgggctgggagaacgtgcagataggccagaaccgcctggatgacaagcacgtgggcctgtactggaccttcaccgacagcagtgggggttacatcgacgccgtggcgatgcagagccgctacgacggccgcgtgcgttcctcgcgtgggctcggcttcggcctgagcggcgacggtaccagcgtgtcggtggaggcgggcaagccgctgctgcacttcgggcagtccgcatggtggctggaaccgcaggtgcaggtgatctggcagcgcacttcgctggatgaccgtcgcgatgaagtatcgagcgtgcgcttcgacaacgacaacgcgtggaccggccgcatcggcctgcgcctggcgggcgattaccagttggccgacaacggctggcaaccgtatttcaagctcaattactggcatggccgttctggtgaagaccgcatccgtttcgacgacgacgtgatcgtcaattcgcagcgctcacgcgcgctggaagccggcgtgggtgtggtcgggcgcttcaaccgaacgatcagcgcctatgccgtggccgactacacgcgcgaactgggcggcgaccgcaacgagaagcgccgcgtcatcgaaggcaacatcggcctgcgtgcggactggtag

SEQ ID NO: 495135 - DNA, 435 bp, Stenotrophomonas maltophilia
atgaacacgccccaccccacctatccacgcctgcaggccctgctcggcggtgcactgcccggcctgcagctgtccaacgccgcagccgaagcgttggaaggtgcgctcgccgaagtcaacgaacaagcgccgccatcggcgttcttcacccggttgcgcggcatcgctcacaaccacgcagccgacggccaggcgtggcgcgagcagcaactcagcgaggcgcgcggccgggacttggccgaggcaacgcgctgcctggcggcagtgtctgcgtgtgggggcatcttgttggcggcgcagtcggcacgcgagatggatgatgcgcaggcgcagtgtccgccgcaggtggaggaagggctgctacatgcggtggtcgtgttggccgatcatgccggggcgttggtggaaccggatgcatgcgcaccgctgttgtag

SEQ ID NO: 495136 - DNA, 1044 bp, Stenotrophomonas maltophilia
atgcaggttcgcaagggagtgcgtcgcatcggcgcgctgatgctcgtgttgctggcgaccgtcgccatggccgatacgccaggcgcggtcgaggtgccctcgccggaggcccaggccgagatcctcaatctgcttgaacgccaggcgctgtatcgcgatcgggtggactggcccgccatccgcatccgcctgcaatcggcgcagggggatcccgcgcaacggctggccgttctgcgcgaagccattgcgctcagcaccggccaccatggtgcgtggaccacgacccagcgtcagcgcgaatccctcgcgcgtgcgcagcaggccggtgccgccgccgtggaccgggccaaggccgctgatgcggtggatgcgcgcatcggctgggtggtcatcgagggctatgcctcctcgccgggcgcgacgccgcaggaaaaattccgccaggacatccagcgtgccgcgcggtggcagcaggtcatccgcagcaaggacgacggcgcgcgctgtggctggatcgttgacctgcgggacaacggtggcggctccatgtggccgatgctgctgggcatggcaccgctgctgcgcacctcggtggtgaacaatgaggacgtcggcgcgttcgaaaccgcgcaagggccgcagcgctggacgttgacggcgactgcggtgcagctggcgggcaggccgctgctggacttcggccagtccggccatgtagtgcggcagcctggcgcaccggtggcggtgctgttcgggccccgcaccggcagttcgggcgaggcctcggtgctggcgtggcgtggccgcccgcaggcgcggagtttcggccagccgaccgcgggcgtctccaccggcaatgtcgtgcacacgcttgccgatggcagtcgcctgctgctgaccaccagcgtgatgcgggaccgcaatgatcgtggcgatggcctgaagatcgaacccgaccagcgcgtcgagggtgacgcggccactgtggccgccgcccaggcctggctgctggcccagcccgcctgccaggtcaaccggacatga

SEQ ID NO: 495137 - DNA, 336 bp, Stenotrophomonas maltophilia
atgatcctgatcggccaacaggaacgggtgctgatcgtcggccccaccgaagcgcaccactgcctgcgctgccagacggaaaccgagttcgcgccgcagctgcgctacaagatggcgcgcatcgacctgctgttcggcttcacctaccagcgccgctacgagctggcctgcacccggtgcgagcacggctgggtgctcgataccgagaccatggaccagcagcttggcggggtgccgatcccgtggcggcaccgcttcggcctgccgttgatgctggtgggggtcgccgtgctggcggtggccggttggatgtggcggcacggatacatcggttga

SEQ ID NO: 495138 - DNA, 435 bp, Stenotrophomonas maltophilia
atggaccacgacaccccgttcgaacccctcaacgatctcgaggtgcgcctgctgcaggcccaggacggcacgctgaccgcagcgcagttcctcgacggcctgctgacctcgacggcgttcgtgctgctggacaaggccattggtgaggatggcgcctgggacgagagcatctcgccgctggtgctgaccagcgagagcggcgagccgatgttcgcggtgttcaccgcgcccgagcgcgccggcctgtggcacgagcagctgccgcagtttgcccatgccatgccgatcgcggtgcacgcgctgctggccggtatcggcgacggcgtcggcctggtgctgaacccgggcctggacgtgggcatggagatgattcccgatgccgtggcccagctgaagcagcgtgcggcggcgattacccgtgggatggcgcactga

SEQ ID NO: 495139 - DNA, 1221 bp, Stenotrophomonas maltophilia
atgaagatctatcttgtcggcggcgccgtgcgtgaccgcctgctgcagcgacctgccggcgaccatgactgggtggtggtcggcgccacgcccgcgcagatggaagcgcagggcttcaccgccgtcggccgcgatttcccggtgttcctgcacccgaaaacaggtgaggaatacgcgctggcgcgcaccgagcgcaaatccgggcgtggctaccgcggcttcgtggtcgacgccgacccggcagtgacgctggaagaagacctgcagcgccgcgacttcaccatcaacgcgattgcctgcgacgaagacaccggcacgctggtcgatccctacggcggtgtgcgcgatatcgagcaacgcgtgctgcgccatgtcggccccgcgttcgtggaagatccattgcgtgtgctgcgcgcggcgcgcttcatggcgcgcttcgcaccactgggcttcaccgtcgccgaagagaccatggcgctgatgcgcgaggtcgccgccagcggcgagctggacgcgctggtgcccgagcgcgtctggcaggagctgcgcaaggcgctggtcagtgaacggccctccgccttcctgcgcacgctgcacgatgcgcaggcactgggcccgatcctgcccgagctggaagcgctgtatggcgtgccgcaacgtgctgagttccaccctgaagtcgataccggcatccaccaggaaatggtcagcgacatggctgccaggctggcgccgggcgatgacctggtcggctttgccgcgcttacccatgacctgggcaagggcctgaccccgccggaggaatggccgcgccacatcatgcacgagcaacgcggcatcaagccgctgaaggccttgtgcgcacgattgaagattcccgccgaacaccagcagctggccgaagcggtgtgccgcgagcacttgaacgtgcaccgcatcgatgaactgcgcgatgccaccgtgctggaactgctgggccgctgtgatgcgctgcgccggccggaacgcgtgacccgcatcgcactgtgctgcgaggccgacaagcgcggccggctcggcttcgaggacgccgactacccacagggcgaaacgctcaagcgcctgcaccaggcggcgctgtcagtgcaggccagggatctggataccacgcatctgaagggcccggccatcggcgaagcgctggccaaggcgcgggtgaaagccatcgccgccgcccgctga

SEQ ID NO: 495140 - DNA, 1986 bp, Stenotrophomonas maltophilia
atgctgcatgccatgacccgacgctcttcgaccgccctgtccctgctgcccttggccaccacgctgctgatcggctgcgccaatgcccagtccctcgatgcccagaacgcgcagttgaaagccgcgatcgcggccgccgaacgcggccagttcgatcctggccaggccgctgcgctcagccgccatccggcgtatggctggctggagtacgccaacctgcgccgcaacatcgacaccgtcgataccgcgcaggcacaggccttcctcaagcgctatgagggccaggccgtggccagcacgttccgcagcgtgtggctgccctcgctcgcccgccgccaggactggccgaccctgctggccaactgggcgcccaccgacaacgccggcctgcgctgtgcgcagctgaccgcgcgccaggtgaccggcaaggtcgatccgcagtggatcagcgaagcacaggagctgtggcgcaagaacggcaagccgctgccggacagctgcgatgcggtgttcaccgtgctgcaggcacaaggcggcctgagcgacgccctgcgctgggaacggatcgatgctgccgccgacgcgcagcagcccgccgtgatgcgcagcgcggcccgcggcctgcctgccactgacctggcactggccaacacttacgccgccttcgtcgacaagcccaacgccagcgccctgaactggccccgcaacgagcgcagccggcgcatcgccaccgatggcctggccaagctggccaaggccgacccggccgccaccgaacagcagctgccgcagtacgcgcaggcactggggctgagtgccgaccagcagggccaggtgctgtaccagatcgcgctgtggacggtggcgtcctacctgcccgattcggcacgccgcctcaacgcggtgccggagtcggcctatgacgaacgcctgcacgagtggcgcgtgcgcgaagcgatgtcgcgcggcgactggccggcggcgctgaccgccatccgcaagatgggcagcaagcagcgcagcgatccgcgctggcgctacttcgaaggccgcatgctggagaagaccggccaggcccagcaggcgcagccgctgttccgcgaggccgcgcgtgcatcgaccttccacggcttcctcgccgccgacaagctgcagcagggctacacgctgtgcccgtggcagcccaacgacagcgcgcaggctcaggcggtgatcgcgcgcgacccggccatccagcgcgcaatggcgttgtaccagatcgatcgcgctggctgggccgtggccgaatggaacagtgcactgtcgcgcttcgatgacacccagcgtcgcctcgccgtgcgcgtggcgcaggacaacggctggttcgaccgcgccgtgttcgcgctcggcaagcagccgcaggagcagcgcctgtacgacctgcgcttcccgctgcaccacgacgccaccatccgccgcgaatcggcacgcaacgcaatcgacccggcctgggtggcggcggagatccgcgccgagagcaccttcaccccgcgtgcgcgctcgcctgccaacgccatgggcctgatgcaggtgctgccagccaccggtgccggcgtggccaagtcgatcggcctgaccggctacggcggcgccgacagcctgtacgacccggacaccaacatcgccatcggcaccgcctacctgcgccagctgatgaacaagtacgacggcctgccctacgtgaccatcgccgcgtacaacgccggcccgaccccgaccgcacgctggcagagccagcgcccgggctttgatccggacctgtggatcgagaccatcagctacaaggaaacccgcgagtacgtggcccgcgtgctggccttcagcgtgatctacgactggcgcctcaatggtgatgcgctgccgctgagcgatcgcctgatgggccgcctggtggacaagcgcaagcgcttcagctgcgccgccaacgccgaccagggcggcgattga

SEQ ID NO: 495141 - DNA, 408 bp, Stenotrophomonas maltophilia
atggcgttcagtagcgcaggaagaagcggcccgctggcggacatcaatgtcacgccactggtggatgtgatgctggtgctgttgatcatcttcatcgtaaccgcgccgatcgtggcccggccgattcccgtgcagttgccacaggccaccgatcgcacgatcgatcgccccgaaccgccgccgccgatcgagctgcgactggatgcgtcgaaccagctgagctgggatggccagccgatggcgatcggcgatctgcaggggcgcctgcaggcgcaggccggcgagcatgccggcaacctgccggagctgcgcatcgccaccgatccggcggccgagtacgaaggcatggcgcggatattggctgcggccgaagccactggcatggagcgcattgccttcgtgcggtga

SEQ ID NO: 495142 - DNA, 408 bp, Stenotrophomonas maltophilia
atgcgatacgggacacagcacgcggcctcactgatggccgcccccaatctggcaccgctggtggatgtgttgctggtgttgctggcgctggtgatcaccgcgctgccgatggcgcaggcgaccggcctcctggcgctccagcagcgcacctcgtgcccaccctggccggcgtcctcaccccagccgatccacctgcacatcgacgcagcgggggcgatgttctggaatggccagccgctcgacgctgtcgcgttgcagtggcacctggtgcaggcgcagcagatgccgcagcagcatcgcccctgggtgcacttggcgatcgccgacgaccccgactacgaagacatggcacgcgtgctgctggccgtgagccagcatgggctgcgcgtcgacgcgcccggtcactag

SEQ ID NO: 495143 - DNA, 2862 bp, Stenotrophomonas maltophilia
atgaagcacctgcaccaccgcccgttggcggttgccgtcacgctgtgcgtgatggccttggcacccctgggtgccgctgcacaatccaccaccaacctcgacgcggtggaagtcaccggtacccgcatcaagcgcgctgaagtagagggccaggtcccgatccagaccctgacccgtggcgacatcgaacgcaccggcctgacctcgatcggcgaagtgctgcagcagctcaccggttccggctctgcgctcaacgccaagttcaactcgtccggcaacttcggtttcccgcccgatggcagtggcgtgggtgccggctcggcgcaggtcgatctgcgccacctgggtgccaagcgcgtgctggtgctggtcgacggcatccgctgggtcaatgaatcgtcggcgtccggtgtgggctcggccaccgacctcaacaccattccactggccatcgtcgagcgcatcgaggtgctggaggacggtgcttcgtcgctgtacggctccgatgccatcgccggcgtggtcaacatcatcacccgccgcgatttcgatggtgggcaggtgacgctgaactacggcgagtacagcaagggcgacggcacgcagaagggcgtggacctggcctggggcaagagtggcgatcgcttcagcctgttcctgggcgccagctggaccaagcaggacccggtattcgccaaggatcgcgagcagtcgcgcttccccattcccggtaccggcctggcgttcggcagcggtggtattccgcagggccgtttcatgttcaccgacccgaacaccggtgcggtgcagaacatcgtgcccaataccggcgtgagcaatccgcggtacgacggcagtgccggctgcagccgcacggatgactatcactgcttcaccaccgccgaccgcttcaacttcgccgaatacaacatggtgcttacgccgtcggagcgcaaaggcctgttcggccagttccgctttgacatcaccgacaacgtgcagtggtacatcaaggcgctgggcaaccgccgcgagtcgaccaaccaggccggccccgagccgctgttcttcggccccgatggcgccaccggcaatccgttggccgacaacatcgtggtctcgcgcctgaacccgtacaacccgttcggcttcgatctcgtctccggcgacaacatgagcctgatcggtcgtcgcccggtggagggcggtgcgcgcgtgttcaagcagaaagtggacaccacctacttcgccaccggcctggtcggtgacttccatgccgccgaccgcagctggtactgggacgtcaacggcatgtacagcaagaacaaggccgagcagaccaactacggcagctatgacatctacaaggtgaacatggcgctgggcgatcccgcggtgtgcgcggccacgcctggctgcgtgccgttgaacatcttcggtggcgccggttcgatcaccccggacatgctgaagtggatccagccggtggtgcgcgaccgcagccagaacgaactgagcctgttcaccgccaacctgtccagcgagctgttctcgctgccggccggtccggtgtccttcgccaccggcttcgagtaccgcaagtacaagggcgcctaccagcccgatccgctgacggtgatcggccactacaacggcgtgccgtcgcaaccgacctccggttcctacgacgtcaacgaggcctatctggagttgagcgtgccgatcttcgccgactcctcgttcggcaagaagctggacctgagcctggccggccgctattcggactactccaccttcggcggcgagttcacgcccaagtacggcctgcgctggcaggtgaccgatgacttcgtgctgcgcaccacgtacgccgagggcttccgcgcaccgtccatcggtgagctgtacgactctgccgcacgtgccgacctgcagctgttcgatccgtgctcggtaggcttgggcggcacgccgccgcgtggcagcgcggccaactgtgctgcactgggcgtcccggccggcttccagcaggccaactcgcagatctcggtgaccaccggcggcaaccgcgagctggacccggaacgctcgcgcagcttcagcgccggcttcgtgtggagcccgtggttcggcaacaacgcctcgtggtcggagcgcttcgatgtggaagtcactttctaccgccatgccatcgatggtgcgatccaggccatcaacgcgcagacccagctggacctgtgcgtggatacactggacccgatctactgcaacggcatcacccgtgccagcaccggtgcggtcagcagcttcaacaaccgcctgaccaacctgggttcgatcaagaccgacggttgggacgtggatctgttctggacgctgccgcagacctccatcggccagttcaaggtggggtggaagaacaccttcgtcggccgttacgaggccactggcgcggccgggcagaagcagccgcagaagccgggcgtggaagtggccgacagctcgatcccggagtggaccagcaatgccagcctcggctggacgatggatcgctggagtgccaactggacggtgcgccacatctccgagctgaccgagaactgcggcgatgcggcggccttcccggtgtgcagcaaccaggctgcgggcaccaacacgctgtcggccaccaccttccacgacatgcaggtgggctacaagatcgactggatgaaggggctgcagctgaccgcgggcctgaacaacgtgttcgacaaggatccgccgatctgcctgtcgtgctcgttgaacggctacgacgcttcgacctacgacatcccgcgtggccgttactggtacctgcgcgcggacctgcgcttctga

SEQ ID NO: 495144 - DNA, 2139 bp, Stenotrophomonas maltophilia
atgacccgttccgccttccgtatcccgcagccgcagcggctgtccgttgccgtactcgttgcactctgcgccctggccccggccgccttcgccgacaccgccgccgacccgaccacgctggacaaggtcgtggtcaagggcgaacgcgccgaaggctattcggtgcgccgcacctcggccggtacccgcttcgacctggcaccgcgcgagatcccgcagtcggtcagcatcatcagccaccagcgcatcgaagatcagaagctcgacgacatcatcgacgtgctggccaacaccaccggcgtgaccagcacccagtccgacagcgagcgcaccgagttctacgcgcgtgggttctacatcgacgcctaccagttcgacggcctgccgacgcagatggtgcagaactggagctacggtgattccggcctggatctggcgctgtacgaccgcgtggaagtggtgcgcggcgccaccggcctgctcagcggcgccggcaacccgtccgcttcggtgaacctggtgcgcaagcatgccgacagcgccgagctgaccggcagcgtgtcggtgaacgtcggcagctggggccgcacccgcaccacggtggatgtgggcagcgcgctcaacgccagcggcagcgtgcgcgggcgcgtgatcggcagctatctggataccgacggccagatggaccgctacaaccagcgcaagacgctgggctacgccgtcatcgatgccgacctgaccccggacacccagctgagcgtgggctacgactaccagcagaagcgcgccaatggtgcgacctggggcggcttcccgatgtggtacgccgatggcagcccgaccaactacccgacctcgttcaatccgtcgccggactggacctactgggacaccaccagcaagcgcgcgtttgccaccctgcagcacgccttcagcaacggctggaagttcaggatcggcgccacccacgaccgcaccaacgccgacgacaagctgttctatccgtcctacaccgcgttcgacaaggccaccggcaccggcgtcacgccgatggccggcttctacaacaccgagcgcaaggtcgatggcatcgatggctacatcgacggcccgttccagctgttcggccgcgagcaccagttcatggccggcctgagctacaacaagcgcgaattcgccaactacggtgacttccagatgggtggccccggcaccggctggaatcccttcagctcctatctcgactggaccggcaacatcgcccagccgaactggaacccgctggcgctggccagccagggcaccatcacccagaaggccggctatgccgccacccgtctgtcgctggctgatccgctgaagctgatcctcggtgcgcgctacaccaactggaagagcgaaggcgagaacgacgaccgcgaacacaaggtgaccaccccgtacgccggcctggtgtatgacatcaacgatacctactccgcgtacgccagctacaccgagatcttccagccgcagaccgcacgtgaccgcaacgaccgttatctcgacccggtcgacggcaagagctacgaggtgggcgtcaagggtgcctggttcgacaaccggctgaacgcctcgctggcggtgttccgcatcgagcaggacaacgtcgcccaggtcaccagcgagccgatcatcggccgtccgggtgagttcgcctcgatcgccgcacgcggcaccgtcagccgcggcttcgagttcgagctgaacggcgaactcgccccgggctggaatgcgaccttcggtgcgtcgcgctatgtggccaaggacatcaacggcgccgacatcaacaccaacctgccgcagaccgcattgaagctgttcaccagctacaccccgcagtcgctgcaggcactgaccgtcggcggcggcgccaactggcagaaccgcatctactacccggtgccggcctacggccgcatcgaacagagcggctacgcactggtcagcgccttcgtgcgttaccgcatctcgccggagttcagcgtgcaggccaacctcaacaacctgcaggacaagaagtacctgtcgcagatcaacggctacggtgcctacggcgatggccgcaatggctcgctgacgttcacctgggcgttctga

SEQ ID NO: 495145 - DNA, 552 bp, Stenotrophomonas maltophilia
atggacacatcgccctcccccgcccgtcgcctgcgccgctggttgctgcgcggcctgtggctggccatcgccctcattgccgcgatggcgctgtggaacagcccatgggccgctgcgccgaagctgctgtggacactctctcgtatgccgccggccacgcaactggcggtgccggtggacggcgtgcggccacgccagatcgccgacaccttcggcgcaccacgtggccgttaccgctcccacgccggcatcgacatcttcgccaagcgcggcaccgcggtgcgcagcgtcactgccggcgtcatcgcggacgtcagcgagcgcggcctcggtggccgccaggtctgggtgatcgggcccgggcgcgaacgttactactacgcccatctggacgactgggccgaaggcctggcgcgcggcaaggtggtccaggccggcgacctgctagggcatgtaggcgacagcggcaatgccaagggcacgccgccccacctgcactggggcatctacggcgccgatggcgcgcgcgatccgctgccgctgctgcgctga

SEQ ID NO: 495146 - DNA, 483 bp, Stenotrophomonas maltophilia
atggccaccgcccccgtgctcgacagcttcgaccgcgccatcctcgacctgctgcagcgggacaacaccctgccgcagcgcgaaatcgccgaggccgtgcacctgtccacgccggccgtgcagcgccgcatcaagcgcctgcaggacagcggcgtgatcgcggccaatgtggcggtgatcgccgccgcccaggtcgggcggccactgaccatcatcgtcgaagtgcgcgtggtcagcgagcaacgtgatcacgtggcgccgttcaagcgccgcgtgcaggacgacccggcggtgcagcagtgctactcgatcaccggcgatggcgatttcctgctgctggtctcggccgcgtcaatggaagagtacgaggccattaccgagcggttgttcggcggcgatgacaacatcgagcgcttccgtacgtcggtcgcgctggggacgttgaagcgcagtttcgaagtgccgctggccccggttctgtag

SEQ ID NO: 495147 - DNA, 846 bp, Stenotrophomonas maltophilia
atgttgccggcgctggcggtgctcggctcggtcacctcgctggccatcggcacctcctacgcaaaacacctgttcccgctgatcggcgcgcagggcaccagcgcgctgcgcgtgggcttctcggcgctgttgttgctgctgttctggcggccgtggcgctggaagaccagccgcccggatgcgatcaccatcctgcgctacgggctcaccctgggcctgatgaacctgctgttctacatggccctgcgcacgattccgttcggcatcgcggtggccatcgaattcaccgggccgctgacggtggccatgctgtcgtcgcgacggccgatcgatttcctctgggtgggctgtgcagcggtggggctgctgttgctgctgccgatcggcggtggtccggcgctggatcccgctggcgtgctgtatgcgatgggggctgcggcgtgctggggcctgtacatcgtgttcggcaagcgtgccggccacctgcatgccgggcattcggtgtcgctggggctgctggcggcatccctggtggtggtgccggtgggcgtggcgcatgccggtgccgcgctgctcgacccgaagatcctggccgccgggctgctggtggcgctggtgtccagcgcgatcccgatgtcactggagatgatggcgctcaagcgcctgccgaaggagaccttcggcatcctgatcagcatggaaccggcggtggccgcgctgtgggccatgcttctgctgcacgagcacctgcatgggctgcagtggctggcgatcggctgcacggtgctggcctcggtgggcagcacgacgaccgcgcggcgattgaaggtaccggccgccgcctga

SEQ ID NO: 495148 - DNA, 738 bp, Stenotrophomonas maltophilia
ttgctgacggccaacatccaggccggctcaagtacccgccgctacagcgactatgtgacccgcagctggtcacatgcgctgccggcggggcgcaagcgcagcagcctggacgcgatcgccaccctggcgcgcgaccatgacatcgtcggcctgcaggaggccgacccgggcagcctgcgctcgggcttcaccaaccagacccactacctggcccagcgcgccggcttcaactactggagccaccagccgaaccggcgcatgggcggcgtggcatccagtgccaatggcctgctgagcaagctggaaccggtggaagtgcaggaccatgccctgcccggccgcatcggcgggcgcggcgtgctgctggccaagttcggcgatggtaccgatggcctggcggtggcggtggcgcatctgtcactgggcgcgggctcgcggatgtcgcagctgggcttcatcgccgagctgctgtccgaccaccccaacgcggtgctgatgggcgacttcaactgcctggccgaacgcccggaaatgcaggtgctgtaccagaagacccggctgcagcccccgggctgcatcgtgccgaccttccccagctggcgccccgaccgcgccatcgaccacatcctggtcagcagtggcctgcagactcgtaccgtggaagccgtaccagccgcgttctccgatcacctcgccctggcgatgcagatcgacgtcccggccgacgccctgcgctga

SEQ ID NO: 495149 - DNA, 837 bp, Stenotrophomonas maltophilia
atgaagatccgttacgccctcgccctcgcagcgctgctgccgatcctggccgcctgcaaggccgacgacggcagcaccaacaccaccgcagccccggccgaaccggcagcaaccccggcagccaccaccgaaccggctgctgcgccggcggcgggcagcgaaggcgccgcgccagctgccgctgaaggcgagaaggccccggccgaagcggctccggccgccgcggcggccccgaccaccgccgcgctgactggcccggccccggtggaaggcgccgactaccaggtgatcccgaacggccagccgttccagccggctgccggcaagatcgaagtgaccgagatcttcggctacgtctgcccggcctgcgccgcattccagccgctggtcggcccgtggaaggccggcctgcccagcgacgtgaacttcgtctacgtgccggccatgttcggcggcacctgggatgactacgcccgtgccttctacgccgcgcagaccctgggcgtgcaggaaaagacccacgaagcgctgtacgccgccatccactcgcagaagaccctgaagggcgagcgcggccgtgactcggtggaagacatcgccaagttctacgccgcctatggcgtggatccgaagcagttcgccgccaccatgggcagcttcgcggtgaacgccaagaccaactcggccaagcagttcgcccagcgcagccagatcagcggcaccccgtcgatcatcgtcaacggcaagtacctggtgaagggcaagagcttcccggacatgctgcgcatcgccgaccacctgatcgcccgcgaacgcggtgcggcccaggctcactga

SEQ ID NO: 495150 - DNA, 651 bp, Stenotrophomonas maltophilia
atgaggttgatttcccgcctgctgttgtccgtgctggtgctgctgccgctggcagcctgcgccgccacccccgccaatgccccgctggtcgagggcaaagactacgagcgcatcgcccagccaggcccgttccagccgctggccggcaagatcgaagtggtcgaggtcttcggctatacctgcccgcactgcgcccatttcgaaccgcagctggaagcctgggcggccaagctgccggccgacgtgcgtttcaccccggtgccggcggccttcggtggcgcctgggatgcctgggcactggcctactacgccgccgacgaagtcggcgtggccaagcgcagccacgctgccgtgttcaaggccctgcacgagcagggatcgctgccgatgcagaacgtctcggccgatgagctcgccacgttctacaacgcctacggcgtgaccccggaccgctacctccaggccctgcgcggcgatgccgtgcagaagaaggtcgaggccgcgcgcgcgttcgcccagcgcaccaagatcccgggcaccccggccatcatcatcaacggccagtacctggtgcggggcaacagcttcgacgaccagctgcgcatcgcctcggcgctgatcgcgcaggcccgcgccgcccgcggccgctga

SEQ ID NO: 495151 - DNA, 801 bp, Stenotrophomonas maltophilia
atgcgccacgctcgcgttcttgccgtatccgcccttgccactgctgtagtcgttgccgctgctgcgttcgcgcagaccacgttgaccccgctgcccgacaacgggccgatcaataccgcctcgctggaggtggacttcagcaagacccactggggcgatgccaaggccggccagaccaaggcgacggcctgtgcggcctgccatggcgccgacggcaattccacggtggagatgtatccgtccatcgctggccagagcgaacgctacgtggcccagcagatggccctgatcgccaatggccagcgcagttccggcgccgcggtggcgatggtgccgttcgtgcagaacctcaccccgcaggacatgcgcgatatcggcgcctacttcgccacgcagaaggccaacgcgggcatcgccgatgacacggcggtcaccgatggcccctacaagggcatgaagttctacgagatcggccagcagctctaccgcggtggcgatgccaagcgtgggctgccggcctgcatggcctgccacggccccagcggtgccggcaatcccggcccggcctatccgcacctgggtgggcagcacgccagctatgtcgcgcgccgcctgcaggagtaccaggccggccagaccaacgagaccgacaaggcgcacttccagatcatggccacggtcgcgcagaagctcagcgagcaggaggtgcaggcgctgtcgagctacctgcagggcctgcacaacaaggccgacgatgtggccgctgcggccacgccgacgcaaccggctgccgccccctga

SEQ ID NO: 495152 - DNA, 603 bp, Stenotrophomonas maltophilia
atgtcattgctcatcgaacgcgcccgttaccacctttcggcccacaacgtgcggcaactgccgcccgacgaaggggccgaagtggccttcgccggccgctccaacgccggcaagtccagtgcgctcaacgcgctgacccgccagaacgccctggcccgtgtctccaagacccctggccgtacccagcagctggtgttcttccaggtcaccccggaagcgcatctggtcgacctgccaggttatggctacgccaaggtgccgctggacctgcaggcgcactggcaggccttcatcgacaagtatttccgcacccgcgaagccctgaaggggctggtggtcgtgatggacatccgccatccgctgaaggactacgaccggcagatgctgtcctacgccgtgcagcgcggcctgccggcgcacgccctgctgaccaaggccgacaagctcagccgcagccagcagatgcagtccctgcagaaggtgcgcaaggaactgcaatcggcctacggcgacagcgtcagcgtgcaggtgttctccggcgaagaccgcaccggcgtggacgaagcccgcggcgtgatcggcggctggctggggctggaataa

SEQ ID NO: 495153 - DNA, 972 bp, Stenotrophomonas maltophilia
atgatcctgcgtcccctgccgctgcgcggcgccctgctgctggccctgtcgtccctgccgctggctgcactggccgaagccacctcgcccgctcccacccagcaggtgcccggcgtctaccaccagcgcgtcggtgcgctgcaggtcaccgccctgttcgacggcgtggtcgcgctgggccggcaggaagtggtcgacgtgccgccgacactggtcagccgcctgttggaaggccgctacgtaccggaagacaagaagggcctgcagaccgcgatcaacgccttcctggtgcgccagggcaaccacctgaccctggtcgataccggcaccgcgcagtgcttcggccccggcctgggccaggtgctgggcaacctgcgcgcctccggcgtggacccggccgaggtggacgaggtgctgctgacccacgcccacccggaccatctgtgcggcgtgctcgacgcgcagggcaagccggcctacccgaatgccacggtgtggttgtccaaggccgatgccgattactggctcagcccggccagcgaggccacggcgccgaagggcgtgcgcttcgccttcccgctggcacgcaacgcggtcgcgccctaccaggcaagcggccacctgcgcacgttcagccccggcgatgccctgcccggtggcgcggtggcgatggacacccacggccatacccccggccatgtctcctaccggttcgacagccagggccagtcactgctggtgtggggtgatgtgctgcacttccatgcggtgcagttcgcgcacccggaagcggcattcgaggccgattcggaccgcaaggcggccatcgccagccgtcgcgggctgctgcagcaggccaccgtcaacggttggtgggtggccggtgcgcacctgccgttcccgggcctgggccatgtgcgcagcgagggccaggcctatgcgtgggtgccggcggagtattcgccgttgtga

SEQ ID NO: 495154 - DNA, 825 bp, Stenotrophomonas maltophilia
atgaccggcatgctgccagcggccactgcgttactggccgagatggccagcctggccggctgcgggcgcgccgagggctatgcctgcatcaccgcacgccgcgagcatggcgccagctcggtggaggttccgcaaccgcagttcgcgatcctgctggaaggccgcaagcaggtacgtaccgcacaccagtcgctgacgttcgttcccggcgacatcctgctgctgacccagcggtgccgcatcgacgtggtcaacacccccgatccctgcagcggccgctacctcagtgccatcgtgccgctctgcaccgaagtgctggcggcggcgcgtacgctctggaatgaagagcttcccgcccccggccaggcgatggcgcgactgccgttgatcgaccatggcgcggtgctgcgccagtggcggcaatcgctgcaggacggccgttacagcgacgcgcggctggccctggcctcgctggtgctgaccctgtgccgacagggccacggcaacctgctgctgccgcaggcgccgagcctgggcgaacagatccgcgaccgcatcgccgccgaaccggctcgcgactggcaatcacgcgatgtggaagaacagttcgcgctgagcggcgcgaccctgcgccgtcgcctggcggccgaggacaccagcctgcgccagctgctcaccgaggcccggctggcgcatggcatgcagctgctctacaccaccgacctgccgttgaagaccgtggccgcacgcgcgggctaccggtctgcggccagtttcagcaagcgcttcgccgagcagtacgggctggctcccacagatatttga

SEQ ID NO: 495155 - DNA, 705 bp, Stenotrophomonas maltophilia
atgaaccgtcattcgcgacaccccgaactgcaccgctccgagcgcgtcggctggttgcgtgccgccgtgctgggggccaacgatggcatcgtctcggtggccggcctggtggtcggcgtggcggccagcggcgcctccgccaccactatccttgccaccggcgtggccggcaccgtggccggcgcgatgtcgatggccgccggcgagtatgtgtcggtgcagacccaggccgacaccgaagcggccgacctggcaatggaaaagcgcgagctgcgcgaagacccgcacagcgaactggaggagctggccgcgatctaccgccaccgcggcctggagcctgcattggcccggcaggtggccgaacagcttaccgcccacgatgcactgggtgcccacgcccgcgatgagctgggcatcactgacaccctgcgcgcgcgcccgctgcaggcggcgctggcctcggccggtgcgttcacctgcggtgcggcgctgccggtgctgaccgccctgctcgcgccgaccgacaaggttgcgttgatgaccacggccagcaccctgctcggcctgtgcctgaccggcgcggtggcggcccaggccgggggcgcaccgcctgtacgcggcgcggtccgggtgatgttctggggcgcgctggcgatggctgcggcggccggcgtcggtcgcctgttcggtgcccaggtgtcatga

SEQ ID NO: 495156 - DNA, 1365 bp, Stenotrophomonas maltophilia
ttgtcgagccccagccacgtcgccgatacccccattaccgaccgctcgcagctggtggaggtgatcgcctccggcgagaagccccgcgcgcagtggcgcatcggcaccgagcacgagaagttcgggttccgcctggacgacctgcaccccccgaccttcgagggcgagcgcggcatcgaagcgctgctcaacggcctggtccgcttcggctgggagccggtgcaggagaacggcaacacgatcgcgctgctgcgcgatggtgcctcggtgacgctggaaccggctggacagctggaactgtccggcgcggcgctggagaccatccaccagacctgcgtggagaccggcacccacctcaacgaagtggcacaggtggccggcgaactgcagctgggtttcctcggcatgggcttccagccgaagtggaagcgcgatgaaatgccctggatgccgaaggggcgctacaagatcatgcgctcgtacatgcccaaggtcggttcgctgggcctggacatgatgacccgcacctgcacggtgcaggtgaacctggactacgccaccgaagcggacatggtgaagaagttccgcgtgtcgctggcgctgcagccgatcgccaccgcgctgttcgccgattcgccgttcaccgaaggcaagccgaacggctacctgagctaccgctcgcacatctggaccgacaccgacgccgaccgcaccggcatgctcgacttcgtgttcgaggatggttttggttacgagcgctatgtcgactacctgctcgacgtgccgatgtatttctcctaccgcgatggcatctaccacgacgccagcgggcagagcttccgcgatttcatgcaggccaggctgccggtgctgccgggtgcgctgccgacgctgcgcgactggtcggaccacatgaccaccgcgttcccggaagtgcgcctgaagaagtacctggaaatgcgcggtgccgatggtggcccgtggagccgcctgtgtgcgctgccggcattctgggtgggcctgttgtatgacgacaccgcactggatgccgcctgggacctggtacgcgatttcaccctggccgagcgccatgcactgcgcgacggcgtgccgaagcatgcgatgaacctgccgttccgcaatggcacggtgcgcgacctggcccgcgaagcggtgaagatttccgtcgaaggcctcaggcgccgtgcggcgcgcaatgccgacggccaggacgagagcaagttcctggacgtgctgcaggagatcgtcgaatccggcctgaccccggccgagcgcaagctggcgctgttccatggccgctggcacggcgacgtcgatccggtgttccgcgagttcgcgtactga

SEQ ID NO: 495157 - DNA, 1059 bp, Stenotrophomonas maltophilia
atgtccctcgcccgtggttacgccgcccattcccataccgacccgctggtcccgtacgagttcgaacgccgcgcggtcggcccggacgacgtgcgcatcgagatcctctacagcggcatctgccattccgacctgcaccaggcccgcgatgactggggtggctcgatctacccgatggtgccgggccacgagatcatcggccgggtgaccgaagtcggcagcaacgtcacccgcttcaaggttggcgaccacgccggcgtcggctgcatggtcgactcgtgccgccactgcgacgcctgtgagcacgatctggagcaatattgcgccgaaggcgcgacctggacctacaacggccgtgaacgcgaaaccggcgcgccgacctacggcggctattccgaccacgtggtggtcgagcagcgcttcgtggtgaaggtgtccgacaccctcgacctgaaggcggccgccccgctgttgtgcgccggcatcaccacctggtcgccgctacgccactggaaggtcggcccggggcagaaggtgggcgtgatcggtctcggtggccttggccacatgggcgtgaagttcgccaaggcactgggcgcgcacgtcgtgatgatcaccaccacgccggaaaagggtgccgatgccaagcgcctgggcgccgatgaggtactggtctcgcgcgatgccgcgcagatgaaggcgcacgccggcagcttcgacttcctgctcaacaccatcccggtcggccatgacaccaacccgtacatgggcctgctcaagcgcgaggccaccatgtgcctggtcggcgtgctgaccgaactggacccgccgctgaccggcggcagcgtgatcttcggccgcaagcacctgaccggctcggcaatcggcggcatggccgaaacccaggaaatgatggacttctgtgccgagcacggcatcgtcagcgacgtcgagatcatcgacatcaagaacgtcaacgaagcctgggaacgcatggcgaagaacgatgtgcgctaccgcttcgtgatcgacatggcgacgatgcagaacgccgcctga

SEQ ID NO: 495158 - DNA, 885 bp, Stenotrophomonas maltophilia
atggccactgacaacctgacccatctggccgcgtttgccgcagtcgcccgccaccgcagcttccgccgcgccggtgccgaactggcattgtcgacctcggcggtgagctatgcgatccgcgcgctggaagaacggctgggcgtgggcctgttccatcgcaccacccgcagcgtggccctgaccgaggccgggcagcgcctgctggagcgcctgcagccggcgttggggcaggtgcacgacgcactggaagaaatgaaccacttccgcgcagccccggccggcctgctgcgcatcaacgccacccgcgcggcggtaccgacccagttggggccgaggctggcgcgcttcctgcacgcccatcccgacgtgcgggtggagctgaccgaaaatgacggcctggtcgacatcgtcgccgagggctacgacgccggcgtgcgcctgcatgagttcgtgccggaggacatggtggcggtgccgatggggccgccactgcgcgggctgatcgtcggctcgccggactacctgcggcgtcggccggcaccgcagcatccgcgcgacctggccgcgcacgaatgcatccgcttccgcttcgccagtgggcacctgtacaagtggcagttcgagcgcgatgggcaggcgctggagatcgacgtgcccgggcggttgaccctgtgcgagcagggcacgatcgtgcgcgccgttctggatggcatcggcctggcgtacgtgctggaagacacggcaaggtcgtacatcgaatcggggcagatggtggcggtgctggaagactggagcgagccgtttgctggcttcgcgctgtactacccgaagcagcggcagatgccgggcgcgctgcgtgcgttcgtggatatgttgcgcgagtga

SEQ ID NO: 495159 - DNA, 663 bp, Stenotrophomonas maltophilia
atgggcgcaatgaacagcaccaccctgcccgcgaccacatcaccgacccgccgccgtggccgccctgcgcgaccggaagccgaagtccgccacgcggtgctgcaggccacgctggagctgctgctggcacagggttacgaggccaccaccatcgaagcggtggcggcgcatgccggggtagcgaagaaaaccgtgtaccgccatgccagcaaccgcgaggaactggtcgggttggcggtgcgcgagtggaccgacggcttcgcgccacagctgcagcgtgatgcgcgcaatgcccaagaggtcgtgccgttgctgcaggacatcctgcacgcggtgtgcacgcaggcgctatcggcgcaggcggtgcaggtgtttcgcctgctggccaccgatttccccggcaaggacgcgctgctgcaggcctacctcgacaacggcatcgaacgcggccgtgcgctgctggccgactggctggcacgtcagcagcagcgtggactgctgcgcgagggagattccgcatgcatggcgcggctgatcctggcgatggccgtggccgagccgctgcgtgaacgtgtgatcggcgtggtggccgaggatgcgccggtggagatgcatctgcgtgagtgcgtggcgttgttggcgccggtgttgcaagggccgtag

SEQ ID NO: 495160 - DNA, 696 bp, Stenotrophomonas maltophilia
atggataccgctgtgaacgctcgcccctggctggaccaccacgatctgctggacccggcgccgatgcatctggaaaccggcatccagcgcagcgaagacggcacgctgctggtggcggtgcgcaccgatctgcacggctgcaagggccgcatgctggactggtggttcaccttcttcgagaccacccagcacatccgctggtggcatccggtcgatcatgtcgagcatcgcggctgggacgcggcctggcagcgcgggcgcagctaccacggcgccagcatccatgcggtggaatcgctcgctgacattccgccggtggcggcgcgcctgaagttccatgacccgcgcaccttgctggtgcccgaacgcctgcaggcggcacaggatgcacgccatgtatcggcggtgatcgccgcgcgcatcggcttcagtgatcacgtgcgtctggatgtacagggcgatccctgcgatgggcagatgctgcatgtggcgcgcgatacgccgtttggctgcgtgctgcgcagccgcttcgtgctcggcctggatagcgccgatccgcgtcgcgatgccggcgacgcggtcggcctgggcctgctcaggcactgctatacggagttcagtttcctgtcgcggctgctgccttcgctgtactacggcgagcgcgccaacggcgaagcagtgccgttgccgtggtga

SEQ ID NO: 495161 - DNA, 417 bp, Stenotrophomonas maltophilia
atgaacgccactgcccacagcttcatcgtcaacatggacgtgcccgacctggccgccgccgaagacttctacatccgggccttcggcctgcgcatcggccgccgtctcggcccgggcgccgtggagctgctcggtgggccaacgccgctctacctgctgcacaacgacgccggcagcgccgccacggaagacggcgacgtgcgcgactacgagcgccattggacgccgctgcacctggattgggtggtggatgacattgaagccgcgctggcacgtgcagttgcggccggggcgacactcgagcagtccgtgcgcgagcgtcgctggggacgcatcgccgtactggctgatccgttcgggcatggcttctgcctgatccagttcagtggcgaaggctacgatgcgctggttgaatga

SEQ ID NO: 495162 - DNA, 678 bp, Stenotrophomonas maltophilia
atgagcgcgctatccggcatcgaacaggccaccggccagaccttcccgcccctgttcaagcagttgcatgcagcgggtcggttgagctggggtgctccccatccggaatggtccgaggtggtattcccggcgctgcaggcagaaccgccggtgctgctgtacgcccaggactatgagccgttggaacacgatgaactgctcgaggcgtggcaggagctgaccgcggaggatcattacaatcccttgcgcactgacctgcagttgctgccctttgcgcggaccggtgcgggtgacagttactgcttctggagcaacgcgcccggtttcagcgaaccgccggtggtgatggtgtggcatgacgacgaccgtgccgacgtgctggccgccagctaccaggatttcgtgttccgcaagatggtcgaagcggttgccgactaccagcggccgtacacactgctgtcgcacggcaagctggccgggaatctgcagcgctggctgcagactcaccattccttcctgcgcggcgaccagtacgcggcattgcagcggctgttcgcccgcgttgacgatattgaagaaggcaacttcagcgaagacgaggcacaggccatcgtcgctgaagtgatcggcttcgagcggttggacgagtcgttcgcctacgtgcgcgaggacgcctga

SEQ ID NO: 495163 - DNA, 1104 bp, Stenotrophomonas maltophilia
atgatcgccgccctgttccgccccttcgatctggcaggcaccgccctgcgcaaccgcatcgcgatggccccgatgacccgcgcccgcaaccccggtgcggtcgccaacgaactcaccgcgcagtactaccggcagcgcgccagcgccggcctgatcatcagtgaaggcaccccggtctcgccgcagggccagggctacatcgacgtcccgggtatctggtcggccgagcaggtggccgggtggaagctcgtcaccgaggcggtgcatgccgcacagggcacgatcttcgcccagctctggcacgtcggccgcatgtcgcattcctcgctgcagcccgacggtgggcaaccggtcagcgccggtacccgcccggtggccagcgcaccgaagaacacctcgttcgtgtacctggacgatggcagccgcggccacgccgatcccaccccggcacgtgcactggagaccgcagagatccccggcatcgtcgacgacttcgtgcgcggcgcagagaacgccatcgccgccggcttcgacggcatcgaactgcatgccgccaacggctacctgttcgaacagttcctcaacccggtcatcaaccagcgcgaagatcactacggcggctcgctgcccaaccgcgcgcgcttgatcctggacaccgtcgatgcgatggcccagcgcatcggcgcgcagcgcatcggcgtgcgcctggcaccgaacaatctcaccttcgacatgccgttctaccccgacaacgaggccacctatctgtacctggccgaggaactgggcaagcgcggcctggcctatgtgcatctcaacgacaaccagcaggcgggccagtcggtgctgggcgaggccttcctgcagcagttcaagcaggcctacggtggcaccgtgatcctggccggcggcatgacccgcgaacgcgccctgcagctggtcgaggccggcaccatcgaccttgccgcgttcggccagccgttcatcgccaacccggatctggtcgaacgcctgcagcgcaacatcgcgctggccacgcccgaccgcagcacctattacgggggcggcgaggcgggctatctcgattacccggccgcaggctga

SEQ ID NO: 495164 - DNA, 906 bp, Stenotrophomonas maltophilia
atgctgccgctggaatcgttgaatggcctggtgaccttcgttaccacggcccgctcaggcagcttcaccgaggctgccgacgcgctgggcatctcgcgctcggcagtgggcaaggccatcgcccggctggaagcgcggctgggcgtgcgcctgttccaccgcaccacgcggcgcatcgcgctgaccaccgacggcgaggcgtactacgcatcgtgcgcggcggcgctggaagaaatctccgccgccgaagcctgcctggggtcggccggcctgcccagcggacggctgcgcatcgacatgccgtcctcgttcgggcggctggtggtgctgcccgtgctgctgcgcctgtgccggcagtacccggacctgcaactgacgatgaccttcaccgatcatttcgtcgatccggtcgaagagggcatcgacctgctgatccgcttcggcgggttgcaccaggccgagcacctggtcgcgcgccggctgggtcgccagcgcctggtcacctgcgcatcgccggagtacctgcaggcgcatggcgtgccagcgaccgtggaggaactggcgcagcatcgcagcatcgtcggcttccgccatgggcaaccggtggcgtggcggattggcagtgatgacgcggagggaacgttcatcccgaacgcggcctaccagctcaacgatggtgacgcagtgatcgatgcggccatcgcaggactgggcatctgccagatgcccatttcactggtacgccgacatctggaatccggcgcgctgcgctcggtgctggatgcgcacatgcagcggcatatcgacatccatgcgctgtggccaccgacccggcacctgcggccgaaggtgcgctatgtggtggatgagctggcgcggctggcgggtcagggcctgtttgactga

SEQ ID NO: 495165 - DNA, 453 bp, Stenotrophomonas maltophilia
atgctctgggaactgcagaatcaggaacaggtaatgggcgttggtatccagctcgggcgcatcaccgatgagatcggcagcggcgactttctgtacgcgttcttctcgacgatcaccggcaatctggaaccggatggaaggggaagccgattccctatcctcatgaggcaactgtacgccggcggactgcagcaatcagatgctgccgacgcgctggccgaactgcatagggtccgccgcgagctggccgagcttccgccagcccgtgtcatatggtcgttcgaggatcgaacccagcgtccaccgtggggaaacgatatcgctggcgacatcgacagcctggcgacctacttcgtcacctcacatgggcgcgatctgatcgcgcttctggctgaggtgtttgaagcacttcaggaaggcgaagacacgtccgcccggatcgtcgactactga

SEQ ID NO: 495166 - DNA, 276 bp, Stenotrophomonas maltophilia
atgccgcactcccccgaagagaagaagaaggtcctggcccgcgtgcgccgcatccgtggccagtgcgatgcgctggaccgcgcgctggaagctggcgccgactgcgggccggtgctgcagcagatcgccgccatccgtggcgcggtcaacggcctgatgtccgaggtgatggaggcccatctgcgcgaggagttcgggcaacccgccgcctccgatgaacaacgcgccgaacgcgtgcgcgacatgagcgcgttgatccgttcatacctgaaataa

SEQ ID NO: 495167 - DNA, 1110 bp, Stenotrophomonas maltophilia
atgaagtcccgtgccgccgtcgcctttggtcccggccagccgctgcagatcgtcgagatcgacgtcgccccgccgaagaagggcgaagtgctggtgaagatcacccacaccggtgtctgccacaccgatgcgttcacgctgtccggcgatgatccggaaggcctgttcccggtggtgctgggccatgaaggcgccggcatcgtggttgaagtgggcgagggcgtgaccagcgtcaagccgggcgaccacgtgattccgctgtacaccgccgagtgcggcgagtgcctgttctgcaagagcggcaagaccaacctgtgcgtggccgtgcgcgcgacccagggcaagggcgtgatgcccgatggcaccagccgcttcagctacaacggtgagccgctgtaccactacatgggttgctcgaccttcagcgagtacaccgtggtggccgaagtgtcgctggcgaagatcaatccggaagcaaacccggaacacgtctgcctgctcggctgcggcgtcaccaccggcatcggcgcggtgcacaacaccgccaaggtgcaggaaggcgacagcgtggcggtgttcggcctcggcggcatcggcctggcggtgatccagggcgcgcgccaggccaaggccggccgcatcatcgcggtggacaccaatccgtccaagttcgaactggcgcgcgaattcggcgccaccgactgcatcaacccgaaggatttcgataagccgatccagcaggtcatcgtcgagatgacgacctggggcgtggaccacagcttcgagtgcatcggcaacgtcaacgtgatgcgcgcggcgctggaatgcgcgcaccgtggctggggccagagcgtggtgatcggcgtggccggttcgggccaggagatctccacccgtccgttccagctggtgaccggccgcaagtggatgggcaccgccttcggtggcgtgaagggccgcagccagctgccgggcatggtcgaggatgcgatgaagggcgatatcgaactggccccgttcgtcacccacaccatggacctggacaagatcaacgacgccttcgacctgatgcatgaaggcaagtcgatccgttcggtggtccactactga

SEQ ID NO: 495168 - DNA, 357 bp, Stenotrophomonas maltophilia
gtgggctggttcgacgccctgcgcaggccgcgtgcgaaggatccgcgcgcggccctggtcgacccgatcgagcaggcgctgcgcgcgctgggctgggtcgagggcggcgtgggtccaccgcgcgtggtggactcgcccttcggcattgatgaaatgccgttcgagcactggctggcacaggtattcctgccgcgcctgcacgaagcccgcgccgacggcctgtggccaccgcgcagcgacgtggcggtcgcggcgtatcgcaacctggacggccagcctggcgtcgaatcgttgctgcgcctgctggcacagctggatgaactgatcaaccaaggcgtccacgccgggcgtggataa

SEQ ID NO: 495169 - DNA, 831 bp, Stenotrophomonas maltophilia
atggaacgcattgaacaccgcgcctgttttggcggttggcaggatgtctaccgccatcattcgatcacgctgggctgcgacatgcagttcgccgtgtacctgccgccgcaggcggaaacgcagacgctgccggtgctgtactggctgagcggactgacctgcaccgagcagaatttcatcaccaaggcgggcgcgcagcgctatgcggccgaacacggcgtgatcattgtcgcgcctgataccagcccgcgcggtgatgacgtggccgatgccgaaggctacgacctgggcaagggcgcagggttctacctcaacgccacccgtgcaccgtgggcgaagcacttccgcatgcatgactatgtagtgcaggagttgccggcgctgatcgaagcggagttcccggcgaccggcgcacgcgccatcagcgggcactcgatgggcggccacggtgcgctggtgatcgcgctgcgcaatccggggcgctaccgcagcgtgtcggcgttctcgccgatcgtcgcgcccagccatgttccgtgggggcagaaggccttccacgcctaccttggcgacaacccggccgactgggcgcaatgggacgcctgcgcattgattgccgcggccagcgagcgcctgccgttgctgatcgaccagggcgaggcggacgagttcctgcagacccagctgcagccgcagcgcctgcaggaggcctgcgccgctgccggccatccgctgaccctgcgcctgcagcccggctacgaccacagctactacgtcattggcagcttcatcggcgagcacatcgcccaccacgcccgcgccctgcacggctga

SEQ ID NO: 495170 - DNA, 1446 bp, Stenotrophomonas maltophilia
atgccggtagtgctggcgctgctgtatgtgctgtgccatggcctggtgctggccttgtggcctggtccggccggggtaggctccttcgttttcctgaccggtgccccgttgctggcggcggccgcctgcctgtggcgggcccgccgcgaccgcgcggcactggggtggcgcgccacggcattggcgctgctgctgtgggccggcggcatggcgttcaacatgatcgacgccctgggcgccgggcgtgccgatttcaccccgcgcgcaagcctgttcctttacgtgctctacggtgtgcccctggtgttcatcctggccagggcgcgccgggaacgggtcagcatcagcctgatcgatgcggccatggcggcgctgctgggcgtgctgttcttcgtgcacgcgcagtcgttcgccgcccgcgttgacatcgacgaccacgcgttgtccaacatgcaacgcatgttcgatatccagaacctgtgcatcgccgtgttcgcggtggtgcgctggctggccggcgacgttcccgagcggcgtacctttttccgcgcgctggcgatgtatgcggcgacctacctgttggtggcgtattacatcaaccactacacctccggtgatgcgttcggtgcctatgcggatctgctgatcgatctgccgttcctgctgctggcgctgctcgcactcagccaggcaccggcgcgggtcctgacgccgcatccgcggatggcgcgcacggtgcaggcggcgggcccgatgatcctgccgctgctgctgctggtggtgggcaccctggtggtcgaccatgcccggcccctggccgtgagcggtttcgtggtggcgacgctggggttcggcctgcgcagcatcctgctgcaggtggacctgatggaacggcaggcctcgctggaccagttggcgcgccaggatggcctgacaggcgtggccaaccggcgcgagttcgacgcgctgctgctggccgagtggaatcgcgcacggcgcagtggcaccgagctgggcctgctgctgttggatatcgatcatttcaaggccttcaacgaccgccacggccatcccgccggcgaccgctgcctgcaggccgtggcagcggtactgaaggcgagcgccggtcgcgccggtgacagcgtcgcacgttatggcggcgaggaatttgcggtgatcgtgcccggaagcgcgctgtcgggcgttctggcgctggccgagcgcctgcgccaggcggtggaagcgctgccgttgccggaaggatcggtcagtatcagcatcggcgtgggttacctgcatccgccggctctggccagtgccgatcagttgctggcagacgccgatgccggcctgtatgccgccaagcgggctggccgcaaccaggtgatcctgcatgcgcacgtgctggatgacgagggcagcacgcacggaacgatggactgctga

SEQ ID NO: 495171 - DNA, 471 bp, Stenotrophomonas maltophilia
atggcctcccgttcccccttgtttcccacccgggtcaactaccgcgccttcggtcgacagttcggccggggcgagcaggcgctgctggcagcgatacgccagctgcgtgaccccgatctcgtagccgatggactcgcacagctgagcggcctcggccttgatcctgaaggctgcgacgcgttcatcaacctgctgccgctgctggccgcgccggcggcaccgatcgacctgttgcccgccggctcccccttcattgccgccagcgaactggacctgctggtctgcctgctgcgcatcgcacaatggcggcatgcgcggccccgcgaagacgacacgctggcaccgttgcgccggcaactggcacgctgtgcgatggccgtgcaggcggcaaacctgccgttgcggcagcgctcattgtcaccggtcgggctgaggctgctcgatccgaccggctggttgcggcagcgataa

SEQ ID NO: 495172 - DNA, 447 bp, Stenotrophomonas maltophilia
atgttcactaccctgctggtcgccctggatggtggcccccagcacgcacgcgtgctggacctggccgccgccatcgccggcccccacagccgcctgcacctgctgtgcgtgctcgaccccgaattcgcgctggcggccgatgccagcgaagccgatcgcaccgagtatccggaagccgcccgccagcgctcccgcgccgaggcagtattggccgaagccctggccgaactgcgcgagcgcggcgtcgatgccatcgcgcagatcccctccggcgatcccggcgaagtgatcagcgagcaggcccggcgcctgaagtgcgacctgatcgtcatcggccatcgccacctgtcccggctggaacgcctgttcgaaccctcgatcgggcaatggaccatcgaccacgcgccctgtccggtgctggtggaatcccgcgacccacagccctag

SEQ ID NO: 495173 - DNA, 918 bp, Stenotrophomonas maltophilia
atgcccctgccggacctgaacctgttgctggcactggacgtgctgattgacgaatgcagcgtggccgccgccgcgcgccgcatgaacctgagcgcgccggcgatgagccgcaccctgggccggatccgcactgcgctgggtgacccggtgctggtgcgtgccggccgcggtctggcgcccacgccccgcgcgctgcagctgcgcgagcaggtccgcgatgtgatcgagcaggcccaccgcgtcttcaacgccggtcgtgaagtggacatgcgcgtgctcgagcgaaccttcagcgtgcgcgccaatgatgtcttcatcggtggatttggcggtcgcctgcgcgagatcttccgccagcaggcaccgcgcgcggtgctgcgcttcgtacccgagggcgataccgacgatgatgcgatggcgcagggccggatcgacctgtacatcagcaccgccggcaagcatgcgcccgataccaaggtgcagaacctgttcagtacctcgttcatgggcgccgcgcgcgaggaccatccactgttcgacgaggagatcagtgcagagcgctttgccgcgtgcgaccacatcgcggtgtcgcgccgtggcctgccgcgtgggccgatcgatgatgacctggccacgctcggcctgcagcgccgcgtggcgctgatcagcccgaccttccacggtgcgatcttcgcggcggccgaatcagacctgatcctgccgcagatgccaagcgtgatgctggagcggatcgtcagcatgcgcctgccgctgcgcctgttcccgctgccgatcccggtgcgtaccgcggccatcgtgcaggcctggcatccgcggctggacaacgatgccgcgcaccagtggcttcgccgttcgatcaagaccatgtgcgagcgcgtcgaggacgcccaccgctga

SEQ ID NO: 495174 - DNA, 1530 bp, Stenotrophomonas maltophilia
atgagtgcgccggccgccgctgtcccggccgccgcagcgccccgtcctgccgccgcccccgggctcgatcgccgcattctggtcggcctgtgtggcgtgctgctggcggtgctggtgtccggcttcaacgagaacatcaccaaggtcgcgctggccgacatccgtggcgcgatgggtttcagcgtcgacgacggcagctggatcgtcgccctctacagcgcgatgtcggtcagcgcgatggccttcgcgccgtggtgtgccgccaccttctcgctgcgccgcttcgcattggcgatgatcggtggcttcatggtgctgggcgtgctgtgcccgctcgccccgaacctgcaggtgttcctgctgctgcgtgcattgcagggcctgtgcggcggtgcactgccgccgttgctgatgagcgtggcgctgcgcttcctgccgcctggcatcaagctgtacggcctggccggctacgcgttgacggcgacgttcggcccgagcatgggcacgccgctggccgcgttctgggtcgagcaggtgggctggcactgggcgttctggcagatcgtgccgtactgcctggccgccatggcgatggtcggctggggcctgccacaggacccgctgcggctggaacgcttcgcccagttcgatggcgttgggctgctgctcggcctgccggcgctggtgctgctggtgctgggcctggtgcagggcccgcggctgaactggttagattcgccgatgatcacgctgatgatcggtggcggtgccggcctgatggtgctgttcatgatcaacgaatggttccacccgctgccgttcttcaagctgcagttgttggccaatcgcaatctcagctactcgctggtcacgctggggggcgtgctgttcgtgctgctggcggtgatctcgatcccgtccggcttcctggccagcgtgcagggctaccggccgctgcagaccgcaccgatgctgctgtgggtggcactgccacaggtgatcgcgctgccgctggtggcggccctgttgaacatccgcgcggtggactgccgctgggtgcaggccaccggcctggcgatgctggcactggcctgctggctgggctcgcacctggacgtggcctggatccgcgacaacttcctgtgggtgcagctgctgcaggtgtttgcccagccgatggcggtgctgccgctgctgatgctggccaccggcggcctggcgccacaggatggcccgtttgcctcggcctggttcaacacggtcaagggcttcgctgcggtgctcgccggtggcgtactggatgccatcgcccaaggccgccgtcatttccattccaccgtgctggtcgaccgccttggcgagcaaccgtggctggccgatggcccgcagctgggcgcgcgcctgcatgcacaggtacaggcgctgacttctgccgacctgtactgggtggtcgcactggtggcgctggccttcattcccctcattgcctggatgcccacccgcatccatccgccacgcgccgtggcctga

SEQ ID NO: 495175 - DNA, 1083 bp, Stenotrophomonas maltophilia
atgacgatcaatcgaacccctctcaacaccggcctgggcctgggcgtgctggccctggccatcggcgcgtggctgctgctgcgcgatggcggtcaccagaccaccaacaatgcgtacgtggtggccgactacaccctggtagcgccgaagattgccggcttcgtcagtgccgtggaggtagaggacaaccagtcggtgaaggccggcgacgtgcttgcccgcatcgacgaccgcgactaccaggtggcattgcaggctgcgcgtgccgaccttgccaatgcccgtgcacagctggccaatgcgcaggccgcactggcccagcaggactcgctgatcgcgcaggccagggccagcgtcgatgtcagccgttccgaactgaccctggccagtgccgaccagcagcgttaccgcgaactggcccgtgatggcgccggtaccgtgcagaacgcgcagcaggcgcagtcgaagcaggccgtggccagtgcgcatctgcagcagggccaggccgcactgtcgaccgcacgccagcgcaccgacatcctcagcgcgggcgtgcaggctgcacaggcggcggtgcagcgtgcagaagcggcacaggcacgcgccgaactggatctgtcgcacaccgtgctgcgcgcgccgatcgatggcatggtcggtcgccgcgcagtgcgcgtcggtgcctacctgaccccgggtacgccggtggctgcggtggtcccgctgaagcgcgccttcgtggtcgccaacttccaggaaacgcagatgacccgcatgcacgccgggcagcaggtcgaactgaaggtggacgtattcccgggcacgccgctgcgcgggcacatcgacagcattgcaccagccaccggcgtcacctttgctgcagtcgcaccagagaacgccaccggcaacttcaccaaggtggtgcagcgcattccggtgaagatcgtgctggagccgggccagccgctgctggaccagctgcgtgccggcatgtcggtggaagccagcgttgacctgggcagccgcgcgcgtgcgcagagcgtgcagcacggaccgggccacaagcgcggggagggcgcatga

SEQ ID NO: 495176 - DNA, 1413 bp, Stenotrophomonas maltophilia
atgagcgccatcaccgtgttccgcaccttcgttgcggccaccctgtgcacggccctggctgcctgcgcgatgggtccggacttcgtacgcccgcaggcggaactgcccggccactggcggggtggggctgtcgccggcaacgccatcgatcaggacgccgcctggtgggccggcttcgacgatccgctgctggggcagctggcccaccaggtgctggcggccaacctggacctgcagctggccgccaaccgcgtgcagcagagccgcaccacgcgcggcatcaccgccgccgatcgcctgcccagcgtcagcgcgagcgccagtggcgtgcgtgcacgcaacagcgaggtgggcctgaatgatccgtccggcaacggcggccgtgatgactacgggctgttccaggccggtatcggcctgggctgggaactggacctgtggggccgcgtgcggcgccaggtggaagcggccgacgcacgcgtgcagatggccgaagaggatgcacacgccgtgcgcatcgcgctgctggcggaaaccgcgcgtgattacctgcagctgcgtgcgacgcggcagctgctggcgatcaccgaggacaacctcagcatcgcgcatgacatcaaacggctgaccgaggcgcgccagaagcagggcgtggccagcacgctgcaggtgtccagcgcggccgcgcaggtggcttcgctgcaggcgcgcattgcgccgctgcggcatcgcgaatcgcagctgcgcaatgcgctggcgttcctgctggcacagccgccgcaggcactggacgcgcagctgcaggatgtacgccgtgactggccggcgttgccagcggtggcggtgggtctgccgagtgaactggccgagcgtcgcccggacatccgtcgtgccgaggcggcactgcatgcggcaacggccggcatcggcgtggccgaggccagtttcctgccgcgcatcaccttgaatggtgacgcaggcttccaggccaagcagctggatgacctggatggctggaacgcgcaccgtttcagcatcgggccgtcgatcagcctgccgatcttccagggcgggcggctgaaggcgaacctcgcgctgagcaggctgcagcagcaacagtcggccctgcagttccgccgtaccgtgttgcaggcctggcatgaggtggacgacgccatggatggctacagtgccgagcagcagcgcacggtgcagctgcacgtggcggtggatgagagcgagacggcactgggggcggcgcgccggcagtaccaggccggcgtggtcgacatgctggacgtgctgaccacccagcgcatcgcgctggacaaccaggccgcgctggccaacagccaggccgccgccgcgatcgcgcgggtggagctgtaccgcgcgctgggtggtggctggtag

SEQ ID NO: 495177 - DNA, 240 bp, Stenotrophomonas maltophilia
atgttctccagcgagatttgcctttacctggacgaagcgtacttccagggccacgtcgcctcgacagcggatggccaggtcaccgccatcacctcgcgcagtctttccgccgaatggcagctcgtcctaccccaaggcgttgaggagcgaggtgtgcaggtcagcattcctcccaccgaccacgacgacggtctggaacaggaatactggttttacggcgaggtagcggaccggcgttga

SEQ ID NO: 495178 - DNA, 339 bp, Stenotrophomonas maltophilia
atgcctgcgcagtaccacatcagcctgcccgatccgtccaaggcccgcggcaacgaccctgacctgtccttccattcccagggcgccgccggtttcgccgaagagctgcaggatgccctgcgcagcggcacgctgttcgaacgctggaaggccaagcagcccgacccggatgcggtggaaccgcagtggggcgtgaccgacccggaggccaccgtgaccggcgagcagaaggacctgcgcatcaacctggtcgccaccacccgcatcgacagtgacgtgttcaagcagcgcctgcgcctgctggccggcagccactgggaactgcgcgacgtgcgttga

SEQ ID NO: 495179 - DNA, 942 bp, Stenotrophomonas maltophilia
atgcgcatcggaatcgtcgtcgactcggcctgcgacctgccgcaggacttcattgccgagcacaacatcgtgctgctgccgatcaccgtacggatcggcgaagccgtgctggccgatcatcgcgatgagcaggccaccctgagcttcctgcacgcgcatgtggccgaacatggcgctgaagcggaaaccatccccttcagcgtcaaccagatccgcgacctgttcctgcagcagctggtgatcgattacgaccacgtgttctgcatgaccatcaccaagacccgcagcccgatccacgacaacgcgctgcaggccagcttcgccatcctcaacgattacaagccggtgcggcaggcagcgggctacaactcgccgttcgcgctgcgcgtacttgatacccagaacctgttcgccgcgcaggccgtgaccgcggtggaggctgtccgcctgcgtgacagtggcgccagcgtgcagcagatccgcgaacggctggaagaactggcgggcaacgtgcacggctacatgatcacccgcgacctgtactacatgcgcgcacgcgcgcggcacaagggcgaccgcagtgtcggcctgctcagcgcggcactgggcagtgcactggacatcaagccggtgctgcacggctaccgtggcgagaccgggccggtggccaagatcaagggcttcgacagcgccgtgcagaagctgttcgcggtggtcggccagcgcgtgcgtgccgggctgatgacgccgacggtgtgcgtcagctacggcggcgaactggacgagctgcgcagcctgcccggctatgcacagatgaaagaggtctgcgccggccatggcgtgaccgtgtacgaatcggtgatgagcctgaccggcatggtcaacgtcggcaagggcgcggtcaccgtgggatttgccgatgggccgcatcggttcgaatga

SEQ ID NO: 495180 - DNA, 633 bp, Stenotrophomonas maltophilia
atggccaccctgcgctggtatttcgacttcgtttcgccgtactcctacctgcattggcagaagctgaagcagctgcccgagttcccgcggatccagccggtgccgatcgcctttggtgccgtgctgcatcacctgggcaacctcgggccggccgagattccggccaagcgccgcttcatctaccgccagctgctgtggaccgcgcaggccgaaggcacaccgctgcggttcccgccgggccacccgttcaatccgctgtctgccctgcgcctgtgcctggccgcgggtggcagcgcacaggcggtggacgtgctgttcgactggatctggcgcgacggcaatgccgccgacagcgccgaggccctgcgcgaaccagccgcgcggctggggatcgaggatgtcgccagcgccatcgcgactcccgcggtcaaggagcagctgcggaggaacaccgaggccgccattgcaaccggcgtgttcggcgtgccgaccctggccatcgatggcgaactgttctggggcaacgacgcccacccactgatggcggcggtgctggccgacccggatctgctgcggcagcccgaatggcagcgcctggccgagcttccggtggccgtgcagcgcagtcgctga

SEQ ID NO: 495181 - DNA, 1263 bp, Stenotrophomonas maltophilia
atgggcgcgttgaacaagcgtcgccgggcttggctcggcgctacggtcatggtgctggtctacctctccgcagctgcgcaggcgcaggacctgctggtccgcaacgccaccgtacatacggccagcgcgcgcggcagcctgcagcacgccgatgtactggtgcagggcggcatcatccgcgcagtcggcaacgggctgtccgcaccggccggggccaacgtcgtcgaggccgatggccgcccgctgacacccgcgctgttcgggggcatcaccgagatcggcatcgaagaagtctccggtgaagcgagcacggtcgacagcacgctgaagatcggcgaacaaccgttgcgccccgaattcgatgtcaccctggcctacaacccggcctcggtgctgatcccggtggcgcgcctggacggcatcggcttcaccgccctgggggccgccaccggtggcggcttcgtcgctggccagggcggtgtgatgcggctggacggcagcgccgatcccctcgggccgcgcgcgctgttcctgcgcctggggtcggccgcagtggaactgaccgggcattcgcgtgcggcgcaatggatgctgctgcagcagatggtggccgaggcgcgtggccaggtcgccgcggactcaccgcatgcgctgctgaccccggccgggcgccgcacgctgggccgctacctggccggccagggccgcatcgtggtggaggtggaccgtgcggcggacatccgccagctgctgcgctgggccgcccgcgagaaggtgaagatcgccattgccggtggcagcgaagcctggcagctggcaccggagctggccgccgcgcaggtgccggtgttcgtcgacgtgctgtccaacctgccggccagcttcgaccagataggtgcaaccctggaaaatgcggcacgcctgcaacgggccggcgtggcggtctcgttcgtgcagcgtggcgacgcctcgcacaacgcccgcaagatgcgccagctggccggcaatgccgtggccaatggactgccctgggccgacggcctggccggcctgacccgggtgccggcgcaggcgttcggtgtggccgaccagatcggcagcatcgagccgggcaagcgtgccgacctggtgctgtgggagggcgacccgctggacgtggcgcactatgccgaacaggtctggctgggcgggcgggcgatgccgatgcgctcgcgccagaccgagctgcgcgatcgctacctgctgcgcaacgcgcagccctga

SEQ ID NO: 495182 - DNA, 1410 bp, Stenotrophomonas maltophilia
atggcatcgatggtgttgcgcgccgctcttgggatggcgctggtttcgttgagcacggcaccggcggtgggcgcctcgcgcttcgtcgccgatccctaccccagcacctaccaggcgcatcccgatgcgccggtgctgatccagaacgccaccgtgctgaccggcaccggccagcgcctggacaacgccgacgtgctgctgcgcgagggccgcatcgtcgccgtgggccgccagctgcaggccgatgccggggtcacccgcatcgatgcgcggggcaagtgggtcaccccgggcctgatcgacgtgcactcgcacctgggcgtgtaccccagcccgggcgtcggcgcgcacagcgacggcaacgagatgaccgcaccggtcaccgccaatgtctgggccgagcactcggtgtggccgcaggacccgggcttcgctacagccctggccggaggcgtgaccagcatgcaggtgctgcctggctcggccaacctggtcggtggccgtggcgtgaccctgaagaacgtgccggccatcacctaccaggccatgaaattcccgggtgctccgtgggggctgaaaatggcctgcggcgagaacccgaaacgggtttacggcgaaggcaagaacgtcgccccagccacgcggatgggcaacgttgccggctaccgcgccgccttcatcgatgctgccgactacatcgccaagaacaaacccaagccggccaagcgcaagggctggttcggcagcgacaagggcgacagcgccggtgatgccggcggcaagcgcgatctcaagctggacacgctggccggcgcgatcgaaggcgacatccgcgtgcacatccactgctaccgcgccgacgagatggccaccatgctcgacctggccaaggaattcggcttcaaggtggcggccttccaccacggcgtggaggcctacaagctggccgaccggctggccgccgacggcgtctgcggtgcgctgtgggccgactggtggggcttcaagatggaagccttcgatggcattccggagaacatcgcactggtcgaccggccgaagaacagctgcgccatcgtccattccgattcgcccgaaggcatccagcgcctgaaccaggaagcggccaaggtgatcgccgccgcgcgccgcgcgcacatgccggagatcacgcccgaacatgccatcacctggatgacggccaatgccgccagagcgctgggcattgaaggccagaccggcaccctggaggccggcaagatggccgacgtagtggtgtggaacggcaaccccttcggttcctacgcgctggccgaacaggtcttcatcgacggccgccgcctgtacgaccgcagtgcgccggcagcgacgccgcgttccgatttccagctcggccaggaggtgcactga

SEQ ID NO: 495183 - DNA, 3387 bp, Stenotrophomonas maltophilia
atgattgtcttcccgtcgtatcgctccaccgcttcccgccgctcgatcctcccctcacccctggcctcggccattgttggctcgctgctgatggccgccgctctgccggcgctggcccaggacagcaacgcagacgccttgtcgcgttaccagttccagcgcagcctgcaggccgcgtttgccgcaccggtcctcaccgcttcgccgtcgctggccgtcgccgccgccgatgtggaagtcgatccggaacccatcatgggcaagccgggtgatgccgccagctggcgcaccaccgaattcaacagcgactggggcctgcaggcgatcaacgccgatgtggcctacgcacgcggcctgaccggcaccggcatccgcctgggcgtgttcgacagcggcaccggcctggaccacgacgagttcgccggcaaggaccaccgcagcatccatctggccgacgtgctggccgatggcagcctgtgcgcgcgcgaagtgctgagtggcccggacgcctgcttcgccagcgacggtggccaggtggccgtgtcctaccagctgctcgacccggactatgccgatctgctggagcgcaatggcttctacgaaggcctgagctacaacgtgcacggtacccacgtgtcgggcaccatcgccgccaaccgtgatggccacggcacccacggtgttgccttcggcgccgacctgagcgtggcccgcctgttctccaacagcgccacctacctgtcggtggtgaatatcggcggttccctgtatctggacgaacagaccatcgccgccatccaggccgacgattcgatctacccgcagctgtatgcgcagatgaacgagcagggtgtgcgcgccatcaaccacagctggggcctggccaacgagccgaccacagcggaagacctggacatgtaccagtcgcacccggtgttcgccgccagtctggctgcgatggccgaaggttcgcgcagcagcggcctgatccaggtatgggccgctggcaacaccgattcgcccaacacttcgccggaagaagcgccgattgccggcatgtatgcctcgctgccgcgcgccgtcgccgacgtcgagccgtactggctggccgtggtcaacgtcaatcaggacctggagctgagcaaccgctcgatgcgctgtggcctggcggcgaactggtgcctcgccgcgcccggctcgaacatcaactcgaccgtgtacggtcccgattcggtgatcgaaggtgatttctacgatgacaatggcaacctggtggtggacatcatcagccagaccccgtcgtccgattacgaggaactgagcggcacgtccatggccgccccgcacgtcaccggcgcgctgggcctgctgttcgagcgcttcccgtacctggacagcgcgcaggtgcgcgacgtgctgctgaccaccgccaccgacctgggtgctgcaggcgtggacgatgtctacggctggggcctgatgaacctggctgcggccgtcgaaggctacggctcgctgcgcgtggacaccgaagtggtgatgaaccagaaggccggcggcctgaaggtgtgggaaggtgatgcatgggacgactggaccaatgacatcggcggcccgggcaaactgaccaagagcggcatcggctggctgcgcctgagcggcgacaacagcttcaacggcgcggtggtgcgcgaaggcgtgctggaactggacggcgtgaacacgctgaccagcgccgtggacgtgaccggcggaaccttcctgctgaacggcaccctgcagaacacagcgctgaacagcctgggcggcagcagccgcatcaccgccaccggtgtgctggacggctcggacctgaccgtcaccggcggcgtggtgtccttcaacggcgtgcagaccggcggcagcaccttcgtgggtgaaaagggcacgctgaagggcgtgggccagctgggaaacaccaccgtggccggcatcatcgctccgggcaactccatcggcacgctcaccatcaacggtgactatgtgcagaccgccactggcgtgtaccaggccgaggtggccccgggcagccgcagcgaccagctgcacgtgaccggcaccgccaccctgggcggcaccctggtggcgctgccggaaccgggcacctactacctgggcgagcagttcaacttcatccaggccgacggcggcgtgaacggtcggttcgccagcaccgatttcagcgccttctcgcccttcctgcagttcggcctggcctactccgccgccggcgcgcgcattgaagtgacccgcggcaacgcgctggctaccgcggccaccaccgccaaccagttggccgtggccaccgtggtcgacggtctggcggtcaaccagggcctgccgcgtccgctgaccatgctgttcccggaacaggtgggcagcgcactggacagcctcagcggcgagctgcatgccgccaccagcgcggccctgctggaaggcagccgctacgtgcgtgatgccgcgctggcccgccgtgccggtgccgctgcaccgggtgccgaaggcggcgacgccaccggtgtgtgggtgcaggccctggccggcagcaccacgctggacggcaacaccaacaccgcccgcaccgaagccaacagcaacggcctgctggtcggtgccgaccgcgagttcggcggctggcaggtgggcgtgctggccggtaccggccgcaccgacgtgaagcagggcgaaggccgccgtgcgaggtcgaaggtggacaacacccacttcggcgcctacgccagccacaactggggcggtttcggcctgcgtggcggcctggcatggagcgaacacgatgtggacagcacccgtgagctggcgttcgccggttacagcgacaccctgagcgcccgctacgacgcgcgtacccgccaggccttcatcgaagcggcctaccgcttcggtggccgcgaggccggcctggagccgtacgtgcaggtggcccgcgtggaagtggacaccaagcacgtgaacgagcgtggcggtgctgcggccctgcagggttcggtggacgacgtgcgcaccaccctggccacggccggcgtgcgcttcgacaagggcctgaaggcctcgttccagcaggacagctggttgcacgtgcgcggcgcggtggcgtaccgccacgccagcggcgaccgcaacccgtcggcccgcctgggctttgccaccggcggcgacagcttcgtggtcaacggtgcacccatcgccgacagcgcggtggtggccgaactgggcctctcggcctggctgaccgccaagcagcagctggaactgggctacagcggccagttcggcgacgaaagccgtgaccacggtgccaacctgcgctggtcggtgcgtttctaa

SEQ ID NO: 495184 - DNA, 777 bp, Stenotrophomonas maltophilia
atgaagagcaaacaggaaatcgtcgacaactggctgccgcgttataccggcgttccgctggaccagttcggccagcatatcctgctgaccaatttcggcggctacctgcacaccttctccgcgctgaccggcgccccggtcatcggcctggaccggccgatggccagcgccaccatcgatggcatcaccatgatcaacttcggcatgggcagccccaatgccgcgatcatcatggacctgctgtcggcggtgatgcccaaggcggtgctgttcctgggcaagtgcggtggcctgaagcgcaagaaccagctgggtgacctggtgctgccgatcgcagcgatccgcggcgagggcacttcgggcgactacctgccgccggaagtgccggccttgccggcgttcgcgctgcagcgtgcggtctcgaccatgatccgtgatctcggccacgactactggaccggtaccgtctacaccaccaaccgccgggtctgggagcacgacgaggcgttcaaggagcggctgcgggcgatgcgctgcatggccatcgacatggaaaccgccaccgtgttcgccgctggcttcgccaaccacattcccagcggcgcactgctgttggtgtcggaccagccgatgatccccgatggggtcaagaccgaggcctccgatgccaaggtcagctcccagttcgtggaaaaccatatccagatcggtatcgaggcgcttaagcttatccggcgcaacggcaagtcggtccgccacctgcgcttcgacgaatga

SEQ ID NO: 495185 - DNA, 540 bp, Stenotrophomonas maltophilia
atggacgttgccgcgcacgtggtggaattctggaaagaggcgggccctgcgaagtggttcgcccgcgatgatgcgttcgacgcgcagttccgccagttgttcctggatgagcatttcgcagccgcctcgcgcgcgcgcgaacactggctgggcagtgccgagggcgcactggcgctgatgctgctgctggaccagttcccgcgcaactgcttccgcggtagcgcccattcctacgccaccgatggcctggcccggcactacgccatgcgcgccatcgaggaaggcctggacctgcagctggtgcccaagctgcgcgccttcatctacctgccgttcgagcactccgaggatccgctggaccaggaccgctcggtggcgatgttcgacgtgctgggcgacaaggaatacctgcagtacgccgagctgcaccgcgacatcatccgccgcttcggtcgcttcccgcaccgcaacgccgtactgggtcgcattccttcaccggaagagctggactacctggccgaaggcggtttcgccggctaa

SEQ ID NO: 495186 - DNA, 957 bp, Stenotrophomonas maltophilia
atgattcgaattcccggaaccccgacgtccatgtccctcgatcccgccctgcgttcgcgcatcgaatccatcctcaacgccaaccgcgtcgtgctgttcatgaagggccagccgtcgatgccgcagtgcggtttctcggccaaggccgtgggcgccctgcaggacctcggcgtcgagttcgcccacgtcaacgtgctggccgaccaggaaatccgtgaaggcatcaaggcctatggcgactggccgaccattccgcagctgtacatcgacggcgaactggtcggcggcagcgacatcgtgctgcagatggctgccagcggcgagctgagcagcgtgctgggcctggccgcgccggaccgtaccccgccgagcatcaccgtcaccccggcggccgtggaaatgctcaagggcgcgctggccgatgccccgggcgctgctctgcagctgtccatcgacgccggtttccagccgaacttccagctggccccgcacgacgaaggcgccatcgccgccgagtccaacggcctgcgcgtgcagttcgacctggccagcgcccgtcgcgccaacggcatcaccatcgactgggtggacgacatccgcggcaagggcctggccatcgacaacccgaatgcgcccaagccggtgcaggaaatcagcgtgcgcgatgccgacgacctggtgcgtgccggcaacatcaccctggtggacgtgcgcccggccgacgagcgtgaaatcgccgccgtgggcgtgccgttcaagaccttcgacggcaacggccgcgccgcgctggaagccctgcccaaggacaccgcgctggccttcatgtgccaccacggtggccgcagcgcgcaggccgccgagcagttccgcgccctgggcttcaccaaggtgttcaacgtcaccggcggcatcaacgcctggtcggaagacgtcgacaacggcgtgccgaagtactga

SEQ ID NO: 495187 - DNA, 780 bp, Stenotrophomonas maltophilia
atgagcaacgcaggaacattgcatcgcatcccgacccggccctggcgctggctgccctggctggtggcgtcgcagctggccgtgatcctggtctgggccctggccggctggcactgggggctgcccgtgatggtggccagccacgcactgttcctggtgccggtattcctgcccaacagccgcttctacgcgccggtgctgagccggatgggagaggccggaaacagcgtctggttgaccatcgatgacggtcccggcccggagacccgtgcggtgctcgacctgctggaccgctaccaggcccgcgccaccttcttcctggtgggcgagcgtgcgctggcacagccggagctggtgcaggagatcctgcgccgcggccacgacctgggcaaccacagccacagccatccgcaggcgcgcttctggcggctgggcccggcagcgatgcgtgccgagatcgagggctgccagcatgcgctgcaggcggtaagcggccgcccggtgcgctggtaccgttcggtggtgggcatgaccaatccgttcgtggcgccggtgctgaaggcgctgggactggtgcgcgtgggctggagcgcccgtggctacgacggtgtcggctgcacgccggagggcgtgctgtcgcggctgctgccggacctgcgcccgggcgccatcgtgctgctgcatgagggggccgcccacggccacaacctggcgatcatcgaacgcgtgctgcaggcgctggacgagcgggggctgaaggcgcggctgccggttccgtaa

SEQ ID NO: 495188 - DNA, 720 bp, Stenotrophomonas maltophilia
atggatggcacgccacggaacggcccgcccctgccctgcacacccttgagcgccgcgcaggcccgcgcgatcgccgaggcattccgccccgcacacgcctgggccagccgccgcgactactactacacccgcagcaagctgggcagcgacccgctgtatgacggcgtgctgcagcacctgcctggcgacgggcaacccgtgctggacctgggctgcgggctgggcctgttcgcccacgtgctgcgccagcgcggtggctcccagccctaccggggcgtggacgtggatgccggcaagatcgcccgcgcccagcgtgccgccaccggcctgcccgctgtgcgcttcgactgcctggacgtgcaggcgccgctgccggcgcaggccgggcatgtgctgctgctggatgtgctgcagtacctggacgcgggcccacagcaggcactgctgcgtgaggccagtatgcgggtcgctcccggcggccgcctgctgctgcgcacgccactggccaccggcgatggccgcgaccgcaccacgcgggtggcggaccggctggcctggctggtcggctggatgggcacgcggccgcgccactaccccgacccgcaggtgctgcaggcgacactggccgaggccggattgaaagtgacggccccgcgccccctgcacgggcgcacgccgttcaacagctggttgctggtggccgaacgccccgcgttgtag

SEQ ID NO: 495189 - DNA, 618 bp, Stenotrophomonas maltophilia
gtggcgctgtcctacctggcgctgggcgattcgtacaccatcggagaagccgttgccgttgaaggccgctggccacaccagctggccgccgccctgcgtgcgcaggatgtggcgctggccgacccgcagaccatcgccaccaccggctggaccaccgacgagctggacgccggcatcgatgcggccgcgccgcagggcccgttcgatttcgtcagcctgctgatcggcgtcaacaaccagtaccgcggccggccgctggacgagtaccgcgtacagttccacgccctgctgcagcgggcgatcggctttgccggtggccgccccgggcgtgtgctggtgctgtccttccccgactggggtgcaaccccgttcggtatcggcagcggccgtgacctggccgcgatcgagatcgagaccgacgaattcaacgcggccgctgaagtgatctgcacccagcagggcgtggccttcgtcgacatcaccgacatcagccgtgaccacggtggcgacccggcgatgatcgccgacgacggcctgcacccttcagcacggatgtacgcgctgtggagcgcgcgcgcgctgccggtcgccgcccacctgctcggcggaacggactga

SEQ ID NO: 495190 - DNA, 1299 bp, Stenotrophomonas maltophilia
atgccttttgacggcccagcccccatgtccaccatctcgcccaagcccctggccatccgcgagcgcctttccgaagtgcgctacgaaatccgcggagaactggcgcggcgagcccgggagctggaggcgcagggccgcaagctgatcaagctcaacatcggcaacccgggcaacttcggtttccgcgcgcccgagcacctgcagcgcgcgatcgccgatgacatgggccgcaccgatccatacacccaccagcagggcctgccggtcgcacgcgaagccatcgcggcgtactacgcccgccgtggcgcaccggatgcgcaccccgaccgtgtgttcgtcggcaacggcgtcagcgaactgatcgacctgtcgctgcgcgcattgctcaacccgggcgacgaagtgctggtgccctcacccgactacccgctgtggtcggcctcgaccatcctcaacgatggccgcccggtgtactaccgctgcgccgccgagaacggcttccagccggacccgagcgagatcgagacgctggtgtcctcgcgcacccgcgccatcgtgctgatcaacccgaacaaccccagcggcgccagctacccgcgtgaactgctcgagcgcgtggtcgagatcgcgcgccgccacaacctgctgctgctggtcgatgagatctacgaccagatcctgtacgacgatgcggtattccagccggtcgcgccgctggccggcgaccacccgtgcctgaccttcagtggcctgagcaaggtgcaccgtgcctgcggctggcgcgtgggctgggcccacctcagcggcgacgacgcgcgcctgggcgacttccgcgccgcgctggacctgctcggcgcgctgcgcctgtgcgccaacgtgccgggccagtacgccatcgaagccgcggtgaacggcccggacaccatctccgaactgtgtaccccgggcggccgcctgtatgaaacccgccgcgcggtgatcgaagcctgcgaagccagtgagcacctgtcgctggtcgcgccggccggtgcgctgtacgcgttcccggccgtggtcggtgccgccgccaagggcttcgacgaccacaacttcgcgctggatctgatgaacaatgaaggcgtgctggtggtaccgggttccagcttcaacgtgccctaccgccatcatttccgcgtgaccctgctgccggaagcctcggtgatgcgcgatgtgtttgcccgcatcgaccgcgtgctggcccgccgtgccgaggacgcgaccaaggtcgtaccgttgaagccgcgccgttcggtggcctga

SEQ ID NO: 495191 - DNA, 1167 bp, Stenotrophomonas maltophilia
atggcaagggtgccgggcttgtcattgctgggctggcagggcgccggcgcaggtagaatggcggcgatgacccagacccccgatttcatcgccctgcagaccatcggttggccctggccgggcccggcgcagcaggccgactggcaggccgtgatggccgcgcacccgcaggcccgcccggcgcgggtgatcgaacagcaccgcacccactacgtggtggccgatggcccggatgcgtcgatcaaggccgaatcgctgccggaatggcagcgcccgcgcttccccagccacgagcggcctgcagtgggcgactgggtgctgctggacggcatccgcatcgtcgcgctgctgccacgccgcaccgcgatcaagcgtggcgccgccggcgagcactaccaccagcaggtgatcgcggccaacatcgacacggtgttcatcgtctgcggcctggatgccgacttcaatccgcgccgcatcgagcgctacctgctgctggtcggcggtggtggtgcagaaccggtggtggtgctgaccaaggccgaccagaccgagtacagcgaggatgcgctggcggtgctggaagagctggagatgcagggcatcgcgctgcatgcgatcaacggcctggatgccgacagcgtggcggtgctgcaaccgtggctgggcccgggccgcacggtggtgctggtcggttcctccggtgccggcaaatccacgttgaccaacaccctgcttggcgagcagcggatgaagaccaacgcggtgcgcgccaacgattcgcgtggccgccataccaccacccaccgcgcgctgatgccgttgccgacgggcgcctgcctgatcgacaccccgggcatgcgcgagctgaagccgaccggtgaagagacgctgtccgaaggtggcttcgcggacatcgaggcgctggccgcacagtgccgtttcaacgactgcaagcaccagcaggaaccaggttgtgcggtgcgtgcggcgatcgaggcgggcgagatcgaagaaagccggttgctgaactacttcaagctgaaggaagaagtggctgccgcagccgccaagctggcggtacgccaggccgagaccgcgcaggagcgcggcggcaagaaaggcaagggccagcagttccgcccggcaggcaagccgcgtaggcgctga

SEQ ID NO: 495192 - DNA, 1254 bp, Stenotrophomonas maltophilia
atggaaccgactgcgacgctggaccgtgacgtggcccaccatgcagcgctcgatgcgcgcctggtcgaggccgtgggaggcatccgcctgctgggcctgaccagctggccggccacgctgcaggcaccgttcctggacagcgtggcgcgcggccagccggtgctgccgaaggtggattacccacggctggacttcagcgaagaacgtcgcgcgctggccgcgatcgccgccgactgcgacgacactcatccgctgggccactacgtgcggcagtcagcgcagagctgggacctggccgcgcagctgctggaaggactgggcaccgccgccgttgatacctgttcggtgcagctgttcggcgcccccgagcagccgctgccgggcaatggcccgagcacgcgcgacgcggcgcgccacttcatacagattgccgccgaactggaccacgaactgctggcgccggaagagcaggtgccggtctcggccatcgccctgcagctgcagctgcagaatgatctggatgcgtttttcgaatcgcgcatcatccaggtgcagctggatccggaactggtgtccaaggccgccgccggcccgacccgcatccgcctgcgcaccagcgcgcgcttcagcgcctacgaccgggcgcagctgttccaccatgaagcgctggtgcattcgctgaccgcattgaatggccgcggccagccggtactgccgagcctggcgttgtcctcgccacgggtaacggcgacccaggaagggttggcgaccttcgccgagcagatcaccggcagcatcgacatcgagcgcctgaaacgcatcagcctgcgtaccgaagcgattgcgatggcacgcgaaggcgctgatttcatcgaagtgttccgctatttctgcgatgccgggcagaacgcggaagagagtttcgcctcggcccagcgcgtgttccgtggcgtgccgccgagtggcggcctggcgttcaccaaggacacggtgtacctgcgcggcctggtatcggtgcataccttcttccggcacatgctggccgaggaccgcctgcaggtctgccgctggttgttcgccggcaagatgagcctggccgatgcgatcgcgttcgcgccgctgttcgaggcgggggtgctgaagccgccgcgctggctgccgcattgggtgagtcgggcgaacggcctggccggcatgctggcgttctcgctgttcgccaaccggatacggatggaccagctggcgccggaatga

SEQ ID NO: 495193 - DNA, 351 bp, Stenotrophomonas maltophilia
atggggtctccatggggtgcgcgcgtgactttgtccgtcgactcaacaccgaccttcgctcgacgcctcaaacaagcccgcctgcacacgggtttgtcgcagaaggagttgggcatccgggccggtctggatcctcacgtggccagcccccgaatcaaccagtacgagcgtggcaagcacgagcccatgctggagattgctgagcggttggcccaagcgttggggatccccgccgccttcctttacaccgacgatgatctgctggccaagttgctcctgcgctggggctcgctaagcaagcagcagaagcgcgagttggtgaagctgatcgaggccacgcccgagaagtaa

SEQ ID NO: 495194 - DNA, 1671 bp, Stenotrophomonas maltophilia
atgaacttcaccggcaagacccgcaccgcgatcacggtcaacgggtccgttccggcgccgttgctgcggtggcgggaaggcaccacggtcaacttgcgcgtctctaatgcattgcccgctaactccatccatggcgcggacacctccatccattggcacggcatcattttgccggccaacatggacggcgtgccgggtctgagctttgacggtatcggacgtggtgagacctaccactaccggttcaccctgcatcagggcggaacctactggtaccacagccactcagggttccaggaacaagccgggctctatggcccgatcgtcatcgacccattggagccggagcccttcagtttcgatcgcgactacgtcgtgatgctgagcgattggacagacctggacccgacggccctgttcgatcgtttgaagaagatgccgggccatgacaattactacaagcgcacggtcggcgattttgcgcgcgatgtgaagcgcaacggcctgtcggccacgttggaagatcgcaagatgtggggcgtgatgcggatgacgcccacggacctgtccgacgtcaacgccaacacctacacctacctgatgaacggcacgacctcactgggcaactggaccggtttgttccgcagtggcgagaaggtgcgcctgcgtttcatcaatggctctgccatgacgtacttcgatgtgcgtattccggggctgaagatgaccgtggtggcggcagatggcttgtatgtccatccggtttccgtcgacgagttccgcatcgcggtagcagaaaccttcgatgtgatcgtggagccctccgggcaggacgcattcaccatctttgcccaagactccggtcgcaccggctacatcagcggcacgctcgctgtgcgcgaaggattacgcgcgcccgttccgtctgtggatccccggccgctgctgacgatggcagacatgggcatggatcatgggtcgatggatatgtctggcggcagcaagggcatggaaggcggctgtggtgcggccatgggcatgcctggcatgaccccacctgtcagcggtaacgcgacctcggcccatgcaggccatgcgatgcccgccgccggcgatggtgccatggcaggcatgcagcacgggggcatgcaatcacaccctgctagcgagaccaacaatcccctgttggacaaccaagccatgagcgtgagttcgcgcttggatgatccgggcaatggcctgcgcgataacggccgtcatgtgctgacgtattccatgctcaagagcacctttgaagaccctgacggacgcgaccccggtcgcgagatcgagctgcatctgaccggacacatggagaaattctcctggggcttcaacggtcagaagttttccgatgtcgagccgctgcggctgaactacggcgagcgtatgcgcatcgtattggttaacgacacgatgatgacccatcccatccatttgcacggcatgtggagtgacgtggaggacgacaacggcaacttcatggtgcgcaagcacacggtggatatgccgccaggtagccgacgcacgtatcgcgtgcgtgccgatgcgttgggcagctgggcgttccattgccacctgctttatcacatggaagccggaatgatgcgcacggtgagggtcgacgaatga

SEQ ID NO: 495195 - DNA, 1269 bp, Stenotrophomonas maltophilia
atgaacatcaatagacgcgataccaccctgactgcgctgacggctatctcgctggccctggccaatgcggccagcgcccaatctatgcagcacggctccatgcagatggagcagggcgcgcagacccagactcaggatcactctgcacatcaggcaccgacatcaaaacctgcgccagcccaaaagcctgcaacaccggccaagacgagcgaagcgacgatcgatcatgcggcgatgggccacgccgagccgcaggctaacgcagccgagcctgccatgcagggcatggaccattcgcagatggggcacggctcgcccgcgagcacacctgcggcgcccacagcgcaggcgcagtcgatgcagggcatggatcacagtcagatggcacagcccgctgcagccgacacctccggcacggccacgcctgcgatgcaggggatggaccattcgcagatgggccatgattcgcccgcgcccgctacaccagaagcgggaatgcaatcgatggagggcatggaccacagtcagatgggacacgggcctgcagcgccaacgcagccgcgcaccccgattcccgcggtgacggacgcggatcgcaaggcggccatcgcgccggaacacgcgcatccggtgcatgacaactcgatcaagagctacgtgctgctcaatcgcctggaaacctgggatgccgatccgggcaccgggctgggctgggagggccagggctggatcggtacggacctcaatcgcgtctggctccgcagtgaaggcgaacgcacggatggtcagaccgagtcggctgatctggaagtgctttacggccgcagtatctccacgtggtgggatgtggtggccggtgtgcgtcatgacttcaagcctggggcatcgcagaacttcgccgctatcggtgtacagggcttggcgccgatgaagttcgaagtgtccgccacagcctatctcggcgaagggggccagactgccgccaatgtcgaggccgagtacgaattgctgctaaccaaccggctgatcttgcagccgctggtggaagtcaccgcctatggcaagaacgatccattgcgcgggataggttcgggtctgagtgccgctgaggcggggctacgacttcgctatgagttcacccgaaagttcgctccctacatcggcgtggtgtacgagcgcgcgtttggcaataccgcagacatgcgacgcgagcatggcgagtcctttgaagacacgcgcttggtcatcggccttcgtacctggttctaa

SEQ ID NO: 495196 - DNA, 771 bp, Stenotrophomonas maltophilia
atgaaatccaacaaaaagatgtgggtatggctcggtgccggcgtggcattggttgcggtggtcgcaaccgccacgctctctctgggcgtgtacaacgtggccgccgacgatccgcatagtcgcccggtgtatgcgctacttgaaacggcgcgcgagcgttccattgaggtgcgcgccgccaagcttcagctacccacgaaccttgatgatcctgagcgtatccgccagggtgcgggcaactacaacgccatgtgcgtgacctgccatctttcaccagacgcggcggccaccgagatgagcaagggcctgtaccccacgccaccgaacctaagcaaacagccggtcgctccagctgaggcgttctgggtgatcaagcacggcatcaaggccagcggcatgcccgcttggggcggcagcatggacgatgagttcatatggaacatgtcggccttcctgcagaagttgcccacgctggacgcgactgcgtacaaggaacttgtcgacagcagcgagggccattcgcatggcggcggcgagacgcaaggccaccatgacgacgaaaaggccgaggatcaccctgccttattcgagccgggcaacaactccatgccgcatgcgcacccgccgggcgtggacgacgatcaccacggcccgacacccagcgacacggaagtcgggttggtgagccacggccatcccgacggcaaggtggagtcgcaccctgcaccacacacgcccgtggccgatgacggccatgcgcacccccattga

SEQ ID NO: 495197 - DNA, 510 bp, Stenotrophomonas maltophilia
atgaacgcaacagcaatctcgttcaccctcgcactggcactggccgtcgtgtcccccgcaatggcgcaggcgacacagccgcacgcacatcaccccgctgccgcggcatctgcggacgtcgacgtcccagtcactgcagaggccgcggtcgccgtagcggagcgtttcaacagggccctgtctagcggcgatctggccacggtcgaagccctgctcgctgccgacgttctcatcctcgagtccgggggcgccgaacgcagccgcgaggaatacatgggccatcacgcagtcagcgatgcggcgttcctcaagggcgcccatcgccagctgctccgtcagcgcgcacgagccgctggcgagttcgcgtgggtcggaaccgaaagcgagttgcatgcccagaaggatggccagccactgaccgtccagagcgacgagacgatggtgctgaaggagaccgcggacggctggcggatcgtccacatccactggtcctcgcggaccaagcgctga

SEQ ID NO: 495198 - DNA, 366 bp, Stenotrophomonas maltophilia
atgaccgtccacaagaccccgacctgcgggtgctgcggtgtctggatcgaccacgtgcagaaggcgggattcaccgtggatgtgcacgacatggatgacctgggtctggtcaaggagcggttgggtgtcccctatgcaaagggctcctgccacacggccgagatcggcggatacgtcatcgaaggccacgttccggccgcggacatcaagcgtctcctcgaagaaaagccgaacgcacgcggcctggtcctcccagggatgccgcttggttctccgggcatggaggtcccggagggacgccagcagccgttcacggtcgagctgatacatcgcgacggaaccactgaaccgttcgcacagcactga

SEQ ID NO: 495199 - DNA, 351 bp, Stenotrophomonas maltophilia
atgactcaccattccgcagcacaccggccccaggccatgaacgagtgcatcgacaactgcacgcaatgccatgcgatctgcctggagaccatcaactactgcctgaccaaaggaggtgttcacgcggccccggagcacatcgccctgttggcgacgtgtgccgatacctgcgcaaccagtgccgacgcgatgctgcgcggtgccagcgttcacgacgtggtttgcggtgcctgcgcggagatctgccgccagtgcgccgatgcatgcgacgccatgaacgaccctgagatgacgcgctgcgccgaagtttgtcgccgctgcgcggaaagctgcagcgccatggcagcgtaa

SEQ ID NO: 495200 - DNA, 384 bp, Stenotrophomonas maltophilia
atgaagtcgtccaacgtcattcgctccttcgcgctcgtcctcgcaatcgcggccgggcagttttcgctgcaggtcgcgcacgcccacgccgcgctgcagcagtccacaccggcggcaaatgcggtggtggcctcgccaggccagatcgatctcgtgttcaacgagacattgatttcgcgggcgtcgcgtctcaagttgctcatgaagcacggcagttccaccatgccgatcgagaatttcacgaccgagatcgtcaacaacggcaagaccctgcgtgccaagttgcctggaccgctggctccgggcgtctataccgtggaataccgcgccgtcggtggtgacaaccaccccatgccgggcagcttcagcttcacggtgcgctga

SEQ ID NO: 495201 - DNA, 930 bp, Stenotrophomonas maltophilia
atgttcgacctgtcggcttatgcactgagattcttggaataccttgtcatcatggttcttttcggggttccactcttcggttggtacgggtcgcgtcgatcggcactcgccgacgccttggccgggtggtcactcatgggcgttctattggcgggtgccgtagccggtctcgtgctcaccgggctcgatgtcgtcttcaagaccgcgggcatcatgggaatgccgcttgccgaggttgatcgcgcatcgcttggctggtatctgctcgagacgtccgcgggccgggcagccatggcgagaggcgcgctgctggtcgccctgatgttcgtgctcggatggcatcgtcgccgcgggaaggtggagaccgccttcccgctgggggcgatgctggcgggcggcgcactcgcttcgctggcatggaacggccacgccgccgctggcgagggcttggcaggcgcggtccggcttgctgcaggcatcgtccatcttctcgcggcaggcggctggatcgcagcggtcctgatgttccttgccatgctgctgcgcggcaaagagacgaacggcagcgggcgtctgcgatcaacgcatgactttctgcatggtttttcgacgctgggaacgatcttcgttggtgcgctcatcgtgtccggcatcgcgcactacggggatctcaccgcgtggtcgttttcggccctgttccagagcacctacgggaagttgctgcttttcaaactggccctgttcgctggaatgctgggtttgggagcgctgcaccgatggacgctggtgccgcgcttggaacgagcgctgaccagcggagatcccgcgcaggaggtgcgggctttgcggcagagtgttacggctgaggccgcgctggccatcttgatcctgattgttgtttcagtgctcgggacgctcagccccgaatag

SEQ ID NO: 495202 - DNA, 2322 bp, Stenotrophomonas maltophilia
atgaactcaccgtcgtcccatgaccatcaccattctgcaggcgcagcccctgtcgaggctgcggatggacgggtcatcaccaatcccgtccgctatacggacgatgctccccagcaagttgaagtgaccgccccagcagcggtggcccaacccagcggtacccacgccacggtctacacctgcccgatgcatccgcagattcgtcagccaggtcccggcacctgtccgatctgcggcatggcgctggagccggagatgccctcgctggaggaggacgacaatccagagttacgcgatttcacccgaaggttctggtggacgttgcctttgacgttgatcgtcctggtcttggccatgctgggacaccgtctgcccggcttgtccacgcaggcgcgcacctggattgagctcgtgctgagcgccccggtggtgctctgggcggggtggcctttctttgagcgctgcctacagtccatcggcaatcgcagccccaacatgtggacgctgatcggcatcggcgtggccgccgcgtttggctacagcgtggtggccaccgtggcaccggacctgtttccggactctttccgcgagcatggacgggtaggggtctacttcgaggcggcagcggtcatcgtctcgctcaccctgctcggacagctgctggaactgcgggcgcgttccaaaacctcggcggccatcaagtccctgctgggattggcgcccaagacggctcgccgcgtcaaacccgatgggggcgaagaggacgttgcgctggatcacgtgcacgtgggtgatctgcttcgcgtacgaccgggcgagaaggtgccggtcgatggggaagtcatcgaaggccgcgccagtgtcgatgagtcgatgctgaccggtgaacccattccggtggagaaggctgtcggtgatcacgttataggcgccacgctcaacgggacgggcgccttagtcatccgggcggacaaagtcggatccgggacggtactggcgcagattgtgcagttggtagcccaagcccagcgctcccgcgcgccgatgcagcgtatggcggacaaggtggcgtactggtttgtcctggccgtgctggccacggcggtgctcacgttcttcggatggggtctgtttggacccgaaccgtcctggacctttgccgtcctcaatgccgtatcggttctgatcattgcttgcccgtgtgccttgggtttggctacccccatgtcgatcatggtcgccactggccgcgctgcgcaggtcggggtcctgttccgcgatgctcaggcgatcgagcagctacgtctgatcgacacgttgatcgtggacaagaccggtacgttgaccgaggggcgtccagcctttcgcgacacgctctccaacgccggcttcgacgccgatcagatcctttgtttggccggcagcttggagcagggcagtgagcaccccttggccgaggccatcgtggctgaagcccagcgacgtggcttgaacctggtggccgcccaagattttgattcgctcaccggccaaggcgtccgcgggcgcgtgtccgatcaggatgtcgtgctcggcaaccaaagcctgatggcgtcggttggcgccgatgtagcacctttgcaaagcagcgccgagcgtcttcggaaagaaggcgctagcgtgatgttcctggcggtcaatggtcggttggccggcgccattgcggtggctgatcccatcaaagccacgaccttgcctgccttgaacctgctacgtgccgatggcctgcacgtggtgatggcctccggtgacgcacaggcgacggccgaggccgtggggcgcacgctgggcatcgaggatgtgcgtggtggcgtcaagccgcaggacaaggccgacctggtccagcaactcaaagcccagggtcgtcgcgtggccatggctggcgatggcatcaacgatgcgccggccctggcggcagccgatgtgggcatcgcgatggggacgggcacggatgtggccatgtccagcgcccagctcaccctggtcaagggtgatttgaggcgcatcgtgcaagcccgtgccatctcgtctttgacggtggccaatatgaagcagaacctgggcttcgccttcgtctacaacgccatcggcgtgcctatcgccgccggcttgctgtatcccagcttcggccttttgctcagtccgatgatggcggccctggccatgagcctgagctcggtttcggtggtcaccaatgccctgcgtttgtccggctccaccgttgttgccaccccccaccctgaccgcgccgatgagcctgcgcgcggccattcctgtcactga

SEQ ID NO: 495203 - DNA, 276 bp, Stenotrophomonas maltophilia
atgaagcgttatgcctccctctcgatgatggccttgttcctgatggcgggcgcggccttcgccggcggccagaccaccacgcccaccaccgaccacggtcagcacaagccggcggcggccgatgccgatttcaccaagctcgatgccaacaaggacggctcgctgtccaaggaagaactggccaagcacaagctggcgccgcactttggcatgctcgatagcaacaaagatggcaagctgagcccgcaggaattcgctgccggcaagggtatgtaa

SEQ ID NO: 495204 - DNA, 552 bp, Stenotrophomonas maltophilia
atgtcctcttcgcacggtacgcacgaaaacgcgcaagacccgcagtcccagcacgcaaaaccgcacgcctcacaccaacctgcccaccaggcacaacaagggcatcaaggccattacggccgcctgttgttgatgatgggcctgtctttcgtggccatgtacgcattgatgtacgcaatggtcgatcagtgggctaacgtctataacaacgtgaaccagttctacatggcgggcctgatggccgctcccatgctgctgatcgagctgtggctaatgtccagcatgtaccccgatcgccgacgcaatctgattctggctggtctgacggtggcgttcatgctgttctgctggtggggcattcgcactcaagcagcggtcactgacaaacagttcatccgttcgatgattccccaccacgctggcgccatcctgatgtgtgaggagaatcgtctgaaggatcctgagttggtgaagctctgccaggacattattacctcgcagacacaggagatcgcgcaaatgaagcagttgctggctgagcgttcccattag

SEQ ID NO: 495205 - DNA, 441 bp, Stenotrophomonas maltophilia
atgaccagatccagcagggcttccaggacctccagactcaccccgcgtgggttgggggcgctcacgcccggggccaccaccattgagtacgccggcaagatcaccagcggcttgggtagctacacccagtggcgtggcttgggctcactgcgtatgggcaagaaccgttggaccggcgtctattcggcgcagtacatcggcagcgcggacgacatcatcgccgtgcccgacacgatcggctcgcatgtgtccagcgtggtgtaccacagcctgcaactgagctacggcatcaagaagaagtgggatatctccgccggcgttgaaaaagtgctcgataagaaggcgccgttcgtgaagaacaaccccaacaccgacaccgacaccatgacgtacgacttgctgggtcgtcgctggaatgtccgctttggttaccactggtaa

SEQ ID NO: 495206 - DNA, 831 bp, Stenotrophomonas maltophilia
atgagaaacacgcaactatccgccacactactgctgttcgctgtggccggcagtgccggtgcgcacgacctgtttgtcgctttctccaagcctggcaccgcagcgggcgaggcgaacacagcgttggtgaacaatggcaccttcgatgaaagtgcaggtgcagtcacccgagcgcgtctacaggacgtttcgctgagtcagggcggcgctaagactgcaccggacttggccagttggaaagaggtcggcaagcagagccagctcaccgtgcatccggcgggcgagggcacctatctgctgggggtctcgacgatggcctccaccagcacgcgtacggccagcgagttcggcaagtacctggagttggaagacttgcccgataccctggccacctatgatgcgagcaagtttcccaaaggggtcacctatagctataccaagcatgctcgtaccattggacaggtgggcacaaaactgaccgacgatttcgctgcctcgctgggctatccgctggagatccgcttggcccgcaatcctggaagcgtgaaggtcggcgaacagctgtcgttccaggtgctgcagcagggcacgccagtgcccaacctacgcgtgtacgtcggtcatcgtgctgacgcaccggtcaagggtgggcacggtagcgctacgctcctgcgcaccgatgcccaaggccaagccagtttccaggtgaccaccgccaagacctggtacatccacaccaatcacatggtgccctctacacaaaagggtttggattttgtgtcggatcgggcgtcgctgagctttgagatttccccgcacgccgggcactga

SEQ ID NO: 495207 - DNA, 3141 bp, Stenotrophomonas maltophilia
atgatcgcgcgcctgatccatgcttgcatcgccaatcgcgtgctggtgctggttgccgccgcgctgctggcggtggtcggtatctggtcggtaaagaacacgccgctggatgcgctgccggacctgtccgatacccaggtcatcatccgcacgcaatgggcggggcaaaccccgcgcatcatcgaagaccaggtcacctacccgttggccaccacgatgttgtccgtgccgggcgtgaaggcggtacgcggcttctccttcttcggtgattcattcgtctacatcctgtttgacgatgccactgatctttactgggcgcgctctcgagtgctcgagtacttgagccaggtacgcgatcgacttccgccgaatgtgaatccggcgctgggtcctgatgcgacaggactgggctggatctaccagtacgccttggtggatcggacaggtcaacgtgatgtggggcagctgcgtgcgttgcaggactggtttcttcgttatgagctaaaaaccgtgccggacgtggctgaagtagccagtgtgggcggtgcggtgcgcgcctggcagatccagcccgatccgcaggcgttggcggcccgtggactgacggtggccgagctcatcgaggcggtggatgcggccaacggcgctaccgggggctcggtgatcgaacaaggcgaagccgaactgatggtgcgcagcgaaggctacctgcgcacacaggaggcgttcgaacaggtgccggtaaccggcaacgacggcatccccgtcctgctcggcgaggtggccacgatcagtcgcgggccggtcttccgtcgtggtatcgcagagttggatggtcaaggtgaggtggccggcggcgtgatcgtcctgcggaccggcaaggatgccttgggggccattcggaacgtcaaagcgcgactgcaggcgttgcaatccagcttgcccgagggcgtggaagtggtgccggtgtacgaccgctccgagctgatccaggatgcggtacgcaacctcacccacaagcttggcgaagagtttctggtcgtagcgctggtatgcctgctgttcctgtggcacctacgctcggcgttggtggccgtcatcaccctgcctttgggtatcctggcggccttcatcgtgatgcacgcccaggggatctccgccaacttgctgtcattaggcggtatcgccatcgccattggtgcgatggtcgatgcagcggtggtgatgatcgaaaatgcacacaagcatctggagcactggcgggaggcgcacggccgggaacctcagggtgaggagcgctggcagctgatggcccgctcggcggccgaggtcggaccggccctgttcgccagcttgctggtcatcaccctgtctttcgtgccggtttttgccctgcaggcgcaggaagggcgattgttctcgcctctggcctacaccaagacctacgcgatggccgccgcagcagggttgtcggtgaccttgatccccgtcttgatgggctacctgatccgcggccgcatccgcccggaacagcagaaccccatcaatcgcatcctgatcgctggctatcggcccatcctgctgtgggtcctcaaacatcccggtgtcaccttgctgctcagcggcctgctgctagtgctcaccttgatcccctttagccggttgggcagtgagttcatgccgcccttggaagaaggcagcctgttgtacatgcccacggccctgcccggcctgtccgccgacaaggcccgtcagttgctccagctctcgggccggatgatcaagaccgtaccggaggttgagcacgtgttcggcaaggcgggccgtgccgaaagtgcgaccgatccggcaccgatcgaaatgtttgagaccaccgtgaccttcaagccgcgggatcaatggcgcccgggcatgaccccccagaagctacgccaggagttggacgcagcggtcaagattcccggtctgaccaacctatgggtcccgcccattcgcaatcgcatcgatatgttggccaccggcatcaagagcccgattgggatcaaggtctccggacccgatgtggagcagatcgagcgcctgagccagcagatcgagcaggtggccaagactgtgcccggcgtgagttcggcactggccgaacgcgtcacgggtgggcgctatgtcgatgtacaggtgcgcccggaaatcgctgcacgttacggattcactcaaggccaactccagcaactgattgccacggtcgttggcggtgatccaatcggggaaacgatcgaggggcgcgaacgctatcccatcgtcttgcgctacccccgtggccagcgtgactcgttgcaggccttgcaggatctgccgctgatcgcgccaggcggtgtgcaactgaccttgagccaggtggcggagctgtcaatcagcccaggcccgccgatgctcaagagcgataacggccggttggtgggctacatctacgtggatgtggccgatcgcgacttgggatcggtggtccaggaactgcaagccgcggtgcagacccaggtgagtttgcctgccggctatggtctggcgtggtcggggcagtacgagtatctgcaacgggctttggcacgcctgcaatgggtggtgcccgcggcgttggcgatcatcttcctggtcatctggatggtatttcgccggcttagcgatgtatccatcatcctgctcagcttgcccttggcgttggtgggcggtttctggttgatctgggggctgggccatgcgatttcggtggccagcatgatcggattcatcgccctgggcggcgttgcggctgagttcggcgtcatcatgctgctgtacctgcgtcatgcctgggagcagcgcttggccagcggtgcgccggaagatgtgtctaccctgcaagaggctatctacgaaggcgccgtgcaacgggtgcgcccgaaggcgatgacggtagccgtcatcctggccgggttgtttccgcttttcgtcggtgccggtgccggctcggaggtcatgcaacgtatcgccgcgccgatgctgggtggcatgctcaccgcaccggtgctctctatggtggtgattcccgcagcgttctatctagtgcggcgacgtggattgcgcgcggcgcggggcgaccaatga

SEQ ID NO: 495208 - DNA, 1515 bp, Stenotrophomonas maltophilia
atgagcccgaccaagacgcgtctcacacagctcgccgtggccctcgggttgctggcgctcggctttgccggcggctacgcctggatgactcgaacctctgataccaccccgccccccggcacgagcgtcgcagatcaagcacgcaaggtgctgtactggtacgaccccatggcgccggagcagcgattcgacaagccgggcaaatctccgttcatggatatggagttgctgcccaaatacgcagatgaggccatagggggcggaacgcagatcgatccgcgcctgcagcagaacgtgggcatacgcactcaggaagtgacggtagagttactagggactgccgtacgcgtgccgggcacactgacgtgggatctgacccaggaaagcgtgatcagtgcgcgcatggaaggcttgatcacccacgtgcaggtaaaggcgccgtttaccgaggttcgtcgtggtcaaacgctggccaccgtgcaggccccggcatggaacgcggccatcgccgaagcacatgccctgagccaagctcagtccgcgggcgcgcgtgagctgcagggtgcggcgcaacaacggttgcgttcgttgggtgttccttctggcgcctcggccagaagtggcgtcgtgcttagcgcagaccacagtggtgtcgtgaccgagatcctggcacgcgagggacagacggtgatgcccggtacgccactgttcaagatcaatgggctggacacgttgtggctggaggcctcggtaccccaggcagcgctgggcaccttgcggccggggacctcagtgcaggccacggtcagtgcctggccggcagagcgctttgccggacagatccaggcgttgcttccccaggtcgacatggctagtcgcacgcagcgggcgcgaattgtgctgcgcaacccgcagcgtcggctggtgccgggcatgttcgccgaggttctggtgcagcccgacgccgagcaggccctgccagtcgttcccacggaggcgctgatcgccaccgggcgggacagccgggtcatcgtgcaggatccggacgggagcttccggccagtgcgggtgagtgtgggacgtagcgtgcaagggcgcacgcagatcgtggcaggcttggccggtggtgaacgcgtggtcgtctcgggtcagttcttgctcgactccgaagccagtctctccggtgcgttggagcgcctgggtgctgcacaaccgacacgccctgccagcgcatcaggtgtgcacgagcgccatgacgccgggcacgaaccacgcactgtcgtgccgtcaccgtccagacagccggcgcctgtcgcgccagacacctccacctctacgccgccgcgctgcccggtgcagtactggtatgacccgatggtgccggagaagcatttcgacaagccgggcaagtcaccgttcatggatatgcagttggtacccaagttcggccccgccgcagccgctgattgccaggcaagcgaggtcatgtccgaagcgatggagggcacaccatga

SEQ ID NO: 495209 - DNA, 1305 bp, Stenotrophomonas maltophilia
atggagatgtctttcttcttgcgtgcaaggcgcaagatggcgtgtgggttcgtgtttgccctggcgctcagtggtcctgtgctggcggcatcgcccgctatcccgatcagctacacagaagccctacaacgggcgcttgctaacgccccaaccctgcaggtgcgccgatcgcagatcgatgccagtaccgaagaagccacgcgtgctggcgcgcttcccgacccacgtttgatcgtggggctggcgaactggcccgtcagcggacccgatgccttcagcttgcgggccgatgagatgaccacccagcaaatcggtctgatgcaggagtttcctgcgcgtgcgaaacgacgtgccgagcacgcgttggcgcaagcgacgctggcgcaagcgcgctcactgtcgatggccgaacagcagatggtggcccaagcggccgcgctggcctggatcgagctgtggagtacgcagcaagccgtagatgcgttggaaggtctgcgcgagccggcccgtatagccgagcgtgcggcgcgtgctcgcttggcaggcggcacggccggggccagtgatgtgcttgccgcccaggccgccctactgcagttggacaatcgcctggagcaggtacatgcggagcacgccgccgcgcaggccggcctggcgcggtggttgggtattgcaccagaggcgatcttggccagtggtgcggcaccggatttttcgcagttgccattggagcccacccaactgctggccaaactggaccaacacacgccactactgggctgggaggcacgcgagagcttagcccaggcccaggtggatgcggccgtggccgaaacccgcccggattggagtgtggagctcacctacggacgtcgcgagcgcgcacccgacggcatggcgcgcagcgacatgctcatggtggaagtgggtgtgggcctgccgctgttccagaagaaccgccaagcacgaggcatcgcggcacggcgggccgagctggaggcggtgtccgcagagcgcgatgaggcccggcgcatccaagccgagtcggtgcaacgcgcgatagcgcgatggcgcgggttaaccggccagttggagcgccagaacacgcagagcctgcctttggcgcgcgatcgtgcacgcacggcgttggccgcctacggcgccggtgccgacctgcagccgtggctggaagcgcggcgcgatgagatcgaattgcacctggagaacgcccgtctgctgggcgaacagggccgtgcctgggcggcactggcctatctgctaccccatgaggagaacacgccatga

SEQ ID NO: 495210 - DNA, 396 bp, Stenotrophomonas maltophilia
atggtgaggctgctgaggcgatggcggcgaccccgttctcgtgcccgactggcatggctgggactgtgggcgctgctgctgcagcaactcgcgctggtggcttacgcctgtccgctggaatcggtggaagctggacaagcgaccctgatggtcggttgcgaagagatgtccacgccggatcccgatgctccggcgttgtgcgaccagcattgccagcgcgatcacatcgccacggccgatgcgaaggcccctcaagtgccttaccagcccgcgctggccgccttcgcgctggtgcaggctctgttgccaccggtacacgcgcagttgtatcgggatgttccggtgtgcgtgtccgatccgcctcccctgcagcgcttctgtagcctgctgatttaa

SEQ ID NO: 495211 - DNA, 264 bp, Stenotrophomonas maltophilia
atgaatctcgttgttgaaggtatgacctgtggtcactgtgtccgaacggtcacccaagccattcaggcccttgacccccacgcccaggtggacgtcgatctgggcagtggcgtggtcaagatcgagggcctgcttgccgtagaacaggcggttgaggctatccagcggcaaggctatgtgatcgctgcggtgctcccttctgaggctggtacgccggccgccccggccgtcgcatcctcctgctgcggcggatgccaccgctga

SEQ ID NO: 495212 - DNA, 267 bp, Stenotrophomonas maltophilia
atgccatctgagcgcacccgcaatgtgctgcaggcgggcgcgttcctcaggcagctagcggccagccaagccgtgcctaaagaggtgcggcaagaggcatatcgactgctgcggcactatccaaccgtcagcgacatcgaggcgattgctgagcacgaagagcggctgcgagcgctgacccagtcggccttcgtacgaccctacctgagcagcgagatcgaggcggattggttctccgggtacccgcttggccctcatcgcatctga

SEQ ID NO: 495213 - DNA, 942 bp, Stenotrophomonas maltophilia
atgaagcaaccgagcaggccgcgtggaagagggactacgtctgcggagacagcgctggaggcttcctttgaacgggcccgcgacagtgcggccgaggaacgcgcattcttcaagcgactgatggatgcgatcgtgtacgtgcatgcgcccatctcggacgacgcgcagacactgcggctggtccagttccgccatcctgacggtttcgatgcgatccctttctttacctcgctcgacaaggcgcaggcggccagctcgtctgctgtcagaattctgggagtttcaggccgtgagctgctaaccggtactcgcggcgcgacgttgatgctcaatcccaactacggcggcgttgtcctgtacccggaagaggttgcgacattgttggatacgggctttctggccagggtggaacgtctggcgccggcggagttcgcggtgagacctgcccaggccgcgccggcttggctcgctccggccatcagcggcagccttgagcacgccgacttcgtctcgtcggcctatctcctggaaactcactcgtcagggggcgtcgaacagcctcccggtctgttgatctggctggtggtggacctggctttcgccgagcgggcggctcgtctggtgaccaccgccatacagcccttatgctcagatttggacgtcatcatcgacttggcggtccacgacgtatcgctgcctttgccggcgggcttggatgatccccagatcctgcccatattttttcacgagaatcaagccaacttgagcacagctcatcggcctatgagccctgaagataagctactagcactccttccgggattgaccgaggaagagaaggaacggcggacccgcgagggtatggccgacgtcgacgctggacgtacgatcccgcacgaggaactactgcaatggatcaggcgacggtcagagccttcttga

SEQ ID NO: 495214 - DNA, 402 bp, Stenotrophomonas maltophilia
atggaaaacagcttctttgggcccaagccagtcatcaccgcccgcatcatcaaccgctcaacactgccattgagcgaagcgagctggaatgcggcgctgtacatcaatggcgatgtacagcctgtagccacgtcgaaggtgcgcagcgatttccgttccatcgaaggcctcaagcccgaacaccatgttacggctcgattcactgtcggattcgtcaagggcgataaggcctggaccaccttggcgattcgtcaagctacatccacacgcgtcgagctggagatgatccctgagacagcaatggactttacggacaaagcctatctaagtgccgatcttcagaagcgcattgatttccttgagaaccaactcaagcaagcgagcgagttcgaagatgtctga

SEQ ID NO: 495215 - DNA, 432 bp, Stenotrophomonas maltophilia
atgcgcccgtccatcctcgccttggacttagaaggaacgctgatttccaacgctgtaagccagatcccgcgcccgggcctctacgaatttctggagtcggcaaagtcgctctttgagggtctagtcatcttcaccacagttccggagcctagatttcgcgagattgccgacctattggcttgcgaaggagcggccccgggttggtttgcccgcttgccatacatagactggactgggccgacgaaggatcttgccaacgtttcccagcccatcggctctgcatggctactagatgattacgccccctatgtacaaccgggacaggaacattgctgggtcccggttcaactgttttgttctccttaccccgaggacgacgcgggactggacgatgccatcgaggcaatccgtaagcgactgaacgagtactag

SEQ ID NO: 495216 - DNA, 780 bp, Stenotrophomonas maltophilia
gtggcctatgtcgttagccaaccgaccctcatcgcgccctggccagaactggacaatttcgttcgttcaataggtccctttcttgcgtgcgcgtggtgcgcgctagagcgctcaagaacggctagttcgccggtagctgctgaggggttggcctcgcaggcacttgacacgcttgcgacgctgcgcgtcctccatcgcgaaccagtcgaatgttctcggcttgccgcaagatctctgtatgagcccctggcttggtcctacaaatctccgtggtctcgcagtgacttgaaccttgagtcggcattgacccggtcgctcacccagtgggcggctgagtgcacgcccagtgcgaggcggaatctcggaatttcactggcatccaccgaagctcgagcgtacttggcaaaccttctgcggaagcatcggttggacccgaagctaggcgacgggcttcagtcgattggatcgcctgaatggaatgcgctcagcttggggcgtaagcgctacgtgctgtgggcgagcatgcgaaattctgcctcggagttcatacaaagcggtttggatgagcatgccgcgaggcgagcacttgatcgcgagataaaacgcagatgcatctggttagctggacgcgagcaagctggaaccctcgcccggaaggatttttgcttcttgcctggtcagggttggcgtcagccgttgatcctggacgttgcaatggagactttcctgccgctgggcatggcgtactggctggaacctagcggcagttggcagctttag

SEQ ID NO: 495217 - DNA, 630 bp, Stenotrophomonas maltophilia
atgagcggggagcgccccggcgcacgacgcagaacgttaccgcatgttgggagagccgaaatgatgcgcaccagcgctagccacccgttactgattgcagagttgcctgttggagcccatggaggcggcataggggtgacatttgcgccaggcaagtaccaggaagtcgccatgactggagcatgggcgagagacctagatgtggacgtctcggctattcaggactggggtgccactcacctagtcaccttgcttgagccttgggagctcaaggaccttcgaatcgagagcttaccggcgatagtggcggggaagggcatctcttggcatggactgccaatcactgatggagccgcaccagacgacagactcctcaaagattggctacagctaagtgctgagctcgtcgctgacatgctgagcggtcaaaggatcgtggtccactgcaagggggggttgggacgcgcgggaacggtcgctgccatgcttttgctgcagtctggcgaggccaagcgggcatcggatgccatccacatggtgcggcatgccaggccaggcgcaatcgaaacgattgctcaagaggagttcctagagtactgggcgcagagccttcacccgggcggagcttga

SEQ ID NO: 495218 - DNA, 675 bp, Stenotrophomonas maltophilia
atgaccaccaagaccccgcctcgcctgcttaccgctgctgaggttggcgcctgcattcgccagttccgccagttgcgtcattggtcgcaagaacaattggccgagatctcgggcctgaacgtgcgaacagttcagcgggttgagcagggtgactcggccagtttcgacacccgtcgcgcactggcgcgcgccttcgatttcaatgacatcgatgcactcaacaagcctttctcgctgccgacagacgaggaactgcaggcggcgcaagcgcagtttgagcgcgactacatcaccctggcggtgtccccgcttgctgctgggcgcgagctggccagcctgatcgtttcgtgcgacatggatctgtccgaaccggctttcgagctgtcgcgcgaggcggcgagcgagtttgctgcactggtcgactactaccgtgagtatcgcgactgccaagacctgtattcagaagtcgacaagctagacatctacgacgggctgcagcagcgcattgaggtcctgcgggaactgggagtatcactgtcgcacggtcagcgtaaggtcgtcattcggatgggctcaggtatgccgatggatgccacggtcctgtacgtcgtggcgtttcgcctcggccacgagtgcagtcagatcgtaactcctaaggcagcacgcatcggctga

SEQ ID NO: 495219 - DNA, 666 bp, Stenotrophomonas maltophilia
gtgcctcaatcggctgaccaggatcgggcgtctgtgctggagggctccttagagctcttgggtgaaattcgagccgcttggatggagatagagcatggacgtgaccgaagatcgacggcggtggcggcactttgccagatgtcccttgatcacgccgtggcagtacagtccctgatcgctactctgccccagtcagcaatctcgctggtccggtcccagtatgaggccctcgtgcgtgcaacctgggcatgttatgcagctaccgacaccgacatcgagaagcttcttgcgcccctgactctggagagtcagcaagcggcaaagaggctccctggcgttcaggacatgctcgtaaagcttgagtcctctgggccccgaggagcatcacagttgttgggcagagccagacaatgcctttatgtcggcttgaactcctatctccatgccgggattcaccccttggcaaggcagttaaatggctacccgggcgcgcttctggcgggggtggccatgaacagcaatgcgcttgccatgctaacccttctgaatctggcgcacctgtggccaggcgaaccagttctggcatggatgaatgcactgcatcatcaatttgggggtgttttgccagagttggagccattgaccccccatcagccctcgccatag

SEQ ID NO: 495220 - DNA, 615 bp, Stenotrophomonas maltophilia
atgagcatcctcaacgttctcctcactcgtgaccacctcgtcgtcgcagcggataccctggcagaggatgctctcacaggggcgtattccgcgggggcaaagctgctgctgatccctcagcacaacgtagtgcttgctgcgcgcgggtctacgcaattcttcctccgcatctacgagcttgcactgcaggccagcttccgcgcagatttcacaatagaacagctatctgccgagctagggctggtggtggaccaactctggccgaactttgagaaagcggttagcgaagcgggattgccgatcgagcaactcgggaccgagttggtgcttggtggatggtcgttgaagaacggccggatgatggccacggcgtatgcgaagagtgacagccggcgcccttgcgttgtccagccgatcggggggcagatggcgtcgccgggcgaaccgctccaggccgcgacccctagcatggcccaggtggatctgctggcccatgcgcgtctccaggtcagctacctcaatgggcaattgggccggaaagtagcaggaggtcgactgctagttgggtttctgcagaaggggcaagccctgctcaaggatctaggagagatctag

SEQ ID NO: 495221 - DNA, 654 bp, Stenotrophomonas maltophilia
gtgacgatcagtaagttagcaatcctcaacgctgtgaaagcagccatttcgcgtgctaaggcgagcgggtctccctacgcgcaaggaaaggcttacgaacttcgggtgctgcttaggcttctgcgaatcatcgatagtgcgggctacaagctcacgtgtacccccaagatggcaggcgtcctgacgtttggaggatctccatgcaaagcaaaccatccggatcacgattacatcagtggatctacgtctactgagaagctcgagattaggatttcagtgcaggtcaccacactaagccatagctggaaaggcacgacggtggtcaaagcggctgaccgtcacgagattgacgtcggtgtatatcgtccgattaagacccgtcgctatcccgcatttacggagttacttcttggggtctcgtgcaagactggcggctggaacaaggcgtacgtccgcgaggcgctaggtatgcgtagggagctaggattcctcacatcacctaggacgagcttgacgagctcagctccgtggttcatcgcaacagttccctgcgatcctccggttccctttgccttgtacgcgaccaacgctgggtccgccgtgtatgcgtcgttggcagctttggggctctacgtcgagcactacaaggggtag

SEQ ID NO: 495222 - DNA, 777 bp, Stenotrophomonas maltophilia
atgctctaccaagataagtacgtcgccttcatcgacatgctcgggttctccgcacttgtccaagagtcggcagccgacatgagcaagcttgatgaaatagcagaggccatcgacagactaaagaacacagcgtgctgcaacccagcaacaggacttttgttcacttacttcagcgactgcatcgtcatatcaagcagccgctctcctgctggccttgccgacatcctgagctgcatcagaatgttggccgagaacctgctagtggttgatatattgatacgtggagggctcacagttggaagcattcatcatgattctcagatgatcttcggaccggcgatgctggacgcctatcgcatggaatgtaaggaagcacgcaatcccatggtgctcgtgagcgaagaggtgcgatcggatgctcgcgctgcggggttaagcaacctgttgacgtgggatgacgaagagccagaccgccactatgtccactatctgatctcgtacagcgcttatgactctaatccaagggcgggcgtcgtgattctcgatagccaggccgctctcatccggcatttcatcgccaagaggctgctaggcgctccgggtaagatcctggataaagccgagtggatggaacgatattggaacgagaaggtggcgacaggtggaattctcggacgtgttgacagggtcgcagaccttgttaggcccaatgcgcgaccatttcgcagcagactcgccgttctagcaccgcaaccgggcgccactagtgtggactag

SEQ ID NO: 495223 - DNA, 171 bp, Stenotrophomonas maltophilia
gtgatccaccgtcgctcctggcaaagcctcgaggccgtcgagctggccacgctggaatgggtgaactggttcaatcttcgacgcctgctggagccgatcagcaacatccccccagccgaagctgaagcagcctactatcagcagacccgtgagctcgccatggcggcgtga

SEQ ID NO: 495224 - DNA, 570 bp, Stenotrophomonas maltophilia
atggacattgatctcaagaaattggctccctggaactggttcaagaaggagcaggaagaacaacagagcactgcctcgctgccggtgcagcgcaatgacctgccggtggcgggtgggtcggtcagtcccatcctgcaattgcatcgcgagatcgatcgcctgttcgacgacgcgtttcgaggcttcggtttcccgacgctggccatgccacgctggccgtcggagtggccgggcctgctgaagccggccctggacatccaggagaccgacaagcagtacaagatcgccctggaagtgcccggggtcgaggaaaaggacatccagatcacgctcgataacgatgtgttgctggtgcgcggtgagaagcatcgggaacaggaaacgaaggatggtggtttccaccgcgtggagcgttcctacggcagctttcagcgcgccctgaatctgccggccgatgccaaccaggaaacgatcaaggccgctttcaagaacggcgtgctcacgatcacgatggacaagcgcgaggccagtgcccccaggcaggggcgctcgatcccgatcaacggctga

SEQ ID NO: 495225 - DNA, 2850 bp, Stenotrophomonas maltophilia
atggccagaaagcagtgccaagtctgcggccagcccgccacggtgcgggtggaagccaatctcaatggtcgccacagcaccatgctgttgtgtgacgatcactatcgccaactggcgcgccagcaaaagcgcaccgtctcgccgctggaggctctgtttggctcgcgcagcggtttgttcgaagacttcctcggcagcgacttcttccgcatcggtgacgatgcaccgtccgtggcggccgataccgacgaggtcgtcgatgcctcgttcggcgaatccgctcccgcaacggcgggcacggcgcgccgccgcggcagtgggctggccagccgtatcagcgaacagtctgaggccctgttgcaggaagccgccaaacatgctgccgagttcggccggcccgaagtcgataccgaacacctgctgctggcgctgaccgacagcgacgtggtcaagaccatcctggggcagttcaagatcaaggtcgatgacctcaagcggcagatcgaatccgaagccaagcgtggcgacaagccgttcgaaggcgagatcggcgtgtcgccacgtgtcaaggatgcgctcagccgtgccttcgtggcctccaacgagttgagtcattcctatgtggggccagagcactttctgatcggcctggccgaagaaggcgaaggcttggcagccaacctgctgcgccgctacgggctcacgccgcaggcgctgcgccagcaggtgagcaaggtggtcggcaagggggccgaggacggccgtgccgagacgccgaccaatacgccggaactcgacaagtattcgcgcgacctcaccaagatggcgcgcgagggcaagctcgatccggtcatcggccgcgcgcaggagatcgagacgaccatcgaagtgctggcccggcgcaagaagaacaacccggtgctgatcggcgagcctggcgtgggcaagaccgccatcgtcgaagggctggcgcagcgcatggtcgcaggcgaggtgcccgagacgctgcgcgacaagcgcctggtggaactcaacatcaacgccatggtggccggcgccaagtaccgcggcgagttcgaggagcgtgtgcagaaggtgctcaaggaagtgaccgagcaccagggcgagctgattctcttcatcgacgaggtgcacaccatcgtcggtgccggccagggtggcggcgaaggcgggctggacgtggccaacgtgttcaagccgatgatggcgcgcggcgagctgaacctgatcggcgccaccacgctcaacgagtatcagaagtacatcgaaaaggatgccgcgctggagcgtcgcttccagccggtgatggtgcccgagccgacggtagcgcagaccattatgatcctgcgcggcctgcgcgacacgttcgaagcgcaccacaaggtcagtatcacagaggacgcgatcatcgccgccgccgagttgtccgaccgttacatcaccgcccgctttctgcccgacaaggccatcgacctgctcgaccaggcagccgcacgcgtgaagctgtcagccacggcccgcccggttgccgtgcaggagctggaggccgaactgcaccagctgcggcgtgagcaggactacatggcctcgcgcaagcagtacgacaaggccgccgagctgggcaagcgcatcgaggccaaggaggccgaactcaagaagctcgtcgaggaatgggaacgcgagcgcgcctcgggcagcgccgaggtcaaagccgagcatgtcgcgcagatcgtctcgcggctgaccggcatcccggtcagcgagctgacggtggaagagcgcgagaagctgctgcatctggagcagcggctgcacgagcgcgtggtgggccaggacgaagcggtgcgcgcggtggccgatgccgtgcgtctggcgcgcgcgggcctgcgcgaaggcagcaagccggtggcgacttttctgttcctcgggccgaccggcgtgggcaagaccgagctcgccaaggcgctggccgagtccatctatggcgatgaaggtgcgctgctgcgcatcgacatgtccgagtacggggaacgccataccgtggcacgcctggtgggcgcgcctccgggttatgtgggctatgacgagggcggccagctcaccgagaaggtgcgtcgcaagccctacagcgtgttgctgctggacgagatcgaaaaagcgcaccccgacgtctacaacatcctgctacaggtgttcgacgacggtcgcctcaccgacggcaagggccgggtggtggatttcaccaacaccatcatcatcgccacctcgaatctgggctcggacatcatccagcgtcggctgaaggcccgtggcgccgccggcgaggaatacgagaggaccaagtccgaggtgatggacgtgctgcgcggacacttccgccccgagttcctcaaccgcatcgacgagatcatcgtcttccatgcgctgggcaaggaggagatccgccatatcgtcggcctgcagctcgatcgtgtggcccgcaacgccgccagccagggcgtgacgctgaccttcgatcagaccttgatcgatcacttcgcggaggaaggctacaagcccgagttcggcgcgcgtgagctcaagcggctgatccgcagcgaactggagaccgcattggcgcgcgagatgctgggtggcggtatcggcaagggcgatcacgccagcgcccgctgggacgacaaggccgaacgcgtcgtcttcgagcgcaaggagccacccgcgcagccggccgagcctgataagtccgatgccgcgaacgtggccgaggcaccgccgaacggcgagagcaagcctaagcgcaagaagaagccggcgggcggcgaatcttga

SEQ ID NO: 495226 - DNA, 1431 bp, Stenotrophomonas maltophilia
gtgtccgaccccaacgggctgacatgggcagccaccctcgtgtcgctggcggtcgctgtccccacggcggggcacgcggtcatctacaagcgtgaccctcgatcggccacgctgtggatactgctgatcgccttgttgccgctgggcggttcgctgctgtatgggctgttcggcatcaaccgttaccagcggcgggcacggcggctgtttccggggacggatcttgctgttcgacaggatctctcgcccacggtgcccgagcccgtatcgccgccgcttgccggcctggcgcacctggtaggacgcgccaccggccagtcgctgaccggcggcaaccgcatcgagccgcttgtcgatggcgagcgggcctacccggccatgctcgccgccatcgaatcggcgcggaacagcgtcgccttggcctcgtacatcttcgacagccaaggcatcggggcgcagttcgtcgatgcgctgcgccgggctcatgagcgcggcgtgcaagtgcgggtgctgatcgacgacgtgtatgcccgctggacgccccgcagcgcctaccgcgccttgcaacgcgccggcgttccggcggcgacgttcaacccgacgttgattcccgcgcgcctgcatgccgcgcatctgcgcaatcaccgcaagctgctggtgatcgatggcgaggcaggtttcaccggtggcatgaatatctgcagcccgtattggcggcccgatgcgccgggccaggcctgtcacgatttgcactttcgtctgcgcgggccggtggttgcgcatctgatgcagtgcttcaccgatgattggtgcgatgccacgggcgagcagctcggcgagggtttctggcgcgaatcgcccgcaatggctgatgagcaagggacctcttgggcgcgcggcatcgaggccggtcccgacgaggccctggacaggatgcgctggaccttcatgggcgctttgagcgcggcgaagcattcggtgcgcatctggacaccttatttcgtccccgatcagccgatgatcgcggcgcttagcacggctgcgttgcgcggggtgcgtatcgacgtgctgacgcccgcaaacggtgaccatcccacggtgcaatgggccgcgcgcgcccactactggcaggtgctggagcacggtgtgcgcatcttcgaacgtcctggcccgttcgaccacagcaagctgatgctgatagacggccagtggtgctgcctgggttcggccaactgggatgcgcgcagcctgcgcctcaacttcgagttcaatgtggaggtgtacgacaccgcgctgtctacgcggctggaatccctttttgatgccgcccgtgatgcatcgaacgagatatcggccatggcgttgcgcgcccgcccgctggccatccgcttgcgcgacggggtggcccgtctgttcacccccattctctag

SEQ ID NO: 495227 - DNA, 1818 bp, Stenotrophomonas maltophilia
atggaaaagaaagatcaatggaacatcggctactggatcgtcgccggcctgttgctgctgacgctgcagaactactggcaggcggcgaagacggttgaacccgttccctatagtgagttcgagaaagcgctggccgaggggcgcgtcgccgaagtactggtgtcggaccgcacggtgaccgggcgcctgaaatcaccggacagccggggcaagaccaccatcgtggccacccgtgtcgaacccgacctggccgagcggctgtccaaatacgacgtgccttacgcgcgggtggtggaaagcacctggctgcgtgatgtgctctcctggattctgccggcggtggccttcttcggcgtctggttcttcctgttccgccgctttgccgagaagcagggcatgggcggtttcctgagcatcggcaagagccgcgccaaggtattcatggagaagaacactggcgtgacctttgccgatgtcgctggcgtcgatgaagccaaggcggagttggttgagatcgtcgatttcctcaagaatccgcaggagtatggacggctcggggcgcgcattcccaagggcgtgttgctggtgggcccaccgggcaccggcaagacattgctggccaaggctgttgccggcgaggcggcggtgcccttcttctccatctccggatcagagtttgtcgagatgttcgtcggcgtgggtgcggcgcgcgtgcgcgacctgttcgagcaggcgcgcgggcaggcgcccggcatcatcttcatcgacgaactcgacgcactgggccgcgcgcgcggtgtcggcggccccatcggcggccacgacgagcgcgagcagaccttgaaccagttgcttaccgagatggatggcttcgacagttcggtggggctcatcatcctggctgccaccaaccggcccgaaatcctcgaccaggcgctgctgcgcgccggtcgcttcgaccgtcaggtgctggtggaccggcccgacaagaatggtcgcctggatatcctgaaggtccatgtcaagaagatcaccctggcccacggtgtagatctggaacaggtggcggcgctgaccaccggcttttccggcgctgatctggccaatctcgtgaacgaagcagcgctgaacgcgacgcggcgcaaggcgcaggctgtggaactgcaaaacttcaccgccgccatcgagcgcatcgtggcgggcctggagaagaagaaccgcgtgctcaatcccaaggagcgggaaaccgtggcctatcacgagatgggccatgcgccggtggcgctggcgctgcccggcaccgaccccgtgcacaagatctcgatcatcccgcgcggcatcggcgcgctgggctacaccctgcaacgccccaccgaagaccgcttcctgatgacgcgcgccgatctggagtacaagatcgccgtgctgttgggcgggcgcgccgcagagaagttggtgtttggcgaactgtcgaccggtgccgcagacgatctcgcgcgggccaccgacatcgcccgcgacatgattacacgcttcggcatggatgagggcttggggtacgttgcttttgaggcacagaggccgcgttttcttgatgcgcctgaactggttcagggtggctgccgggtagccgaatcgactcagacacgcatcgaccaagccatccgtgacatcgtgatgggtgtgtttgatcgtgcataccgaattctcgaaatcaaccgagaagtgctggagcgctgcgcgcgcgagctgctggcgcgggaaacgctcgacgaaagcgatatccgtcaattgactcaaggacttgctcggaactga

SEQ ID NO: 495228 - DNA, 459 bp, Stenotrophomonas maltophilia
atgtctgcattgactccgtgggaccccttccgggagctggatgaattgcaaaaccgcctggcgacgatgttgggacggacaccccagcgacagggcgcccgtaccggcaacgaagccatgaccacggcggactgggcaccaatggtggacgtcagcgaggatgagaacgcattcatcctcaagctggatctgccggaggtccccaaggatgccgtgcgcgtcagcgcggaaaacggcgtgctcaccatcagcggcgagcgcaaactggaaaaagaggagcagggcaagaagttccaccgcatcgaacgtgcgtatggccgctttgtgcgcagctttgtcttgcctgacaacgttgatccgaccaaggtgacggcttcgatgaaagacggcgtgctggaagtgcggcttgtcaaggccgagcaagccaaaccgaaacagattgaaatctcagtcaactaa

SEQ ID NO: 495229 - DNA, 915 bp, Stenotrophomonas maltophilia
atgaatatcaaacagccacaatacatcttctccgcacttgccctggcggtcgtcgtcggactgagcggaccggctctggcccaatcggcggcaggttctagcccaggtgctgcagcaccctctgccgcatccaaggcggcacagccacaggtagatgacaaggtcgcccgggaagccgcgggaaagcgcgccaaactcgcccaagatgcaatcactgcgctggccaagacccatgaggcattgatcctccttgatgcaaggaagaccaaggaggcgctcgctgcgctggaactggccagcggaaagctggaactggtattggcgcgtgacccaaaacttgctttggcgcccgtcgatgtacgcgtcatcacccatgacatccacgccgacgtggaatcggtcaagaaagcggtcaagttgtctcgggagttgttggatgatggcgaggtgcaaaaggcacggcccatcgtcgccaatcttgccagcgaaatcgtgatcgaaaccgacaacctgccgatggcaacgtacccggcagcgatcaagtcggccgcacggctcatcgacagcggcaagattgacgatgccaaggcggtgctcgcccgagcgctgaacacgatggtgatgacctcggtcgcctttcctctgcccgtgctacgggccgaagccgcgatggcaaaagcggaaaagctggccgagaccggcaagcgcaatgccaaacagagcgaggagctcagcgccctgctggcctacgtgcgcacggagatcgagctggcgcagatcctgggttatggcaagaaggcggacttcaagcccatcttcgatcaggtgaaggctatcgagcagaaatccgccggaggaaaaagcggcaaggggtggttcgacgagttgaagatgcgcatccaaaggctgtcttga

SEQ ID NO: 495230 - DNA, 888 bp, Stenotrophomonas maltophilia
atgaatgagcaaacatcgaatcccaatgcgacgaacaaagaaataaacgaacaggccgcggtaagcagccttcctgtcagtccagaggccaagcctgaagtcgtcacggaggtacagcctgaggttcagaaggaaacggactcgcaggcggcagacaaacgtaaacaagtcctcgatgaggccgtctcggccttggcgctgaccaaatcagcgctggccgcacttgacggcaaggacgctgcacgcgcattggcaacgctggccgaagtgacgggaaagctggagctgatcgttgcgcgcgaacccacgctcgccctggcccccgttgatgtgcgcaccatcgtgcacgacctgttcgccaacacggacaccattgaggcgatgaccgacgaggcgctggatgccctcaaacatggcgaggtgcaacaggcacgtcacgtgctggctttgctggccagtgagatcgtgatcgcggtcaccaacatccctctggcgtcctatcccgcagccgtgaagtcagtcgtgccgctgatcgatcagggcaagatcgaagaagccaaagccgcgctgcaggcagcgctcagcacgctggtcgagacgcgcagcgtgcatccgctgcccgccctgcgcgccaggctgctcctgaagcgcgccgagcccctggtagaagatggtcagcgcagcgaagcatccaatgagcgcctggagacattgttgaacgaagcccggcagcagttggaaatggcagaactgctgggctatggaaaaaggaaggactttgagtccatgtacgatgaactcaagaaaatcaagcagaagacgggagggggaggcggcggaaaaggctggctcgatgaagtcaaggcaaaactgtccaggttgttctga

SEQ ID NO: 495231 - DNA, 612 bp, Stenotrophomonas maltophilia
atgaacacagacaccatcgccaattccaatgcggatgaccccaccaaagcactgtgttcgctgagccaaaattggtggctttttgcgctgcgcggtgtcttggcattgattttcgcagcccttgcgttctggatgccacaatcggctctgttggccacgaccttagtgttcggcgcattctccttggtcaatggcgctttcaacttggttgcagcggtgcgccatatccagaaaaaagagcgctggggctggctgctgttcagcggcattgtcggcatgcttaccggcgttgtcgtcctggttgctcctttggtcgccacgatggtcatggcttcttttttatgggctagcgtgggggtctgggcgattttcaccggtgtgctggagatatccgccgcggttcggctgcgtcaagaaatcaagggtgaaatctggcttgccttcagtggactgctctcgatagtccttggcgctatcgtcttgtggatattcttctcccgtccggccgagtcattcctggccgcaggctggctgctgggcttctatgcggcagtctatggtgtcacgcttttgttcttgagttggcgtcttcgcagaacgcgccagggataa

SEQ ID NO: 495232 - DNA, 1146 bp, Stenotrophomonas maltophilia
atgcagacgcaatatagctatcgagctgtcgacaaagagtttcatgaaccatggcagagagctttgggaaatgcggtcgagcacgccctcaagccattgctcgacaaacacactaaagattcagtgcgacttcgaatcgtccttgatcgcgacaagaccaagcggcaatttctggccagtggctatatgcacctgcccggcagaaagattgtcagcgttactgcatcacatgacgagctgacgcccctcgcgcagatgctcgcacagtcgttgtgccgtcaggccaagaagcattttgaccggctgcatgctcaggaccagatcaagcgcaaagcacgacgcgagcgcttgcgcgagctcaaggtgcgaattgccgcaaaacccgcgtcagccgcccatgaggccaaagtgatccgaatgcctctactgtcgaaacttgaggctgtcgcaaggcgtgagctggcttatctgcgtgccgtcggcgatttaccgcgcgattatccgacgctgcgcgacgtggtggatgaagcgattgtccaagctgaggtggaatggcaatccgtgccggaagaaaaagcggcttacttcggtcttctgaagcatctgttcgccgtgctggatcacgaagtggcaaacagccggcaatttggcgaattcgtttctctggacgcgccggtcgaagcggatgcccaggacgtcgccgaggccatggtggaagaggaagtcttcgaattttatcagcccgatgacacactcaggctggccgatatcatcgctgacagtcagcatcccgatgccgcaacgatcgcggaacagcaggagctagttgatcggtcgagcgagttcgcttttgcattcgacctgctgaaggacatgccgcgtttgtggcggcgcatttttctgcttatccgtgtggacgggctggatgccagcagcgtctctgaaatcctgctgattcctagtaaggaagatactgtccaaaggtggctcatgcaggccgaagcgttcatcgctgctcatttggaagaggccggagtaagcaaagacgggaacgattggctccaaggcgttgattggtcggcattgtctgtgacccgaagcgcggcagcctcactgtggtccaaggaggcgaaccatgaagaatga

SEQ ID NO: 495233 - DNA, 441 bp, Stenotrophomonas maltophilia
atgaagaatgatcttcacctcgtctgtccgcattgccagtccatcaaccgcgtaccgactgcgaagctatcggaacatcccaactgcggccgctgccagcagcccttgttcacgggcgaacccatcgagttgaccacggcgacgttctcgcgccacgtggagcgcagcgacctgccactgttggtagatttctgggcaccttggtgcgggccgtgcaagatgatggccccgcagttccagcaagcggcgcgtcagctcgaacccagggtcaggctggccaaggtcaataccgaggcagaaccccacctggccgcgcagttcggcatccgcagcattccgacgctcgccctgttccaaggtgggcgggagatcgggcgtcaggcgggcgccatgggcgcgcaggacatcgtgcgctgggcatctgcacaggtggggcgctga

SEQ ID NO: 495234 - DNA, 1716 bp, Stenotrophomonas maltophilia
atgcaggacttgctcggcgccaccctgatcctgctggcggcatgcagtctcgcggcggtggcgacggcggcgttcagagtacccgccttgctgggttacctcgccgtcggcgccttgctgggcccgtcggtcagcggtgtagtcgcgccgggagaagcgcttgattttctgtccgagctgggcgtggccctgctgctgttcatggttgggctggagttctccctcgggcacttctggctttcccgtaaaaccgtattggcggccggcagcttgcagatgatcgctgtcgccacgccactgaccttgatgttgatgtggctgggacagccagttcagtgcgctgcgttgctcagcactgcggcggccatgtcgtccacggcgctggtcagccgacagctggccgaccaaggcgagctcaccacccgccacggccgcagcgccatcgccgtgctggtctttcaggacctggccagcgtgcccctgctggccctgctggcgatctgggcgcgcggcgagtcgccgaagatcgagagcgtgctgctcgaagtgttgggcgtgctgatgttgttcgcggcagcggccctcgcctcccgtcgtctgttgcatggcctgctgggctgggtggcgcggcagggccacgaagaatccttcgtgctggtttccttgtgcgtggtggtggctgccgccgctgctgcacacgcggtcggcgtatccgccgccctgggtgcgtttttggccggcatggtgctgggcgagagtgacttccgtcaccacatggaaagccacctcaaaccgtttcgcgatgtgttgtcgggggtgttcttcgtgaccatcggcctgcagttggacggagcgcagattctttcggcaccactggcggtgttcgcgtggctggcagtgctggtaccggtcaagatcgggctcaacaccctggccttgcgggcgacgcgcctgtccgccttcgatgcctggcgcacgggcatagcgttggggcatggcggcgagttcgccctgctgttgttgggcatggtcttgcagcagcatctgattcccgcgaccgtcgtacaacccatgctggtcgcgctggtgctcagcatggccttggcaccgctgctgatccgccatcacgatgtacttgcccggttcttgagccgcaccggcggcgtcattcagccaccccaggctgaagaagttgagatcaccgcgcagacagcgcgatttcgagaccacgtcatcatctgcggcgcaggcgagcttggcctgacagtcagcgaaattcttcgacacgcgggcgtggcgcatctgctgctggaagcagacgagcagaaggtcgaggccgcacgtgccgccggcgcgccggtgttccatggcgatgccagtcgccccgataccttgctggctgccgggttggcgcaagcgcgtctggtggtgctcacgttcgaccatgcccagcaagtgctgcgcatcgcccaggcgattgccgagcgccgtccggcgctgaccttgtgggtgtcatgcagaagtacgaccgcggccgatgcacttcgcgccatgcccaacgtgcatgtacaccagcaatcctttgccgcggcccttgggctggcggaacaggtgatgtcgtcgcttggcatgtcggccgagctcgtcgaacgaaacatcagtgcgatgcgccgccgtctcgacagcggcaatgtcgcagggagtccatctgcatga

SEQ ID NO: 495235 - DNA, 474 bp, Stenotrophomonas maltophilia
atgaagtcaacaggccgcaatccatttcaggtcttccgtgaccaatgggccatcatgagtttatacgatcgcttcgagcaggtcgtcgccctcgttctgtcggcggtaattgccgtcatcatcgtggtgtcgctgttccagctcatcgccatcgtcttcacgctgctggtcctcgatgccttcaatcccctggatcacaaggtattccagagtgtgttcggcatgatcatgacgctcttgatcgcgatggagttcaagcattccattgtgcgcgtggcgctgcgtcgggacagcatcatccaggtcaagaccgtgatcctcatcggtttgatcgcgctggcgcgcaagttcgtgatccttgaccccgaggcgagccccgcaaagatagccgcgctggcaggcgccacgctggctctgggtgcgacctactggctgctgcgcgagcgcggcgaccgcgccgccgagacctcttga

SEQ ID NO: 495236 - DNA, 267 bp, Stenotrophomonas maltophilia
atgcgcaagagtcgcttcaccaccgaacagatcatcggattcatcaagcaggccgaggccggcatggcagtcgcggaactgggccgccagcacggcttcagccccgccagcttctacgcctggcgggccaagtacggcggcatggaggccgaggacgccaagcgcctgaaggagctggaagccgagaacaaccggctcaagcggttgctggccgacgcccatttggacatcgaggtgctgaagatcggcttcggggtaaaacgctag

SEQ ID NO: 495237 - DNA, 648 bp, Stenotrophomonas maltophilia
atgctcgaccagacggtgttgagcgagcgccgggcttgccgccttgcggggctgtcccgcgatgccttccgccacccgcccgtgccgacgcctgccacccaggcactgtcggcacggatcatcgaactggcccagatccgccgcaggttcggctatcgccgcctgcacgacctgctgcgcccggagttcccagacgtgaaccacaagaaggtctatcggctctacagcgaggccagcctcgccgtgcgccgacgcaagaaggccaagcgccccccgcttgagcgacagcctctggcgatcgctacggcgcccaaccaggtctggagcatggacttcgtcagcgacgccctggccaacgcccggcggctcaagtgcctgaccgtggccgacgacttcacccacgagtgcgtggacatcacggttgaccatggcatgggtggcgcctacgtcgtccgggtcctcgaccaggccgcctgcttccggggctacccgcgggccgtacgcacggacaacgtgctaactctggagtcaacaacaaattgggagcgaacggatccgcggacgtcgctgacgtccggtcaggcaagtcgcaccgctatttgcaccaagtcccgtgggcttccacgtcttcagggtctcctggtctga

SEQ ID NO: 495238 - DNA, 1278 bp, Stenotrophomonas maltophilia
atgactgcccagcccaatgctacgcctgcggccacgtgggtcgcgattgatattgccaagcgtcaccatgccgtcctgattgaaacgcctgacggcaagcagcagcagtttcggatggccagctcgatggaagagcacgatcgtctggtcgctctgctgcgtggattaccccagcctgccaggatcgccatggaacccactggagactgccatcgaacgctggctttccggcttctcacggaaggcttcgacgtttgccttgtctcatcagtcgctggcgcccgctaccgcgaagcaatgttcaactcatgggacaagaacgacccgaaagatgcccgcgtgattctcgcactgctcaagcagggcatgacgctgcgctacattgatcccttgctggccgggcaccacggattgcaggagctgtccaagactcactatcagatcagcctggcaaggacgcgactgcagcacagcttgatgacgcactatctgccgctgtactttcccgaaatcgagcgctacttcgacagcgcacatgcggactggttcgcccgcttcatgctccgctttcctactgcggcatcaatccaacagcgtgactacgagacgttccgcaaggaggcgtgggacctggtggggcgcaaggtcaacaaggcggcatggctacgcgaactatatgaaatcgccctgcgaagcattggcttgcctgtcgccgatgactcgctcgaggttcagagcttccgcctgcaattgcagcgcttccaggagctggtccagcagcgcgaccggctcgcggaacaggcgcaccagaccctttcggggcgcccagactatgagtcgctgcgttcgattccgggtattggacctgtgcttgcactgaccattctggccgaggctggcgacctgcgtcgcttcgcccaccatcgccagttcctgaagtactgcggcctcgatctggccaagtgccaatcaggccaatacaagggccaggagcggctgtccaagcgcggcaatgcgcgccttcgcttcgccttctggtttgccgccacagtggccatccggatgcgggagaacagcttccgggagaagtacgagcgctacatccggaacgatccatccaacgccgaccgcaaaagaaaagcactgactgccgtggccgcgaagatggcgcgtgtcgcctatggcctggtcaagcaacaaacccaataccgctgctacttcgaaaatgctttaccccgtggatcgacccctctccgtagggccgtcgggacctcttag

SEQ ID NO: 495239 - DNA, 330 bp, Stenotrophomonas maltophilia
atgtactacggccccgagttcaccagccgggccttcatcgcatggacgcaacgccacggcatcaagcacctgttgatcgagccgggcaggcccatgcagaacggctacatcgagagcttcaacggcaagttcagggacgagtgcctcaacgaacactggttcacctcgctcgcccaagcccgccaggtcatcgccgactggcgacgcgactacaaccaggtgcgaccacacagcagctgcggtcgaatcccgcctgcccagttcgctgccaaccaccgagcacaacaagccgacaacgcagtaaccttcaaccccgggctttatcagtaa

SEQ ID NO: 495240 - DNA, 714 bp, Stenotrophomonas maltophilia
atgcacgaggacagccgtggcactctcggcgccggtcgcatgcacgaagacctggtcgatcagggcgagtcggccagcttgaaccgcgtggcgcgactgatggcggccgagggtttgcagggctggccgcgcccgaagcggcgcggtcagcgcggacggccggcgctcacgcctccgggcgtgcgcaacctgctggagcgggacttcaccgcactggagccggagaccaaatgggtcaccgacatcactgagatcaaaacaggacaaggcaagctgtatctatgcatcgtgctggatttgttcgaccagcgcgtggtgggttggtcgatgcaccacaggcaggaccggcacatggtgatccgggcggtgcagatggcggtatggcagcggcaaggcgcggagccggtgatcctgcattccgatcgcggcagtcaattccgaagcggcgactaccagcggtatctgtcgagaaacggcctggtctgttcgatgagcgcggtgggacactgcggcgacaacgcggcctgcgaagggtttttcggcgtgctcaagcgcgagcggatctaccgcacgaagtacctgacactcgatgcagcgaagactgatgtgttcgaatacgtcgagcggttccataacccgaggatgcggcgaagagtcgccaggcgcgatcgggagttccaagctctttcacaagcgtccgtgatttcggggtag

SEQ ID NO: 495241 - DNA, 330 bp, Stenotrophomonas maltophilia
atgggcctctatctggtcgcacctgagcacggcatagccctcgaggtcccgatctcggagtcggacgagcgcgccctcgttcgtcaatgggcccggttgcgagaggcgaccgcgcgtgagcgattcaacattaggcttggcaagcacttgaccagcgcactgtctgaagccttggactgggacataaaagcaccaactgatgcccagatggctctggcatcggtgcttgcccaaaaactagctacggatgtgccgcccggggcattgtcctcccggttggagatgtcactcttcatcgacaaggcgtctgctcgcctccgcgacggctga

SEQ ID NO: 495242 - DNA, 327 bp, Stenotrophomonas maltophilia
gtgtccgacacctcgcgtccgatctttgcccggagactggccgaagcccgcaagcgcgcgggtttttcccaggctcagcttggcgttttggccggtatggagcctgaagtggcgagccctcgcgtcaaccagtacgaacgcggcgtgcatgagcctcgcgccgagatggcgaagaagcttgcggaagccttgaatgtccctgctgcgttcttgtacaccgaggacgaaatgttggccaagctgctcctacgctggaatgatctcagcaagacgcagaagcgcgatctggtgaagcaggtcgagcagtcaactgccacaagcaagtga

SEQ ID NO: 495243 - DNA, 681 bp, Stenotrophomonas maltophilia
gtggtcaagaaagggggcggccgtggcctgccctctcggctgtctttcgatttccgcccgacgcccgaagcggagcccgaggaggacgtcgcgccaccagaggccgatccgaccaagatccgctaccagatggatccagccaagccagcgctatggctccggctgttggtgggcagccggccattcccggtgcagtcctggcgcggctacgtgcttatcggaaccgcggccttgaacatggtgctcatcggactcgtctggttctggctgtacacctcatggagccgtggccacgcggtgaccaccgcgacactggcccagctcggcctggtgatgctggtgacagccgggctctggtggttgttgcggccggtgatccttctgcccacacagcgggtaaccatagcggagccctcgttcctggcgctgagcgagctctacggtcagctccgcaccatgccggcgccaggtcgaaagttgaagtcccgagagttctccgtcgtgcgccactggggcacgtgcccgatctgctcggccgaggtggatctggattacggacgggccgcgtttcctgaccgattggttggtcgctgccatgatgcgccgctggagcacgtgttctcgtttgacccggtgcgccttgtcgggcggtcattgcttaacgcgcaagatgcaggctga

SEQ ID NO: 495244 - DNA, 1476 bp, Stenotrophomonas maltophilia
atggacaccatcccagagccgttctcacttcgcaatccgtcgggcaacccgctggcgcggcgtggcgggttccgcgtcccgtttggcctgaaggatggccgtgtctgggcccccagcgaggtgtccaaaggcaatgcgtgcggctgcatctgcccggggtgccatgccccgctgtcggccaaggccaaggagagtcgccgcaagcgcccccacttcgcccacctgactgacaccggctgccagacgggtcgtgaaaccggaattcacgaacgggccaagcagctgatcgcagaccaccagcggctggtgatcccggcctggaccggcgacccgatcgacatgcccaacccgccgcatgcccgtgacgacgatggccggctccactgggggcggaaggtcgaccagccgagccgcagcatgtcgttgcgcgacatcgagatcgagcgatcgctgggcagctacaagcccgatgtcgttgcccgggatgaggtgggcgagttgctgatcgagatccgcgtgacccatgccgttggcgacatcaaggcggcgcgcgtccaggcgcagggccggaggatggtcgagatcgacctgtcccagctgcaccgcgacactccccacgacctggccgccttcgagcacgccgtgctcgatgacgctgccaatcgcagttggatctcctgtcccgaggcggtagcggagtggggggcttccaagcaggaactggacgagcaggttgcggcgaggaaccagcagatcgcacagctgcgggagcagatggccaaggcggcccaggcccgcaaggaacgcgaggcccaggagaccagggacaaggagggccggaaggcctacatgcaccgccaggagcgtgcgagacacgctgaggacctgggccatctcatggaactgacctcgcctgagcggatcgagcggatcctgcgcgagtatcgggtcagcgcggaagaccgcgtcagcgagctcctggacgccgtgccagcggcgattcggtccgcctgccttcgagcccatgaagatgcctggatcttcggagtggacccggttctttggcagctcctggcccatgaccacttcgtggcaaagcggtccccgggtgatcgcttcaaccagagggacgtcgccgcgtgggtccggcgtagcttctacccagagagggcgctgtacaggctcttcgtcacccagtacgccgcccgcgccgaggcccagcgcgcagggttcgccaagagaaggctggcttactgggttttcaccgacgaagagaacgagcggattccgaacttctacacgcccgtcaacgacttcgtcgacaggctggagtccgcccgggtcatccgacaactgccggcgcccaggggcgagtgcgaagtccttccaccgcccgccggtggctggcacccggtcgcctacgtggatccgggcaacgattccggtgaccgatcatcctcgcttgtcgccctttga

SEQ ID NO: 495245 - DNA, 4926 bp, Stenotrophomonas maltophilia
gtgaccgtacttgagactctgctcgacaccctgcgccagtcctcgatgaccgagcgcgagaagggcacctacttcgaagaattgatcctggcctacctgcgcaacgaggccacctaccgcgacctgtatgccaaggtctggacctggtccgactgggcgcccgcccacggcttcagcgcgaaggatgacggcattgacctggtcgccgaggaagccggaaccggcgcgatccacgccatccagtgcaagttttacgacccggactaccggctgcagaagaaggacatcgacagcttcttcaccgcctcgggccgcaagccattcgcgcaccgggtcatcgtttccagcaccgaccactggtccgacaatgccgaaaacgcgctgatcgaccagcagccgccggtcagcaagatcaccctgcacgatctcgaagccagccagatcgactggtcgcgcttccagcccaacgccccggtcgcgctgaaggcgaagaaatccctgcgcccgcaccagcaatccgcgctcaaggcggtcaccgccgggctgcaggacgcagaccgcggcaagctgatcatggcctgcggcaccggcaagaccttcaccagtctcaagatcgcggaaagcatggctggcaagggcggccgcgtgctgttcctggtgcccagcctgtcgctgctgcagcagacgctgaccgagtggacccaggaaagcgcgattcccctgcacagtttcgcggtgtgttccgacagcgacgtcggcaagaagaagggccgcaaggaggacgacgccgtccagaccctcgcccacgaactgcgctacccggccaccaccgacgcccgcgcactggccaaaggtgtcgccgcgcgcagcgacaacgcgcacatgaccgtggtgtttagcacctaccactccatcgaggtcatccacgacgcccagcagcaggggctggccgattttgacctgatcgtctgcgacgaggcccaccgcaccaccggcgccaccttcgaaggcgacgacgaatccgccttcgtgcgcgtgcacgacgccgcctacatccgcgccggcaagcgcctgtacatgaccgccaccccgcgaatctacggcaacgaggccaaggccgtggccgagcgcgacaacgtggcgctgtactcgatggacaacgaggcctggtacggcaaacagctgttcgtcatcaccttctcggaagccgtcaagcgcggcctgctggtcgactacaaggtcatcgtgctggcagtcgaggaaagccacatcaatcgccgcctccagactctgctgaaggacgagaacaacagcctgcgcgtggacgatgccgccaagatcgtcggctgctggaaggcgctggccaagctcggcatccacgagggtgccggcgaaagcgcagaaccgatgaagcgcgcggtcgcgttctgccaggtcatcgagcccagccggggtggcaagacccacaaggtcagctcgaaggaaatcgccgacatgttcaaggcggtcgtggacgcctaccaggacgccgaggacatcgaagacgccgcgcgcatgacctgcgaggccaagcacgtcgacggcagcatgaacgccggcgagaaggaagcgaagcttgactggctcaaggcacccacgccaccggacacctgtcgcgtgctgagcaacgtgcgctgcctttccgaaggcgtggacgtgccggcgctggacgcggtgctgttcctcactccgcgcaactcgcaggtggacgtggtgcagtcggtcggccgggtgatgcgcaatgccccgggcaagcagcgcggctacgtggtgctgccggtggtgatccctgccggcatcgagccgcacgaagcgctgaacgataaccgcacctatgcagtggtctggcaggtgctgcaggcgttgcgcagccatgacgaccgcttcgacgcgatggtcaacaagctcgacctcgtcggcccggaccgcagccggatggaagtcgtcgccgtcgccgacacggtgcagcgcaagaccgcgcggctgctggacggcaatgcccgcaaggcggccaaagccaagagcaggcacagtatcggtgaagcccagcccggctacgaagccgaagtgcaaagcgaattcgagttcgagatcggcgaagtcgagcgcgcgctctacgccaaagtggtcgagaagtgcggcaaccgccaccattgggaggactgggccaacgacatcgccaaaatcgcgcagacccacatcgaccgtatcaaggcgctgctggaagaccccagtcaggccaaggcccgcgaagccttcagcgccttcgccaacgaactgcgcgacgacctcaacgacaaggtctcggacgccgagatcatcgagatgctggcccagcacctgatcaccaagccggtgttcgacgcgctgttcgccgactacagcttcgccagccacaacccgatgtccaaggcgatgcaggccgtgctcgacgtactcgacgaactgcacctggagaaggaagccgacaccctgcaggcgttctacgacagcgtgaagctgcgcgccgaaggcatcaacagcgccgccggcaagcagaagatcgtggtcgagctgtacgacaagtttttccgcaacgccttcccgaagatgaccgagcgcctgggtatcgtctacaccccggtggaagtggtggacttcatcctgcacagcgtgaatcacttgctggagcaggagttcgggcagaccctcggcagcaatggcgtgcacatcctcgaccccttcaccggcaccggcaccttcatcacccgtctgctgcagtccggcctgatcaagccggaagagctggatcacaagtaccggcacgagatccacgccaacgaacttgtgctgctggcctactacatcgccgcgatcaatatcgaggccacgtatcacggcatcgccggcggcgactacgtgcccttcgagggtatctgcctgaccgacaccttccagatgtacgagaaggaggatctggtcgatgcgctgctggtggacaacagccagcggcgcaggcggcagaagacgctcgacattcgcgtgattgtaggcaatccgccgtattcgatcggacaaggcagccaaaacgacaacaatcagaacatcggctatccggcgttggatgcacgcatcgcggaaacctatgccgcacgctcaggcgcggcgttgtccaaggggctttacgacagctacgtccgtgccatccgctgggccagcgaccgcatcggcaatgccggcatcatcggtttcgtcaccaatggtggctatctagagaaggccgccatggacggggtgcggcgctgcttagtggccgagttctccagcctgcatgtattcaatctccgcggcgatatccgcaagaacatgctgagcaaaggacaagcgaaggaaggtcagaacattttcggaagcggcagcatggcgggcattgccatctcacttctgatcagaaatcctgaagccaatcagcgtggtcacgtctactaccacgatattggtgacgatctaagccgcgatgagaagctgggcaggatagaagcctatgccagcgtcgacggtattcccgaacaggaatggcagcacatcatcccggatgcgcatggcgactggctgaagcagcgcgatgacagcttcgggcgtttcatctcgctgggcgacaagaagggcgacgcgtccaagatgttcgacaacttctcgctaggcgtggccaccaaccgagatgcctgggcctacagccatagcaaggccaagcttgcggaaaacatgcgcaacatgatcggcttctacaacgccgaagtggcgcgcttcgatgccgcgcatattggactggacaccaaggcgcggcaggagcgcgtggacggattcattgacagcgacccactccgcatcagttggactcgcgcgctcaagcagaacttgaccaagaatcgcacctacacattcgatgccgagtgcatcgttcccagcctgtatcgcccgttcaccaaacaatggctgtacttcaatcggactttcaacgagatggtgctgcagatgccgcgcatcttcccagatgctgctgcaaaaaacgtagtaattcagctaagcggagctggagcacgatctggattttccgcgattatttctggccatataccgtcccttgacaccattgagaagggccagtgttttccgctctatctctacgatgaagccgcccaacaatccgatgacggcctgttcgcgagcattcccaatgatggcccacgccgacgcgaggccatcaccgatgccggcctcgcgcatttccagtccgcctatccgggcgagacgatcagcaaggaagacctgttctattacatctacggcctgctgcattcccccgactaccgcgaacgctatgccgacaacctgagcaaggagctgccgcgcatcccgcgtgtgcgcacggcacaggatttctggcatttcagccgcgccggccgcgacctcgccgcgctgcacctgaactacgaaacggtggacaagtacccgctcaccatcgagaccaagggcaagctgttggatgccgactaccgcgtcgagaagatgaagttcgccaagaagaaagacccggacaccggcaagtccgtcaacgaccgcggcaccgtgatctacaacggcaaaatcacactgcgcgacattcccgaaaccgcatggggctacatcgtcaacggcaaggccgcgctggattgggtgatggaacgccaggccctgcgcgtggacaaggccagcggcatcgtcaacgacgccaacgactgggccatcgaaaccatgggcaacccgaagtacccgctggaactgttccagcgcgtggtcaccgtcagcctggaaacgcagaagatcgtcgctgcgctgccaccgctggatatccgtgaagacggctga

SEQ ID NO: 495246 - DNA, 1002 bp, Stenotrophomonas maltophilia
atgaatgaagtggtgtggggcatccacgcaggccgcaccggcgatgccgatgccttgttcctgaagcaaggctgcattgccatcggctgggacgccatgggcgacctgtccgtactggcagccgaccgcgacgccttccggcagtgctatgtgcaggcctacccggatgcgaagaagggcggcattgccacggtgtccggcattccctaccggttcctgcacgagatgaaggccggtgacctggtggtgtacccctccaagcaggacaagcaggtacacattggccgcgtcactggcccgtaccagcatgtggccgatgccacccacgggtacccgcaccgccgcagcgtgcaatggctgagccacgtgccgcgcctgcagttcacccagggcgcgctgtacgaaatcggctcggcgctcagcctgttccaggtcaagagctatgccgacgaattccgcgcggcggtgggcggcaagtccgcacctccgttgccggtggaccaggaccattcggtgagcctggtcaccgatgacatggaagacaccacccgcgacttcgtgctcaagcgcctggcgcaggaattgaagggcctgccgctggaggatttcgtggtgcacctgctgcagtgcatgggctaccacgcgcgcaagacccgtgtgaacgagcccagcgtggacgtgatcgcccacaaggaccacctgggcatcgagccgcccatcatcaaggtgcaggtcaagagcagccccaacaccgtgaccgacaaggacgtgtcggcgctgtacggcaagctgtcccacggcgaatacgggctgttcgtgaccctgggcagctacagcccgtcctgccgcaatttcgaacagggcaagggcaacctgcgcctgatcgacggagatgaactggtggacctgatcttcgcccactacgagcagttcgattcacgccacaagggcctgctgccgttgcgccgcatctacgtgccgcaggtgctggaggcggactaa

SEQ ID NO: 495247 - DNA, 480 bp, Stenotrophomonas maltophilia
atggataacgacagcttgcaacaagccacacgcgattgcgatccggaaatgcgccgagtgctggacgacctgctatcgcgcgacgaggacatcaccgcgcgggcggttgcacgcttgcatccgcaaatcaaagccgcatcatcgatcacccgcagcaaagaacgcagccgcatgcttgcgcagtatcaggagcggcaagccgaattccgtcgttggcgaggcaggcctggaaagctctctggtgatgccgcggccagcgccctggcagatcgcgatgtgcgcatcgccgagcttgaatcgcaggtcgctctgctcacggcatcccacgtcgcgatgatccgcgcagtaggcgaactgggcggcttcagcaagtgggcacagttctatgaatcgtacagcggctcaagggaccagctggcgcagctgggcgcgctgccagaagcaacggtggagtcacttccgcagcgcaggccaaagtaa

SEQ ID NO: 495248 - DNA, 2046 bp, Stenotrophomonas maltophilia
atggaacagctgtttgttcgccgcaactcgttcggtcacatcgccaacaatgtggcacgccccttgcgcgtgatcgctacatgcgcgggggacgctgagccgtggagtgtcaccgtcgacgagatggctctcgcggttcgcaccggcaacagcatccaggcgtcgggcaagcttggcgacttgatcgcgggtctgaccaaggtggtgtttgatgccaaccatttggccgatgtggggccgctctaccctgccctcgccgccgcacgtctccagcctagagccactcggcggtccaaatttctcaattctcaagcggagattcggcacaacctggaagatcgcaagcgcgctgagcgcctaccagaacgtcgcgcgttctgggagttggtccggatcgttatgaccgagcagcccctgaccttcatggacgaactgcgctttgcggccattcgcatcatgatcttgacgggcttccgaattggtgaggccacgctcctccccgctgagtggcggacggaccggcactattacgactcgaagcagcggcctgcaggggagctaggtggctactccaaatcgctcatgattcggcacttcgccgaaaagcagcaggcaaagaatgcagatagcaaggtgctagtcgccaagactcactacgttccccagatgttcgaggagatcgtgagcgagaccctgacccgtgctgaggcaatcacaaatccgctacgaagcacgctgaggaagcaaactgaaacagggcgcgttctgccagactttgcgctcggtgagctggtgccgaccacgcaaatctactctcgcctttccggaaacgccttctggctagacctggccgaggacaagaaacagtattggatgcagaagtgccgtcaaaactattccgctgattgcttcgacgagctccagaaagttcaagagagcttgaatgccagtcttcaaggtgaaatgagtgcgaccgctcgcatgtactttcgccggatggcgggattcgagggcaaagatggtggcgcattggtgctgagagacgtcgaaggcagggcggtctcacccaacggcaagcgcgacatgagcaaggtcttcgtaagaatcggagatcttgaaagttaccttcgtgtcgcggccagctcaaagttgccggacaccgagcttttcagtctgaccgatcgcagctttgcttcctgggaattccttttcctgcatccgaaacggtccctagccgaggagcgaaacaatggggtctgcgatgtcacccgatacatctccgttggtcggcccgatacaagcttggtcaatctttccctcggcgagcagaagtcccgcgacacgcttttcaaacggtatgggcaatctggcgacgacaaggacctggtactcacctcccataccctgcgtcacctacagaacaccgagcttttccgtctcggcgtagccgacaccgtcatctccaaacgcttcaatcgccgcagcgtggcccaaagctacgagtacgatcatcgcagcttggcggaagagttggatcaactcgaactgcctccagacgtggaaatggcactcggcgagaaagccagcactgtcgcgaagatgatccaatccggcaaagccagtggtccaatcgtggatgcgttcaagaagatccagagcgcggagggtgacaccgcagcgttcgagtttctgaaggtcgaagccgatggctttcacgcgactccatacggacattgcttgaacagcttcactgtcgatccgtgtccaaagcatctggagtgcttctccggctgccgtcatctgtcggcaaccaacttgccggagaaccgccgtcacctgcggacgctcgaactcaagttggccgcggctgtcgagatcgcagaagccaggccatcaaagagcatcggccgcacgaaccagattcaacatgccaaggtcagacttgacggcgtgcgcacgctcctggcgaccaaggaaggcgataagccattccctgatggtcccgacctctctcttcctcgccgcagcggagtcatggatggataa

SEQ ID NO: 495249 - DNA, 1512 bp, Stenotrophomonas maltophilia
atggctagaaatgaaaatattcaatggcagctggaagctggggcttgcgaaatagttgctcaactaccgtcgttgcctccggtgattcggtactacgacgatttcgacggaaagcaacgatcaattcgagatccagccaatgccagatgttttgcggttcatatcgatggccgggttgtgaaagttggctttgatcatctgtccgagcaactcgccttgttgataaaacacgtcttcttgtacctcctgggtgaaggcctggctccatcgtcggcaagcaagtacgcccgtggcagcaaggcaatcggcgaggcagaaatcgtcaggttgttgggggtagcaccaacaggaataggatcattctgggcgacattttttgcacgcgacctgccggcggaagcgtacgcgtgcgcgaaatctatcctgcgactgctatgcaaatatcgactcaaccaatgggctgactcctatcacggtgtgatatccgccctgccccttcccttcaacgacaagtacgccgtcgtccggtctggcgaagcgtttctctcggtggatgatgaagcggcggtagttcgttttttggacgaagcggcaatccaggccaaagcgtcgtcgctgaccctcgaagatgtgcaagacgcagcgatgctgctgtgtgcgtaccagttcgggatgcgaccggttcagatcgcaatgctcacgtttcgtgacgtcaaagttcgtcacgaatccgtcgacatgttcgcttccgtccacatcacattccgcatggcgaaacagcggagttctagtgccgccaagccgctgcttagacgagtaaaacgcgagtggacacctcttttcgtcgagatcgaacggcgctttcaggttgatggcgatgacgcgggcgctagggtgttcggcgccacatccgcaaatgaagcaagtcgtcgcatcagctccctactccgcgatctgctcgagcttggcgcgactgccgtcaatctacgacatacagccgctcaacgcctcgttgacgccggcgcaagccaagaggaactggccgagttccttgggcactcggatatgacgactgcgctcgtgtactacgaaacatcggccaaccaggctgagcgggtgaacaaagccctgggaatctccgagatctatcagcgcgtggctcgcattgcccacaatcgttttatcggtccagaagaactcgcgcaattgaaagagtcccagcagattggcggagcgccacatggtgttccgatcgcggggatcggtgggtgcacctccgggcaggctgcgtgtccctacaacccgatcttgtcctgctacggctgcaggaagttcatgccgattcacgacgttcagatgcactcgagagttctagccgactttcgggatgtggcgcggtttttccacgactcgtctcgtggcgacgcggtttcgccggcctatctacagcttgaacggacgatcgcagaggttcaggcagtggtggttgagctcgaaggtacgccgtcttga

SEQ ID NO: 495250 - DNA, 1113 bp, Stenotrophomonas maltophilia
atgtcgagttctgagcttgccgcatccactcaggtcaagcggctacgctatgtggagaacctctacgcccacgcagacagcctatttggaaccagttctctagacgatgcattgggcgacctggatgacgtacggcttgccgagattcttgagtcttggttcatatccatccgaaaccaagcctacgtagggtccgccgacgagacacgttggagaaccgggttgtccttcgtcacggccgtagtcacttggctgtcgaagacaaccctgccaacggatcgattacggcatatcgagggtcggctgcatcgcctgtccaatctctatgggcagctacatgtgcgaaagagcaagcacgcgagccagatccgttcactgccggccagcgtggttgaagtgttatacgaaatgttggacccagcatctgcgaccaacccattccccagaacgcataccaggtggctaaccttcgtggccttcttgttgatgcttcaccagggcctccggcgcggtgagctgatgctcctcacggcggatgttgtcaaaagcggattcgatgatcgtcaacaacgaccccggcactggttgaacgtgtcggaaagcaagtattccgatgacgaggttgatccacggtattcgcgacccagcattaaatctgcggattccgttcgtcaactgccagtgagcaacacgattgctgcgttggtgcaaacctacgtcgagaactatcgaggaaagccaagtcacgccttcctgttgaacacgcagcagaacacgccgttgtcaacggagtctttgacgaagatgttcgcaaagatctccgtgagcctcccacgcgctgcccttaaagagctaacggacagaaatcagaagacgaccataacaccccacgatctgcgtcatacatgcgccgtggtaagactgaatcagctgctgcagcagggtgatccaatggaagaagcgctccagaagctcagggcgttttttggttggtccagagagtcacagatgccagttcgctatgcccgggcagtgtttgaagatcgtctctcgtcagtctggaacgacgcgttagacgagagagtttccgttctaagagcgatcccctcctag

SEQ ID NO: 495251 - DNA, 222 bp, Stenotrophomonas maltophilia
gtgaaggagcaggagcgcgccggggaggccctcgcccgccagctctatcccaagtccatgccaatcgaagaagcgcggtcgaaacgggaaagcctgctgcgcgaagaggccgccaagaagattccaccggggtaccggtgtatcaatggacaggcattccgcaggatcgataacggctgggtgcaggcatcgatagcctgcccccgtgatgcatcacgttaa

SEQ ID NO: 495252 - DNA, 1215 bp, Stenotrophomonas maltophilia
atgatgtatctaatctccgggcagcccggcaatggcaagaccctgcgcgcaatgtcgatggcgcttgagttctacgagcagaaccggcagcaggtgaaggagggcaatgcgcagccgcgccgattcttcaccaatatcgcgggcgccacagtagaggagggcgcagacgccttcccgtggatggagaagttgcccgagcacaacgattggacacagcttccggacggctctttcgtgatctacgacgaagcgcattccgatggcaacacgcaggggctagaacgttacggcaaactgttcccatcgaccggaaagccgggggaatccgatgatccccgaattcgtgccatgtccacgcaccggcatcgtggtttcgatcttgttttcgtcacgcaatggccgaacaagattcaccatcaggtacgcacgctcatcggctcgcacacgcacatgaatcgctcgttcggcatgcagcgggctggcgtccttacgtggtcgcgcgtccaaagtgatccgtacgatgagaaggtgcgcgacaaggccgaagaagaaatctgggcttaccccaaggcgctgtatgcccgttaccgcagcgcgacgctgcacacggcgagccacaagttcaaggtgcctaagaaggtttggcaggcgctttccgtaactatcgcgctagtccttggtgtctggatgatctatgccttcatcatcaagccgccgtcggcaccaaagaaggcggatcagggggccggtgctttgccggcggctggagccctggcgcccttgggcgcgggcgggccggcggcacggcccctcacccgtgaggagtacatcgaacgtcacaaaccgcggattgagttccagccgtggtcggcacccgccttcgatgatcgcagcgttcaatcgcagcctgagctctattgcatggcatccggcacaaccgagcaggacactacatgtacgtgcgtaacggagcagggcaccaaagccaaaatttcgatcccggtgtgtgtagctatcgcgcgcgatggcccagcctataacccctatcgggcgccccggcaggaggctgatcctcgtcgggatgatccgccccggagcgtcgttcagtctgaaccatccagcacgcgcgaaccgtctccgcacgcgctcgttgaggttggtaagcgtcctatgggcacgttccccgaatcgccgccttatcccgcgagcttctga

SEQ ID NO: 495253 - DNA, 285 bp, Stenotrophomonas maltophilia
atgccgtggttagcagccttccttgtccagcttctgggcaactctcttgctcgcgttctcactggcgctggcctcggtctcgcgacaggcgcagccctgttgccgcttgtcaagggtgcgctgaacctcattacccagaagtggtcaggcattgcggccgatctcgccaatgtgatgctcatggctggggcaggggaggccatcaccatgatcggctctgccatcgtgaccagggtggtcattgatgcgggcaaggtcgccgtacagaaggcagcttcgaaatga

SEQ ID NO: 495254 - DNA, 906 bp, Stenotrophomonas maltophilia
atgggcattgctccagtggcttacgcacagtcgtcggggtacggcatgtgcggtaccaatgccacatggcagacggggcagattccagctggttgcgatcagggcattgccttctcagagtgcaaggccaaggaagacgaagcggcttcatcgcttgagcagcgctacggcatgcccggtaaggcggaaaagctcggttgtccggttgtgggtcagaatccaacctactttcgctgctatgcccgcattcctggcattggcgacactgagtgcggcaagtactacttcggtgagcgctgtagcgcccgaccttacgagcttgggtggcaaggtggtggcactgctgccactgtgaacgtctgccacaagggctgtatgtattccagttcgctcgatgctgaggccacctccggaatcggatattcgccgacaggtgggacctgcaccgagtcggatgctccagagccgaaacctgtaggggacggcggtggggatgatggtggtggcactgggggcgagactggcggcggtgatggcgatggcggtagtgatggcgggggcgacggtgacggcgacggtgatggtgacggcgacggtgatggtgacggcgacggcgacggcggagagaaccccagccttcccgaaaatcccacatatcccggcgacgtgccgatgccgtacatggacccgcccatcccaagcagttatctggggcaatggtctagtggcctcggtggtggttcctgtcccgctgcgaaggtcatcactgttggcgttggacctgtctccacgaccgtcagttttgaattccaaccgctctgcgatttcgcgctgatgatcaagggcttggtcatcgcctgttccgcgatcgcagctgtatatatcgtttcaggagtgcgcaaataa

SEQ ID NO: 495255 - DNA, 138 bp, Stenotrophomonas maltophilia
atggaactcgacgcaagcaccgcattgaccgttctggcctcactggccgctgttctgggcaccatcggcgcggccaagctcgcgccggctgcaatctcggtcggcttcaagtggatcaagggcgcgatcttcggttga

SEQ ID NO: 495256 - DNA, 192 bp, Stenotrophomonas maltophilia
atggcgcggtacgtctacgaatgcctgcaattcaatcagcagaccggcacctgtgagcaggctggattcgtgccgcgcaccgatattcccgcacttaccactgccgaggtgtcgggaatcctgtccatggttgcggtgtgtttcgccgtggcgtgggcatacaagcagataggcagaaccatccgaaactaa

SEQ ID NO: 495257 - DNA, 303 bp, Stenotrophomonas maltophilia
atgagcatcaaggtaaccgtcctgaaagccgaaatcgaagagcgcggcggcacgttcgagggcaacaagggtgagcagatcagctacaccacccgcaagcagaaggcacgccttgaatcggatggcttcgcttacccgtatgacgttcgcctccaggacggccagcccggctacccgcccggcgattacgagttcgatgtcgagtccatgctccaaatcaacaagggcgtggcctcgctgagcaagttcaccgtgctgcgcccgctgtcgaaggcgcccgtgcgcccggctgctcaggcctaa

SEQ ID NO: 495258 - DNA, 1107 bp, Stenotrophomonas maltophilia
atggccggtgagcgcgaggtgctggccgggtcgggactcccctcgtctaacaggggagtcagtgaattcaggaaccccgagggaaccctgacggtcggcattgactggttctccgcttccatcgatctgcgcgcagcgctggacgaggttgcgttccgtgatggcgacagcttcgaagaggtccggcagtggatcgagttctccccggacaacgcccgcattgcggccttgcaggtgttctgctggttcttcgccggtctgggtcttgaactggatgaaacggccggcggcggccgcttctacacgtggcgaatcaagatcatcgacgcggctaagaagttcgtcgggatgatcgaactcggtggcaaagagtgccgccgcgcagatggtacgtataccgcccgcatcgaacttaccggcgatggatgcaaggcaattggcgcagcgcgctgcggccatgcgaagcggtggctggagcttcgagcgaagctcgaaagctgcgccgggaggatcacccgtgtcgatgtgtgcgccgatgacctggtgggcgattacccattgcgcatggcacagaagtggtacgccaatggcgacttcgacaaccgtggtcagcgccccaaggcgcagctggtggacgactacgacagcggcgacggcaagacgttctatgtgggcggcaagaagtcggaaaagcagctgcgggtctacgagaagggcagggagcagggcgataagagttcgccgtgggtgcgctatgaggcgcagttccgcaactccaatcgcaaggaactgccgctcgacattctgcgcgatccggcctcctacctgctcggggcttatccggtcctgtcctttctgtgctgtgtcgccacgcgcatcgaaatcacgaaagccgccgttgaagcgacttggaagagcgttcgccgccacatccgccgccagtacggcgcggccctcaatttcatcgccaagaactgcccggacgatcaatccctgcggtcggtaatcgaatcctgcacttcgccatcgctgccgaagtgggtcacaggtgacacagcagcgcactggcccgaaatcgcggccgtacaaccaacctcaaaggggtaa

SEQ ID NO: 495259 - DNA, 177 bp, Stenotrophomonas maltophilia
atgagcaggtttcgctcattcgccgagatggcggagttcgatatgggtcttgcggcgtgcgccgcgctcatcgccgtttggctgggagcggcattgctctccatcgtgatcgagcaggcatggctggggcttcgtcgcctgtggaagctcggtaaggatcgctccaatggccggtga

SEQ ID NO: 495260 - DNA, 228 bp, Stenotrophomonas maltophilia
atgttcgacgccatctcatccttcgcgctgctgggggccattgcgggcatctccattggcggcgctcgtatcgtttcgtggctgctcgaccggcgtgactacaccgccgcgcagcagtcccgcgaagcccaggtcatcgcactcgcacgcgccgagattgccgccaccaagcgcggcgacctgctggccgcagccgcctttgccgaagagcaggagcgcgccgcatga

SEQ ID NO: 495261 - DNA, 387 bp, Stenotrophomonas maltophilia
atgaccgccgtaggtgaactgctcgatgccgcccgcgaacgcacgggaatcccgtctgacaatgctttggcggctcgattgggaattcagaggcagctgctgtcgaaggctcgcgcgggcgaaaagccgctctcagatgaacgaattgcgcagatttgcgcgctggcgaagctcgatggcccgacttggatcgccatgattcatgcagaacgcgccaccacggcaaccgaacgtgctctatggcggttgatgctggaccgaatgggcgcggcggctgcggtcgtcgcgctggtagcgctgtcgatgccgggtctcgcaaacgcaaaaaccgcccaaattcagacggttagcgctgctgacaacggcggtatgtatattatgttctag

SEQ ID NO: 495262 - DNA, 789 bp, Stenotrophomonas maltophilia
atgcgcctggctgattttatcgaacagaatgcgcgggaaatcctcgacgacgcggtggcattcgccgaaacgcaggcacccgataccgtcgagttcagcgcaaagcaacttcggaatcatcttccccagattcttcaggcggtcatagacgatctcagatcgccgcagacagactcccagcagctcgcgaagtcccacgggcttgcaccgttgaaacccggccccgagtccgccgcgtcctatcatggccgaacccgcgccatcgccggctttggcctcaaccagatggtggctgagtatcgagcgcttcgggcttcggtacttcggcgatgggcatccgaccagcggctggtcacttcatcgatcgatgacatccttcgtttcaatgaggccatcgaccaggcggtggccgaatcccttgctcagttctctgccgaggtcgaatcctggcggcagatcttcctcgcggcgctcgggcatgatctccgaggccccttggcagcgatcatcttctcggcagacaccctggccagtgggctgcgggacccagctttggccaagcaggccgagcggatcatcaacggcagcatgcgcatgaaaaagctgctggacgacctgctggcttacagccgcagcaagctgggcgatgggatggccattcatccggtggactgcgatcttgcccaatcgcttggcgaggaagtcgaattgcttcgcgctgccctgccccacgtccctatcacgtatgaggttgaaggcgatgcccgcggttgcttcgatgcctcttag

SEQ ID NO: 495263 - DNA, 480 bp, Stenotrophomonas maltophilia
atggatatccggcccgcccgtgcaggcgatttcgacgtgatgtggggcatgttcgagcaagccattgcgacgcaggatgcgctgccctttgctggctctttcgctgtcgagacgtttcgcgcgcattggtttcaggcccaggtacctcatgtagctgtgctggagggccgggttgtgggcatgtacaagatgggcccgaatttccctgaccttggggcgcatgtggccagcgccacgtatgtggtcgacgccgcgacacaggggcggggcgtgggccgagccctggtggaacacagcctggagcgggcgagggcggaagggttcctggccatgcacttcaattacgtggtcagcaccaacggcccggcggtggcgctgtaccggaagctggggtttgcggtggttggaacgctgccagaggccttccggcatggcaggcgcgggttggtcgatgtcttcgtgatgcacaggttcctgtag

SEQ ID NO: 495264 - DNA, 2196 bp, Stenotrophomonas maltophilia
atgccccctgtttccgcgcacatcccgcaccggcttcgacggtggcgtgttcctgcctgcgtcctgctgggcatctacctgctgtacctgctggccggcaacatcttcctcaacacaccgctgtttgaccaggtcaccaaccgcaagccgcacaagttcgtgatgaccactgggccggccattaccgtgctgccaggccatgtcatcgcctggaacgtgcacatgcgcggccatgtgaaccacacggtctacgtgctgcacgccgaccgcgccagcgctcgtctggcggtactgcccctgttccagcgcgaagtgcgggtgccccggctgcaggccaccggggtttcggccgagatcagccgcgtggaagaggccatcccgccaccgccgcgcagcgaccggggctggaccctgcgcttcgacgccatccacagcgatagtatccgcagcgcacgtttcggcaagctgctgatcatcggccaggggcagggcacggtgggcttcctcaagcagctgcgcggcgggccgtcggaactgttcgaatccgaggttgcattcagcgatgcggacaccagttttgacggcgtgcagctgttgggcgacatggatctcaccgcgcgcttcagctatccgcgccattatcgggaccaggcgcccggcctggccaagttgaagctgctgcatgcccagctcgaggtcgatgcccgcagccagggcctgcgcatggacaccaatgccacaacgccgaagatctccagcgcaccagtgcccggacgactgcaggccgcactccacctgatcgatggccaactgcagcccggcgaccacgcgctgtggcaggtgccgctctacctgggcgacggcgcccccgatcgcggcatgctggcgctgcaactcaatgtggccagggatctgcgcctgcaggcccgcttgccgccaaagtccggttcaggcagcgaggtggatgccgatctgcatatcagtggccgggacattcctttccaacagcccgcactgctgctggaacgcagctctggcacagtgcgcggcgaatggacgttcacctcgctcaactggatccctgccctgttcgtgcgcaagccgtggctgcagctggatggcggcggcacgctgaaggcagacctgcgccttcgcaacggcgagctgaccgaaggcagcaccgtggacattcctgcggccgaagccgtggccgaggtggcgggtgtgcgcttggcgggcacggccagcgcccacggcgaactgaaggccggcacgcccagccaggcgcggctggccgtccggttgccccgcttcaccgcgcggccaggcgatgccaaggacgtgcgcctgttcgacggccgggatctggccctggacctgaccggcgatggccgcctgcaggaactgcgcaaaggcgtccgcgcgcagctgcgcttcagtgaagccaccatccctgatctgaccgcctacaaccgttacctgggctcgccccaggtgcgactgctccgtggcaccggcaccgtgagtggtgatgcgaccctcgataccgacgggcgcgtcggccatggcacggcccggctgttggggcgcaacgccagtgcaaaggtggcagggctggacatgggcggcgatatcgacgtgaacgcaacactgcgccggggagacttcaaccagcgtcatttcgatctgtccggcaccacggtcgagctgcgcaacgtgcaggtggcgggcacgcagggctcgacggcatggaaaggccgcgtggacttcaagcgtgggcgcatcgatgcgcagtcgccgttccaggtggatgcgaccacggacctggatctcagcgatgcacgaccgttgctggcgctgttcgcagagcgcaccgattacccgcgctggaccttgtccctgctggattccggccaggtgcaggcccaggcgacgctgcgctggcgtccgggccatctggtcatcgacgggctgcaggccgagaacgatcgcctttcggtgcgcgcgcggctggatctgctggaacagcgcaagcgcggtgatctgtatctacggtgggggctgctgggtgcgggcatcgagctggacggcgaccagcgccaatggcatctggccaaggcacgcgagtggtttgaccagcagccttcgctgctgccagcgggccagggcacgggtgctgcaggctcgtcgcactga

SEQ ID NO: 495265 - DNA, 486 bp, Stenotrophomonas maltophilia
atgaacaagcgcacacaggcctatggccttctgggatggggggcgatcaccttcgccgccgccgcactgggcgcgtgggcctcgacgtccgccgccagcttctatgccacgctcgtcctgccggcatgggcgccgcctgccggtctgtttggcccggtatggaccctgctgtacgccatgatggcgattgcggcgtggctggtctggcgggagcgcggctggcgcggcgcgcggcctgcgctgtggctctatctggtgcagctggccatcaatgcactgtggagctggctgttcttcggctggaagctgggcgccctcgccttcgtcgacatcctggtgctggtggcgctggtgtgcgcgacgatgctcgcgttcgtgcgcgtccgcacgatggcagccatactgctgctgccctatctggcctggatttgcttcgcctcggcgctcaacttcgcagtctggcgtgccaaccccggcctgctgtga

SEQ ID NO: 495266 - DNA, 294 bp, Stenotrophomonas maltophilia
gtgaacctgcagaccctgccttctacgccgtaccgcatgctggctgacagttgccagttcgaactgctggatgtggatgccctgcaggaccccgccagtggccggttgctgcacctgtattcgctggtggcccgttgcctgtcctgcgagacggtgttcaaggccgaagaaggacaagggctggtcagccattcgtcggcgcgtgtggtgcgttgccccaccggctgcgggcagcaggcgttcaagccggcgctgttgaggaactggcgcccacaggtcgtggcccaggcgtaa

SEQ ID NO: 495267 - DNA, 2238 bp, Stenotrophomonas maltophilia
atgccttctgctgagcccacgcacgacgctgccctgtcgcgttgcgcgcgcgaaccgatccatacccccggcgcgatccagccgtacggtgtgcttctggtggtggaaccgcactcgctgcaggtgcgtgagcgcgccatcagccaccccgccctgctgcagcagttcggcgagccgttgatgcaacacgtcgccgaggtgatgggtggcgtgctggcgccgttccaggcggtgttgcagcaggccacggttggcagcagcgcacacgtgggcgcggtgcatctggatggccatggccgccaccagctgctcgtgcaccggtctgcaaccgaccttttggttgaactggaggcgccggttccgggccagcccggttcgctggaagagctgtacccggcgatccgcgagctgatgtccggcatcgagaccgccacgacggtggaagacctgtgcaggctggccgccgcgcatgtgcgacgcctcaccggcttcgaccgcaccctggtctaccagttcgatgcaggctggaatggcacggtggtggccgaggacggcaacggcctgctgccatcctatctggacctgcgcttccccgaatcggacatccccgcccaggcgcgtgagctgtaccgccgcaaccgggtgcgcctgattgcggacagcgattacacccctgcaccgctgctgcgcgcggaagcgcatcgcgacgcgccgcccaccgaccttagcctggccgtgctgcgcagcgtctcgcccgtgcacctgcagtacatgcgcaacatgggcaccggggcatcaatgtcggtgtcgctggtgcacgaagggcggctgtggggcctggtgtcctgccacgcggtgcagccgcgccgcctgccgtaccacgtgcgtacggcctgtgagttcatgggccagatcctgtcactgcagatcgcgctgaaggagcgcgcgcgcgcgatcgaggaacgcgtggcccgtcgctcggtgctggtcaagctgctggcacgcatggccggggacgaagagttcatggcggcgctgcgccacgatgaggccagcctgctctccctgaccggcgcggccggcgcggccatcgtgcacaagggggactgcatgcgcgtagggcagtgcccgccccccagcgaggtgctggccctggccgactggctggccaaccagcacgccgggcaggaaatgtactgcaccgatcatctcgccgccgactggtcgcctgccgcgcacctgaccgacgtggccagtggcctgctggcggtgtcgatctcgcagctccatcacagctacctgatgtggttccggccggaggtcgtgcgcaccgtgcgctgggggggcgacccgcgcaagaccgatgcgcccggcgtggccctgtcgccgcgcaactcgttcgaggcgtggaaggagaccgtgcagcggcgcagcctgccgtggagtgatgccgactgcgatgccgcgcacgaaatgcgcaccgccattgtcgacatcgtgctgcgcaaggccgaggaaatggcggagctgaacgaacagctggtgcgcagcaacaaggaactggaagcgttctcctattcggtcagccacgacctgcgcgctcccttccgccacatcgtcggctactcggagctgctgggcagctctgcgggcgagcgcctcaacgacaccgaacgccgcttcctcgacaccatcgtggaatcggcgaaatcggccggcacgttggtggatgacctgctcagcttctcgcagatgggccgctcgacggtgggccgggtgcggctggacatggctgcactggccgaggacgtgcgcaggacgttggccctggactatgccggccgcgaggtgcaatggacgctggcgccgctgccggaagtcgaggccgatccgaccatgctgcgcctggtctggcagaacctgctgggcaacgcgatcaagttcacccgcgagcgcgagcaggcagttatcgaggtcggccacgaacgcaacgacgacgaagaccatttcttcgtgcgcgacaacggctgcggcttcgacatgcgctacgtggacaagctgttcggcgtgttccagcgcctgcatcacgtcgaggaattcgaaggcaccggcatcggcctggccaatgtgcgccgcatcatcggccgccacggcggccgcacctgggccgagggcgaacccggcaagggcgccacgatccatttcaccctaccccgttccacaggagatcacccatga

SEQ ID NO: 495268 - DNA, 468 bp, Stenotrophomonas maltophilia
atgagggacctgcggccgatcctcctggtcgaggacagccccaaagacgccgagctgacgatggccgcgttgtcacgctgccagctgctgaacgacgtcatccacgtgcgcgatggcgccgaggcgctggactacctgcgctgcgaaggcaagttcgccggcgccatgcacggcggcccggtcgtggtgctgctggacctgaagctgcccaaggtcaatggcctggaagtgctcgaacaggtccgtggcgacgcgcagctgagcagcaccccgatcgtgatgctgacctcctcacgcgaggaacaggatctggtgcggagctacgaactgggcgtcaatgcattcgtggtcaagccggtcgatttcaaggaattcttcgatgccatccaggggctgggcatgttctggggcatcaccaaccaaccaccgccgcaccggcccaacggttcgggacagcgccatgcgtga

SEQ ID NO: 495269 - DNA, 2400 bp, Stenotrophomonas maltophilia
atgcgtgatggatcgcgccgcagtgagcgcctgcgcatcctcatgctggaggacagcgcgcttgacgcggagctgatcagcgcacagctgcagcgcgcaggcctcgacttcgaggccgagcggctgtggacccgcaatgcgttcatcgaggcgatcgacaatcgccccttcgacatcatcctggccgaccacgtactgcccggattcgatggcgatgccgcccttgcgctggcgcgcgagcgcatcccgcacacgcctttcatcttcgtctccggcaccctgaccgaagagctggccgtgcaggccttgacccgcggcgcacgcgactatgtggtgaagcagcgcctgcagcgcttgccggatgccatccgtcgcgcgcggcaggaagcccacgagcgcaaccagctggtgcaggcgcaggctgcgctcaatgagagccaggcgcagctgcagcaggtgaccgacgccgttccggcgctgatcgcccggctcgacaaggaccaccgctaccgcttcgcgaacaaggcattcctggattggcatggcgtgagccaggccgaattgctgggacgccttgcccgcgatgtcagcggcatcagcgccttcgaacgtgccctccccagcctggaacgcgtgctgcagggcgagcgcaccagcttccaggtcgagctcgtgcatcgcagcggccagtcacgattcgtgcagatggactgcgtgccggagcatgccgccgatggcagcgtggccggctacatctgcatgggcagcgacgtatcggtgttgaagcaggccgaactggccctgcgtgaggacaaccaggtcctggagcagcaggtgcaggcgcgcaccgccgaactgcgggccagcaaacggcggctgcaggcaatctttgaatccagcttccagcatcaggtgttgctggatctgtccgggcgcgtggtcgatgccaatgacgcttcattggccgccgtgctggcggacaagaaggacattgtcggccagcgcttcggcgaatccttgtggttcgccaacaccgacggcgtcggcacggtggttgaccaggccgtcgccgcggcggcgcagggtcgcaactcgctgcattccctcgagctggaactgcccaccggccggcgcagcttcgatgtctcgctgcgcccgctgctggacgccgacggcgtggccaccgccgtggtatcggaggcggtggaaaccactgcgcggcggcaggccgagcatgcgcttcgccagtcgcagaagatcgaggcggtcggccagctcaccggcggcatcgcgcatgatttcaacaacatcctgacggtgatctcgggcaacatcgagcacgccatgctgctcagcgaacgggccggcgaagccggcgcgatggccagccgtgccctggacaatgccctgaagggggttggccgtgccgccagcctcacccagcgcctgctcgcctttgcccggcgccagccgctgcacagccaggcagccaacctcaacgagtgcctgctggacatgcaggacatgctgcggcgggcgctgggcgaactggtgcaactggacatccgcaccgccgaggacatctggtgcgtggagatcgacatcagccaactggaagcgtcggtgctgaacctggcggtcaatgcgcgcgacgcgatgccgcacggcggccgcctggtgatcgaagtcgacaacagccacctcgaccacgactacgccgcattgttcccggatgcttcccccggcgagtatgtgatgctgcgggtgcgcgacaacggccacggcatggacgcggccaccctggcgcgcgtgttcgagccgttcttcaccaccaagcaggtcggtcgcggcaccgggctcggcctgtcgatggtgcacggcttcgtgaagcagtccggtggccacgtgctgatcgattcggtggaaggcggcggtaccagcatcaccatgatgttcccgcgctcgcctctggcgctgccttgcgaggctcgcgtcccgcagacgggcctggccggctactcgccacgcgaggaaaccgtgctggtggccgaggacaacgacgatgtccgtgcgcatacagtcgatgcgctgcgcctgctgggctaccgcgtgctggaagcgcacgacggcccctcggcgttgcggctgctggaacggccggacaccaaggtcgacctgctgttctcggacgtggtgatgccgggcatgtccggctgggagctggtgcgtgaggtgcgtgaacgctggccggcaatcgcggtcctgttcacgtcaggctatccacgcgaccacgatgcggttggcgcgctggggcgtgcagccgccctgctgccaaagccatttacccgcagtgaccttgcgctggcagtgcgcaccgcgctggaggctgcgccgcgctga

SEQ ID NO: 495270 - DNA, 693 bp, Stenotrophomonas maltophilia
atggctcaggcacggacatttcggattctcctgaccggcgctgcaggcctggtggggcagggcgttgccctggcctgccagcgctcgccgcaggttgccggcttgaccgcgctggtgcggcgcccgggcagcctgcgcggacccggcagcgaacgggtagtcccggacttcctgcacatcgacgcgcagcgtgatgaactggccgggtacgacgcatgcttctactgtgccggtgcgccaccggttggcactgccgaggccgagtaccggcgcgtgaccctggacaccacactggcagtggcccgcgcctgggctgcggtgaatccgcaggggtccttcctgtatgtctccggcgcaggcgcggacccgcaaagccggctgatgccgctgcgggtgaagggcgagaccgagcgggcgttgcaggcgctgccgctgcgcgcggtgatgctgcgtccgggcggggtccggccggtgccggggacaggtacccggcatgccctgttgaaacccctgtactggggcggcgcaccgttgatgaaactggccggtgcgctcgcgccctcgctgatgaccagcaacctggcgctgggcatggccatgatcgccctggccggaagagaaaatccgccggccacgatcgagtgcgcggatatcaaccggatcgcggcaggcatgcgcgatgcgtccgcctga

SEQ ID NO: 495271 - DNA, 675 bp, Stenotrophomonas maltophilia
gtgaacccgcgccaccacctgcacgaatcgacgttgatgagctatgccgcaggcgcgctgcccgcgccactgagcgtggtcgctggtacgcatctggagcagtgcccgcactgccgccagcgcctgcgcgaggccgaggcgatcggctcggtgctgctcgagcagacccagccgcccgcgcctgatccacgccgcgaacagctgcgcgaggccatgctgatgcagctggctgcggaaatgccgattgccatggaccaggccgcgcgtcccgtgccgaaggagcggcccgaggccgacccggaccatctgcctgcctcgctgcacccctacttcggggcatcgctcagtgggttgcgttggcgctggatggcacccggcgtgcactgcatccgtgccgagcagatgccttcgctgatcatgctgaagatcgccccgggcaaatgcctgcccatgcacagccatggccgcagcgagctgacccagatcctgcgcggttcctacaacgatgcgctggggctgttcgcacccggcgacgtggcggacctggatgaagacgtggagcatcagccggtgaccgcgccgggggtgccgtgcatctgcgtgtcggcgctggatgcaccgctggtgttcagcgggtggctggcgcgcaagatccagcggttcgtgaaactctag

SEQ ID NO: 495272 - DNA, 624 bp, Stenotrophomonas maltophilia
atgtaccctgacgccgccagcaaccccctcaacttcgataccgcacgcatcgtgtccagttcccagcagccgagcagcgagccgacgaactgggccggtgacatggacggcgtggcacggcttcgtgaccgcgactgtttcatgcggatctacgactacttcatgccgcggctgtgcgtatacctgcggggcctgggcgtgcctgacgcagtggccgaggaactggcgcaggagagcctgctgcggctatggctgcgcgcggccgatttcgatcccgcgcagggtgcgctgagcacgtggctgtatcgcatcgcccgtaacctgcacattgaccgcatccgccgcgagcgcagctggatgcaggtgcaggcagccgtcgaggacgcagcaaccctggatgtgatcgaacgcagcagcgccgaacagtttgccgaccaggcccggctgcgccagcgcatcaacgaactgcccgccgtgcaggcgcgcttggtgcgcatgtcctatttcgaggccaagagccacagcgagatcgccgaggcgatcggcatgcccttgggcaccgtcaagtcgcatctgcggcgcgcgttcctgcagctgcaggccaaagtgggaggtgcgctgtga

SEQ ID NO: 495273 - DNA, 768 bp, Stenotrophomonas maltophilia
atgcgtaccgcctggctgctgctgtgcctgccccatgtcgcgctggccgcgccctggctgcgaagcgagggggtagcaacgtcgtcgcgcggcgacctgctctaccgcgaggtgcactggcgacgcgatgcggccgagggtgccgagcgctgggtgctgtaccaatgcgcggacgggcggcctttcgcccgcaagcacctgccggccagcgcggacccacaggcgcgcggctataccctggaggaccggcgcagcggccagaaggccgacgtcgaggccgccagcggcagggtctcgatcgcgtggaaggaggatgccggcagcccaccggtgcagcgcgagctcgacctgccgaccggcgcggtcatcgacgcagggttcgacgcggcggtgcgcctgcattggcaggcgctcatgcgcggcgagcgtgtgaccctgcccttcctggttccagcgcggcagcgctacttcccggtacaggtaaggcgcatcggcccgcagcgctggcaggggatcgatgcgcagtcgatcgaggtcagcctggacacctggtacggcggcatcgcgccacgccttgcgctggtatatgccagcgctgaccagcgcctgctggagttccgtggcaccagcaacctgcgcgatcaacgcggtgcctatccacaggtgacggtgcgcttcatcgccgcagcggctggtcgccccgccagcgaatggcagcaggcctgggcgcggccgctgacagatcgctgcaccgttacggccaggtga

SEQ ID NO: 495274 - DNA, 951 bp, Stenotrophomonas maltophilia
atggcctctgtagcgcccctcccccgtcgacgctggcgcctgctgcgcacgctgcagcgctggttcgataccggcaacgccgcagaggccaccggcgagcggccggggcggatcgactgggtgcgcgccgtgcccttcgcgctgatgcacctggcctgcatcgcagtgatctgggtgggcatctcgtggacagcggtgatcgtggctgcagcactctatgcggtgcgcatgttcgccatcacggcgttctaccaccgctacttctcgcatcgcaccttccaggcatcgcggccggtgcagttcgtgttcgcggtgatcggcgcctccagcgtacagcgcgggccgctgtggtgggccgcccaccatcgccaccaccaccgtcacgccgaccagccgctggacccgcactccccccgtgagggcggcttctggcgcagccacatgggctggttcctgacccgcgaggcctttgccaccgacctgtcgcgggtgcccgacctggcgcgctacccggagctgcgctggctggaccgcttcgatacggctgtgccggtactgctggctgcagcgctgtatgcactgggcgccgggttggagcgctgggcgccaggcttgcatacctccggctcgcaattgctggtgtggggcttcttcatttccacgatcgtgctgttccacgccacggtcaccatcaattcgctggcccatcgcttcggccgccgccgcttcgagacccgcgatgacagccgcaacaatctctggctggcgctgctcaccttcggcgaaggctggcacaacaaccaccacttcttcccgggcaccgtccgccagggcttccgctggtgggaagtggacctgacctggtatggactgcgcgcgatggcggcgcttgggctggtcaaagggctcaagccgattcccgagtgggtgctggccaaggcgaggtactga

SEQ ID NO: 495275 - DNA, 1278 bp, Stenotrophomonas maltophilia
atgcgcatcgcgatcatcggttcgggcattgcaggactggccagcgcctggtggctggacggcgaacacgacgtcacgctgttcgaggccaacgactatctgggcggccatacccacacccacgacgtgcgggtggatggcgtccgcatggcggtggacaccggcttcatcgtgttcaatccccagcactacccgctgctgaccgcactgttcgacgagctgggcgtagcctcgcagccgaccacgatgagcttctcgatgcacagcgagcgcagcggcgtggagtacaacgccacctcgctggatggcctgttctgccagcgccgcaacctggtgtcgccgcggttctggggcatgctggccgacctgcgccggttctaccgcgatgcccccctgttgctggcagaagacgagggcccaacgttggggcagtacctgcgcagccagcgctacggcgatgccttcatcgacgagcacctgctgccgatggcctccgcgctgtggtcgtccccgacggccacggtgatggacttcccggcgcgctatctggcccagttcatggccaaccaccagatgctgcagatgaccgggcgtgcaccgtggcgggtggtgagcggtggatcggcccgctatgtcgatgccctgcgcgcccgctggcgggtgcatgagcggctggagtgcccggtacagtcggtcgagcgcatgccgtggggcgctcgcgtgcacagcgcggccggcgtggaaggcttcgatgaggtcatcctggcctgccacagcgaccaggccctggcgctgctgcgtgacgccgaccccatcgaacgcgacgtgctcggcgccatccgctaccaggccaacgaagcggtgctgcacaccgacgcgtcattgctgccgcgcaaccgcaaggcgtgggcggcatggaatgcccatgtgccccgcgaccctgccgcgccctgcacggtcagctactgcatgaaccagctgcagggcctgcccggcagcacgcccctggtggtcacgctcaaccgcagcgaggcaatcgacccgggcaaggtgctgcgcaccctgcattatgcgcacccggtgcacgaccatgccgcagtgcgcgcgcaacagcgctgggccgagctgcagggccgccgccacacctggttcgcaggcgcctattggggctggggcttccatgaggacggcatccgcagcgcccgccgcgtggtcgatgcactgcgcacctgtgaaccgcaccacgtcatggcggctcccggcgaggtggccgcatga

SEQ ID NO: 495276 - DNA, 768 bp, Stenotrophomonas maltophilia
atgagcgccagtgcgctctacttcgggcaggtggcgcaccgcaggcacctgccacacccgcatgcgttccgctatccgatcgcacagctgctgctcgacctggatgaactcgacagcgtgttcgccgggcgctggctgtggtcgatcaatcgccgcaatctggccgagttccgtcgcagcgattacttcggcgatcccgcgcggcccttggccgatgcagtgcgcgaccacgctgcatcaaccctgggctaccggcccaccggcccggtccgcctgctcacccatctgcgcttcgccggtcacgtgttcaacccggtcagcttctactactgctaccgggccgatggcagcacgctggactgcatcgtcgccgagatcaccaacacaccctggaaggaacgtcacgcctacgtgctgccggtcgcaacggccacgcaggaaggcacctcgctgcgctggcggttcgacaaatgcttccatgtctcgcccttcatgccgatggattgtcattacgactggcggttcaactgccctgatgaggacctgcgcgtgcacatgcaggtctggcgcgacggcgcgcgccagtttgatgccacccaggtcatgcaacgacaccccctggatggccgcgggctggcccgcgtcctggcctgctatccactgatgaccacccaggtggtggccgccatccactggcatgcgttgcggctgtggctgaaacgcaatcccgtacacgaccaccctacccttgccgagaaaccgcgatga

SEQ ID NO: 495277 - DNA, 1260 bp, Stenotrophomonas maltophilia
atgaattcgatgattccttcggtcgcgctgccgcgccccggcgcattggatgccttcctgcgccgccgcctgctggcccagctcgccccgatgcgcgacggccgcctgtgcgtgcgcgacgcgctgggcgaagtctggttgggcgatgcccgcggtgagctgcatgtcaccgtcaccatcgaggacccggcgttctatcgcaaggtggcggcccagggcagcgttggcgccggcgaaagctacatccatggcgaatggcgctgtgacgacctggtcgccctgatacggctgctggtgcgcaaccgcgatctgctcgacagcatggaacacggcccggcgcgcgtgggaggctggctgctgcgcggctggaaccgcctgcgccgcaacagccgcgaaggcagccgccgcaacatcgccgcgcactacgacctcggcaacgacttcttcgccctgttcctgtcaccggacctgatgtactcctcggccctgttcgccgaagagggcgagtcgctggaatccgcctcgcggcgcaagctggaccgcatctgccagcagctgcagctcaagccgggcgaccgcgtggtggagatcggtaccggctggggtggttttgcgctgcacgcggcgcagcactacggctgccacgtcaccaccaccacgatctccgccgagcagcatgcactggccagcgagcgcgtccgcgtagccgggctgcaggacaaggtcacgctgttgatgcaggactaccgcgacctgcagggccagttcgacaagctggtatcgatcgagatgatcgaagccatcggcgccgaatacctggacacctacatggcaacgctgcagcgcctgctcaagcccgatggtgtcgccctgctgcaggccatcaccatcgaagatcaccgctacgagcaggcacggcgcagcgtcgactacatcaagcgctatgtgtttccgggcagcttcattccgtcgatcaacgcgatggtggcggccaagacccgatccagtgacctgcagctggtcgcccagcaggatttcggtcactcctacgcactgaccctgcgcgcctggcgccaacgcttccttgcccagctgcccgctgtgcaggcacagggctttgatacgcgcttctgccggatgtgggagttctacctggcctattgcgagggcggcttcctggagcgttcgatcggcgtttcgcatctgctgctggcgcgccccgggcatcgtcccgctggcgcatcgggtcaaggcggctga

SEQ ID NO: 495278 - DNA, 546 bp, Stenotrophomonas maltophilia
gtgcgccggttctgggccaatctgcttggcaaccagctggtctggctgtgcgccgtggccggcgccgggcgcggctggcaatggccggcgctgctggcagcgtcgctctacatcggcagccagctgctgacctcgccgcaacctcggctggatcttcggctgatgctgttggcgatggcctgcgcgtggctggtcgacgccagtgccgccgccagcggcaccgtgcgctacgccgcggccccgctgggctggacgccacccctttggatcatggcgttgtgggccgcgtttgcgatgacgctgaccacttcgacgcgcttcctgctgcgccaccctgccctgccagccgcgttcggcctgctgctggccccgctggcctatctctccgcagcgcgcggtttcgatgcggttcgattcactgcgccgctgtggcagggcctgctggtcctgggggtgggctggagcatcgcgctttcgctgctgtgcatggccgctcgtcgcggctcccgcaccattccaccgcccttggccggagcgccgtcatga

SEQ ID NO: 495279 - DNA, 786 bp, Stenotrophomonas maltophilia
atgatcaatctggtgtgggtactgctgtatgccgtgcttgtgatgagctggggctgggcctggcagcggcgccaccgcaacatcggcgtggtcgatgtgctctgggccaagggcgtgggtgcttcggccctgttgctggcgtggctcggcgatggtgcggcggcgccacgcattgcactgggcgtgctcggtggcctgtggggcagccgactggcactgcacctgtggcatcgggtccgccacgaacaggaagacggtcgctaccgttatctgcgcgattactggcaagggcatcaagccaagatcttcggcttcttcatggcccaggcactgctggtcgtgctgttcgccctgcccttcgtcgcggtggctgccaatccacagaccagcatgacgttgtgggtcgtggccgccgcactcgtctggctgctgagcgtcggcggcgagagcctggccgaccatcagctggcccggttccgcgcgaatccggcaaaccagggtcgcacctgccgcgccgggctctggcgttactcccgccaccccaactacttcttcgagtggctgcactggttcagctatgtcctgctcgcggtcggctcgccgctgtggtggctggcgtggtccggcccgctgctgatgtatgtgttcctgcgctacctgagcggcattccgttcaccgaaaagcaggcgctgcgcagccgcggcgacgattaccgcgcctaccagcgcagtacgccgatgttcttcccctggttccctcgtccttccaaggagcattccgcatga

SEQ ID NO: 495280 - DNA, 1074 bp, Stenotrophomonas maltophilia
atgagcgcgattccgtcactgaccccggccgacgacgcggaaaccgggctgatcgcctgggccgaacgcggcctggttcccgatgccgcgctgcgcgccggcatccgtcgcctgtgcgcgcaacgcctgcacgaggaaatgctgggcggtatcgaagcacagtccgcacgcttcggccgtcgcatcgccgagctggccgacagcccgctcgcgctgcataccgacgcggccaaccgccagcactatgaggttccggcggccttcttccaggcctgcctgggcaggcgcctgaagtacagcagctgctactaccccaccgggcgcgaaacgctggaccaggcggaggacgccatgctggagctgtacggccagcgcgccggactggccgatggccagcagatcctcgaactgggctgcggctggggttcgctgaccctgtggatggccgagcgctatcccaccgccgcgatcaccgccgtgtccaattcgcacagccagcgccagcacatcatggcgcagtgccaggcccgggggctgcacaacgtcgaggtgatcacccgcgacgtcaaccagctcgagctgccaaccgcacgcttcgaccgctgcgtctcggtggaaatgttcgagcatgtgcgcaactacgagcgcctgctggcgcgcatcagccagtggctgaagcccgacggcgcgctgttcgtgcacatcttcgcccaccgcacgctgatgtacccgttcgagaccgagggcggcgacaactggatgggccgccatttcttcactggtggcctgatgccggcggccgacacgctgctgcatttccagcgcgacctgcggcttgaccagcgctggttgctggacggcacccactaccagcgcacggccgaccactggctggccaaccaggatgcagcacgcgaggcggtgatgccggtgctggtcgcgacctacggccaggccgccgcgaagatctggtggcagcgctggcgcatgttctggatggcatgcgccgagctgttcggctacgacgacggccagcagtggctggtcgcccactatctgttccgcccccgttga

SEQ ID NO: 495281 - DNA, 681 bp, Stenotrophomonas maltophilia
atgctggaaacgctgtgcgtcgccgcgctggctgaagtcaccggcagcggccgccgcggccagctgctggatctgcgaattgatcgccagcaggctggccttggccgcgtccatcgattcgtgcaggatcgcgcggctgccgggcaggcggcgtgcatccggggtgagattgccgatggcgtactggttgagcacgtcgatggcatcgcggatcgcatccaggtgctcgaagatcaccgtattgatgccgccggccagctggccatagacacccgggaaatcttccggaatgcgatggctgatgtccggtcccgcgtgcatctgtgccatcagctgggtctgctcgctgaagcggcggagcattgcggtcatctcggtcgtggcggccagcatcctgccggcttcgtccttgctggtggcctgggtgctgacgctgaggtcgccgcgggcaaccgcctggatggcatgcacggccttgcccagcgggccagtaacggcgcgcgagatgacgatggccagcgcggcggccaccagcgacagcagcacgatgcagccgatgatggcgatcatgctggtgcgatgggtggcgttggcgtcggcgatcttgccgtccatctgcccggcgatgtgggtgcccagtgccttcatcgcagcgaacaggtcgcggcgcgccgggcgtga

SEQ ID NO: 495282 - DNA, 1989 bp, Stenotrophomonas maltophilia
atgagcatggacctgcaacgcttccacgccaccttcttcgaggagagccgcgaaggcctcgacgcgatggaggctggcctgctggccctggaatcggggcagcaggacgcggagatcatcaattcggtgttccgcgctgcccattcgatcaagggcggcgccgggaccttcggcttcgacgcgatcgccggcctgacccacgtgctggaaacgctgctcgatgagctgcgcgccggcaagcgggcactggaaggccacgccgtcgacgccatgctgtcttcggtggacgtgctgcgcgccctgctgcgcgaagccgaacatggccaggctgccgatccggctgccgtcgctgcggtgaaggcacgcctggaggcggttctgtccggccaggccgcagcgagcgccccggcgaccgccgcagccaaggtggacgatacgccggaagcctggcagatcggcttcaccccggcgccgtcgctgttcatgagcggcaacgacccgctgcgcatcatccgcgaactggaacacctcggttcgctgcaggtcgccgcgcgcatggaccgcctgccgggcttcgcgcacctcgatccgctcgaagcccacctggcgtgggacctgggtctggtcggcaaggtgccgcgcagcaagatcgaagacaccttcgcgtgggtactggacgactgcgagctggacatccgtccggccgcaccgccgagcctggccacccaggcgccggccgcggctgctcccgctccggcggcagcgtcgccgtcggcacccgccgcgcctgccgccagcggtggcgccagccaggaagcggaaacctccatccgcgtcagcgtcgacaaggtcgacgcgctgatcaacctggtcggcgaactggtcatcacccaggccatgctcaagcaggtctcgcatgcgctggacccggtccacgccgagagcctgttcgctggcctggaccagcttgaacgcaacacccgcgacctgcaggaagcggtgatcggcgtgcgcatgctgccggtcgatgcggtgttccgtcgcttcccgcgcctggtccgcgacctgtccagccgcctcggcaagcaggtgcggctgcgcaccgtcggcgaaggtaccgagctggacaagggcctgatcgagaagatcgccgatccgctggtgcacctggtgcgcaactcgatcgaccacggcctggaaatgcccgacgtgcgccgcggtgcaggcaaggacgaaaccggcacgatcaccctggcggcctcgcaccagggcggccacatcgtcatcgaagtcagcgacgacggtcgcggcctggaccgcgccaagatcctggccaaggccaccgagcgcggcctggcggtgccggacaacccgaccgattcgcaggtctgggacctgatcttccagcccggcttctccacggccgatgcggtcactgacctgtccggtcgtggcgtcggcatggacgtggtccgccgcaacatccaggcgttggggggcgaggtgcagattgaaagcagcctcggcgctggcacccgcacgctgatccgcctgccgctcaccctggccatcctcgatggcatgaccgtggcggtcgccggtgagaccctgatcctgccgttggcctatgtgcttgaggcgttgcagccgcaagccgaggacatccgcagcatggccggcgaaggccgcgtgctgcgcgtgcgcggtgaatacctgccgatcctgtcgctgagcgagtactacggctacggcaaccgtgcacccggcagcgaatcgctggtggtggtggtcgaaggcgatggccagaagatcgccctggaagtggacgaactggtcggccagcagcaggtggtggtgaagaacatcgagaacaactaccgccgcatcggcggggtgtccggtgcgaccattctcggcgacggccgcgtcgcattgatcgtcgacatcggcgggctggtgcgttcactgcggatgccgcaggccgcctga

SEQ ID NO: 495283 - DNA, 366 bp, Stenotrophomonas maltophilia
atgagcgcacgtatcttggtggtggacgattcggcgtcgatgcgccagatggtgtccttcgccctcacctcggccggttttgccgtcgaagaagctgaagacggcgcggtcgcgctcggtcgcgccaagggccagcgcttcaatgcggtggttaccgacgtcaacatgccgaacatggatggcatcgcgctgatccgcgaactgcgccagctgccggactacaagttcaccccgctgctgatgctgaccaccgaatctgccgccgacaagaagtccgaaggcaaggccgctggcgctacgggttggctggtcaagccgttcaatcccgaacagctggtcgccaccgtgcagaaagtgctgggctga

SEQ ID NO: 495284 - DNA, 309 bp, Stenotrophomonas maltophilia
atgagcactgtcgaactgggtggggatctcggcatcgagagcactaccgagctcaagaaccgccttgcccccctggtggagcaggcaggcgagctgaccctggatgccagccaggtcgcccgcatccacacggccgccgtgcaggtgctgtgtgcgttcgtgcaggcccgccgcgaggcaggcctgggcaccggcttccacggttgcactgcaaccttccgtgacgccgcgcgcctgctgggcgtcacccaggccctcggcctggacgtaacccatgacaacctgaaatctgtggagaacgctgcatga

SEQ ID NO: 495285 - DNA, 1266 bp, Stenotrophomonas maltophilia
atgaacagcaccggcatcctcgacgactacctggacgaactgctgggcgaggcgatcgccccggccgccgctccccaccccgcgccgatcagcaccgccccggccacggccaccgaagccgccgccgaacgcgaacccacctgggatgacctgccggccgaggtgatctacgaaaccgaaaccgagagcgttgccgctgcccctgccgtggacaatgccgcactggaagccgctttcgatgccgcgtccgcgcccgtcagcgtgatcgatgccgaacgcgaacccacgtgggacgacctgcccgctgaagtggtctacgaaacggatgccgtcgtcgcggccccggccgaggatgaggctgcactggaggccgccttcgaggccgccgccgcgccggccagcgccgggtccactgaacgcgagccgacctgggatgacctgcccgacgaggtcatccacgaaaccgcgccggcctccgctgcggccgctgcgaacaccggcccggaacccacctgggacgatctgccggacgaagtgatctacgagaccgacccggcggacagccatcgtctcgcccacaccgacagccccggcctgcaggccgccttcgaggcggccgctggtggcgaagacgtgcctgcgccgccgcccgccgtggtcgcagcgccggtgccccccccggcggcacgccctgcaccggccccggccgcacgcgccgccacgccgccgccgcgcgtcgccgtcgatgcacccgcaggcaaccgccccggcacctggcaggagctgcaggcgcaggcccaccaaccggcccgcagcccgcatccgcagaaccgtcgcgccggtgaacgcacctcgcgctggctgcgcctgcgctgtggcacccaggcctatgcgctggaactgctgaaggtccaggaggtcgtgctgccggtgccgctactgccgttgcgcggcaccgctgccgccatgctcggcatcatgaacctgcgcggccaggtggttccggtgatggatctgggcctgcacctgggcgcggctgccgccgaggacgacgcccagacccgcatcgtggtgctggaagaagacggcgagaccatcggcctgcgcgtgtcggcagtggaagatgtcgccaacctcaccgattcacagatcgaacctcccgataccgcacgcatctgccagatttccaacgacctgttccgcggcgtggcccgcgtcagccagcgcccgatgatcctgctggacgccacacggctgttgagctga

SEQ ID NO: 495286 - DNA, 783 bp, Stenotrophomonas maltophilia
atgcgcatctgggcagtcgccaaccagaagggcggagtcggcaagaccaccaccaccctcgccctcggccgcggcctggccgcgctcggccatcgcgtgctgctgatcgacctcgatccgcatgcttcgctcagccgcgccttcggcgtgccggtggacccgccgccggccggcgtgctggagctgttcggcgcaccgccggcggacctgtccggcctgtgccatgccagcaacatccagggcctggactacgtctgcgcgcagtccgcgctggccacgctggaacgccgtagcgccaaccaacccggcctcggcctggccctgcagaacgcgctggcgcgccaccagggccagcacgactacatcctgctggactgcgcaccgacgctcggcctgctgatgatcaacgcactggctgccgccgatcgcctgatcattccgacccaggccgagccgctggcgctgcacggcctggatggcatggtccgcaccggcgagatggtcgagcgttcgcgccgccggccgctgccgatctcgatcctgccaaccctgttcgaccgtcgcacccgcgccggcaacgaatcgctgcgcaccatgcaggaccgccatggcagccgcgtctgggaagacgcgattccgatcgacacccgcatcagcaacgccgccgggctgaccctgccgagcgtcggcgaagattacccggggcgtggcctggctgcctaccggcgcgccttgaactggatcctcggcgaggatgcccgcgccctggagcaggccgcatga

SEQ ID NO: 495287 - DNA, 1017 bp, Stenotrophomonas maltophilia
atggcccgccgcaagcaccacgaagagcacgccaaccacgaagcatgggcgatcccctatgccgacctgatgacgctgctgctcgccttcttcgtggtcatgtacgcgatctcgtcggtgaacgagggcaagtaccggatcatggccgacgcgctcaccgatgccttcggtggcgcgccgcgcacgatcaatccggtgcaggtgggcaacaagcaggtgcagggtggcggctgggacagcccgtcggtgatcaagtccggcaccaagatcggaccgtccgcgccggcgccctcgcacgacccgacgctgctgccgtcgatggcctcgcagatgcgcatgccggtgtcggtgcacaaccaggagcagatcgcccgtgccgagcgccagctcaacacgattgccgaccgcctcaccgccgccctggcgccgctgatcgaccgcggcatgatcagcgtgcgccgcacggaactgtggatcgaggtcgagatcaacagcgacatcctgttccccaccggctcggccgcactggacgtacatgcgcggcagaccctggccagcctggccgaggtgctgcgcgacgtgcccaacagcgtgcgcgtggaaggccacaccgacaacgtgccgatcgccaccgccaccttcccgtcgaactgggagctgtcggccggacgcgccgccagcgtggtgcatctgttcgccgaccagggcgtgcagccgtcgcggctggcgatggtcggctatggccagttccgcccgcgcgaagagaacgacagcgcacagggccgcaaccgcaaccgccgggtgatggtcatcatcctggccgacacctcgcattcggtggacccgctcggccagcgcctgaacgcagccaccggcgccaccggcagcaccgtcaccgaacaggccgccgcaacgccggccagcgcccccacctcccccatcgcaccggtgacgttgccaccggtgccggctggcagccgcgtcggcgccgccgttcccccggcaatgaaggagtaa

SEQ ID NO: 495288 - DNA, 741 bp, Stenotrophomonas maltophilia
atggatagactcagcctcattggactctttctcgccctggcctcgctggtcggtggcagcatcctcaagggcgccggcctggcgtcgttgtggtcgcctgcggcgttcgtgatcgtcatcgtcggcaccgttgccgcgatcctgctgcacacctcgccggcggtgttcaagcatgcgttcaagatcgtgcgctgggtcgtgcgcccgccgcacagcgatcgccgcgaactgatccagcagatcgtcgagtggagcaacatcgcccgccgccagggcctgctcggcctggaatcgcaggtggaagcgcagcaggacccgttcctgcgcaagggcctgcagctgctggtggacggtgtcgagcccgaatcgatgcggcacatgctggaaatcgaactgggcagccaggaacaccaggaccaggccggcgccaaggtgttcgaagcgatgggcatctacgcaccgacgctcggcatcatcggcgccgtgctgggcctgatcgcggtgatgaagaacctggccgacccgagcaagctcggccacggcatcgctgcggcgttcaccgccacgatctacggcatcgcctcagccaacctgctgttcctgccgatcgccgccaagctcaagagcgtgatctcgcacaacacgcgcgaccgcgaaatggtcatcgaaggcctgatctcgatcgcccagggcgagaacccgcgcaacatcgaaaccaacctctccggcttcctgcactga

SEQ ID NO: 495289 - DNA, 1845 bp, Stenotrophomonas maltophilia
atgagcgcggtatccgacgacatcactgccgatttcatcatcgaggcacaggaaatcctggatcgcctcggcgaacagctggtgtcgctggagcaggcaccgcaggacaccgaacagctcaacgcggtgttccggggctaccacacgctcaagggcggcgcgggtttcctcggtgtcaccgccatggtcgagctgtgccacgccgctgaagaagcgctgggcgctgcacgtgccggccaggccgtgctgcaggcccatcacttcgacgccgcccagcaatcgctggactacctgcagtcgatgctcgatgccgtgtcttccggcaccgagccgggctatgcaccgccggacctgatcgcccagttcgacgtgcatggcggtgcagcagcgcctgccgccgctgccgcggcaccgacggccggtgccggcgacctgatcaccgatgacgagttcgaggcgctgctcgaccagctgcacggtggcaacgcaccgactgcggtggcgccggcaaagaaggccgacgacggcctgatcagcgaagatgagttcgaagccctgctcgaccagctgcacggcggcgccgcacccggcgccaggcccgcagctgcggtggcgccggcaccgatcgccgccccgcgcccggcggccgcaccggcaccggtggccaagccggccgccaagccgctggccgaagccgaacacaccgtgcgcgtggacaccaagcgcctggatgcgatcgtcaacctgatcggcgaactggtgctgtcgcgcaaccggctcaagaccctgcgtgcgcgcctgcgcgacgaggagctggaccgcgccgtgtccaccctggacatcgccaccgcgcgcctgcagtcggcggtgatgcgcacccgcatgcagccggtgggcaaggtgttctcgcgcttccccaaggtcgcccgcgacgtcgcccgctcgctgaagaaggaagtggacctggagctgatcggcgccgagaccgagctcgaccgcaacctggtcgaagcgctggccgacccgctggtgcacctggtccgcaacgccatcgaccatggcgtggaaatgcccgacctgcgcgaagcgcagggcaagccgcggatgggccatgtgcggttgtcggcgcagcaggaaggtgactacgtcagcatcgaggtgcaggacgatggcgccggcatcgatccggaaaagctgcgcgcgaaggcacgcgagaagggcctgatcgatccggaagccgccgcccgcctgagcagcgaggagtgcctgcacctggtgttcctgcccggcttctcgaccaagcagcaggtcacggatatttccgggcgcggcgtcggcatggacgtggtgcagtcgcgcatccgcgaactcagcgggcagatccagatccagtcggagctgggccgcggcagccgcttcctgatccgcgtgccgctgaccctggcgatcctgccgaccctgctggtgcaggccggcgaggacgtctatgcgctgccgctggcgcgcgtgatggaggtgctgcacgcgccgcgcacctcgctgggctggttcgatggccgtgccgtgctcgaccgccgttcgcacacgctgccgctggtcgatctgcggcagtggctggatgtgacgccggccgcatcgaccctgctgaccatcgtggtgctgcaggccggcgaagcgcgcttcggcctggtcgtggaccaggtccgtgggcgcgaggaagtggtcatcaagccactgccgaaggccctgcgcggcctgcgcggttacgccggtgcaaccttgatcggcgatggtcgcatggcgctgatcctggatgtggatggcctgcgcagcccgcacgactga

SEQ ID NO: 495290 - DNA, 606 bp, Stenotrophomonas maltophilia
atggataccacggtcgacaagaacgccttcgccctgcgcctgcaggaagccctggatgccctggagtccggtgacgaagccgcctggcggcaacgcatcgacggactggtcgcgctacgcacgcagccgatgatgagtggcctctcgcggctggcccgcgagctggggcaggccctgggcgaactgccgaccgtgcccagcgaggccggcgaactggacgatgcgtgcgcacgcctggaccacgtggtggcgatgaccgaacaggccacccaccgcaccctggacctggccgaggaatgccgcagcctgaccgagcagctgcgcgccgaaggcctgcagccaggccaagacgcgcagctggagcgcatccgccacaacctgaccgagatcgccctgacccagagctaccaggacctgaccgggcagatcatccgtcgcgtggtcggcatcgtgcgccgcgtgcatgaaggcttcggcgcgctcggcctgccgccggaacagcatcgcaccgacccggaactggccgggcccgcactgaagggactggaccgccacgcggtctcgcagaacgacgccgacgacctgttgtcggatctggggctgtaa

SEQ ID NO: 495291 - DNA, 381 bp, Stenotrophomonas maltophilia
atgcgcatcctcatcgtcgacgacttctcgaccatgcgtcgaatcgtcaagaacctgctgggcgatctgggcttcaccaacaccgccgaagccgaggacgggcatgccgcgctgtcgctgctgcagagccagcccttcgatttcgtcgtcaccgactggaacatgccggtgatgaccggcatcgaactgctcaaggcgatccgtgccgacgccaagctgaagaccctgccagtgctgatggtcaccgccgaagccaagcgcgagcagatcatcgaagcggcccagaacggcgtgaacggctacatcatcaagccgttcaccgcgcagacgctggaagagaagctgggcaagatcttcgaacgcctggcggccagcgcctga

SEQ ID NO: 495292 - DNA, 747 bp, Stenotrophomonas maltophilia
atgaaaggcgcagcccaccagtacagggaagtccagcgctcggcggccaacgaggtcatcgcccagcattcggacctggtgcgacgcatcgcccaccacctggccgcgcgcctgccggccagcgtcgaagtcgatgatctgatccaggccggcatgatgggcctgatcgaagcctcgcgcagctacgacgccgaccagggcgcctcgttcgagacctatgcctcgatccgcatccgcggctcgatgatcgacgagatccgccgtggcgactgggtgccgcgctcggtgcaccgccgtgcccgtgatgccgccgccaccatccgccgcctggaacagagcacgggccgtgccgccagcgccaccgaagtggccgccgcgatggagatgccgctgcccgagtacctgaggctgacggaagacgccgcacgtggccaggtgctgagcctggagtcgcgcatcgaagaccagggcgaactggataccgtcgcccagggcggcccgaccccgcagcaggtgctggagcgcggcgagttcggtcgcgagctgggcaaggccatcggccacctgcccgagcgcgaacagctggtgctctcgctgtactacgagcaggagctgaacctgaaggagatcggcgcggtgctcggcgtgagcgagtcgcgggtctgccagatccatggccaggccgtgctgcgcctgcgcggccgcctgaagattttcgaggccgtcgacgccggcctggaagaatga

SEQ ID NO: 495293 - DNA, 888 bp, Stenotrophomonas maltophilia
atgccgtcgcgtgagtacgccaagctgaccaagaccttcccgctgtcggccacccgcagcgagccgctcggccctgtgcgcaccatcgcggtgaccggcggcaagggcggcgtgggcaagacgaatgtgtccgccaacctggccgtggcgctggccggcatgggcaagcgcacgctgctgctggacgccgacctgggcctggccaacatcgacgtgatcctgggcttgaaccccacctttacgctggccgacctggtggccggccgctgctcgctggacgacgtcatcgtcgaaggcccgaacggcgtgctggtggtcccggccgcttccggccgccggcacatggccgagctggccccggccgagcatgtcggcctggtcaacgtgttctccgaactggaacgcgagctggacatcatggtggtcgataccgccgccggcatcaccgacggcgtgctgaccttctgccaggccgcgcaggacaccgtggtggtggtctgtgacgaaccggcctcgatcaccgacgcctacgcactgatcaaggtgctgtcgcgcgagcgcggcgtggaccgcatccaggtggtggccaacatggtgcgcgacccgaacgagggccgcgtgctgtacgagaagctgacccgcgtctgcgagaagttcctcgccgatgtctcgctgaactacctgggctgcgtgccgcaggatgactggctgcgcctgtcggtgcagcgccagcagccggtggtgaaggcctatccatccagcccgtcggcgctggcgatcaccgagatcgcacgccgcaccgcgcgctggcaggcaccgaccgaaccgcgcggtggcgtcgagttcttcctcgaacgcatcctcaagcagcgtggggtggccgcatga

SEQ ID NO: 495294 - DNA, 1683 bp, Stenotrophomonas maltophilia
gtgcagaccaccgaccacccgagttctccgaccgccaccccgccgtcttcgccccgtgaccacagcatgaaaatcaaacgattcgtcgccgccgacatgcgctcggccatgaacctggtgcgcaaggaacatggtcctgacgccgtgatcctgtccaaccgccggatcgaggaaggcatcgagatcgtcgccgccgccaactacgacgagagcgccgtgcagcgtgcactggaagcctcgcgccgtgacgtcgcaccgccgccggcacccaagccgcgcaccgccgccgacgcggtgatcgccgccgtcacccgccgccgcagcagcaccccggcgccggaaccggtcgcggccaccacctcggcagtggccgccctcgcccgcgccgccgtcggtgccaccggccgcaccctggacagcgccgacgagatcgtgccgacccggggcagcaccggcttcgccgccaccctggcccgcgccgccgtcaacgaaccggcaccgccggaccagaccttcgccccgttcgccgaggccatcgttgcaccggccgccaccgtgccggccaaccgcgcgcgcttccagatcgacccgccgcacgaggcgcatcacgaaagcgtggccccggccgtgctgccgccgccgctgccgaccgctgccgtgatcgacgcgcagcccgggatcgccgccagcgaaccggcagcggtcgaagccgctatcgaggccagcccggcccccatgctggccccggcaccgacgctgaccgtggttgcccaggacgacgccgagatccgccagctgcgccaggaagtggccggcatgcgccaggtgatcgagcgcgagatgaaccgcttcaccgacgagcgcctgcgtggcagcccggtgcgcgccaccgcgctggacctgatggacgagtacggtttcgacgccgggctggcccgcgacgtggccatgcagatcccgctggaaaccgaagcccatcgtggccgcggcctgatgctggggctgatctcgcgcaagctgccgatcgccccggtcgacccgctggaggaaggcggcgtgatcgcgctggtcggcccgaccggcgccggcaagaccaccaccatcgccaagctggcctcgcgcttcgccgagaagcacgccccgcgtgacgtcgccctggtcaccaccgacaccacccgcatcggcgcccgtgaacagctgtatggctacggccgccagctcggcatcgccgtgcacgaggccaacagcggcaccgacctggaccagctgctggaacgcctgaaggactacaagctggtgctgatcgataccgccggcctgggcccgcgcgaccgtgccctggccgcccagctgcagtggctgcgcgccgcgcgccaggtgcgcaccttgctggtgctgccggccaacaccagcttcggcgacatggacgaggtggtgcgccgcttcggtgcggccaacctgcagggcctggtgctgagcaagctggacgagaccggccgcttcggcaacgccctgtcggtggccgtggaccacgccctgccgatcacctgggtgaccgatggccaggacgtcccggaggatctgcaccgggccagtgcagccaatcttgtacttcgccttgaagatttgcgccgagcggccgatatgccctgcaacccggagttgaaccatgccgtcgcgtga

SEQ ID NO: 495295 - DNA, 2109 bp, Stenotrophomonas maltophilia
gtgagcgcccagccctccgccggcttcaacacccgccgcgccctggaaatgatccgccagggccttggcgcgccgctgatcgtgctggccctgctggccatggtcgtggtgccgctggccgcgccggtgctcgatgcgctgttcaccttcaacatcgccatctcgctgatggtgctgctggcggtggtctacgtgaagcgcccgctggacttcaccatcttcccgatcgtgctgctgatcaccaccatgctgcggctggcgctgaacgtggcctccacccgcgtgatcctgctgaacggccagaacggccatgatgccgcgggcaaggtcatcgccgccttcggtgaattcgtgatcggcggcaactatgcggtcggcatcgtggtgttcgcgatcctgaccatcatcaatttcgtggtcattaccaagggtgccggccgcgtttcggaagtgaccgcgcgcttcatcctggacgcgatgcccggcaagcagatggcgatcgacgccgacctcaacgccggtttgctgacgcgtgaagaagccaagctgcgccgcgaggaagtgcgtgaggaagccgacttctacggtgcgatggacggcgccagcaagttcatccgcggcgatgccattgccggcatcctgatcctgttcatcaatatgctcggcggcctggccgtgggcgtgctgaagcatggcatgccgttcggcgaggccgccgccacctacaccctgctgtcgatcggtgacggcctggtagcgcagctgccggccctgctggtctccagcgccgtggccatgctggttacccgcgcctcacgctcgcaggacatggcccaggccatgaccggccaggtgttcggccagtaccgtgcgctggcgatcaccgccggcatcatcggcgtggtcggcctggtgccgggcatgcccaacgtcgccttcctgacgctggccgcgatcctcggcttcatcgcctggaagctgtaccgcaagggcaaggcgccggctgccgatgcggcaggcggtggcaccgatgccgccgcactcaacgcactcggccgcccggccgcaccggcaccgactgccgaactgagctgggacgaactgcgcccggtcgatccgctgggcctggaggtcggctatcggctgatcccgctggtggacagcaaccagggcggcgaactgatggcgcgcatcaagggcgtgcgccgcaagctgacccaggatgtcggcttcctgatcccgtcggtgcacatccgcgacaacctggaactgccggccaacggctaccgcgtgctggtgcacggcgtgccggtggccaccgccgagatccaccccgaccgcgagctggcgctggacccgggcagcgcgctcggcgcgctggaaggcatcgccggcaaggaccccgcgttcggcctggacgccacctggatccagccgcaccagcgcgcccaggccgaaacgctgggctacaccgtggtcgatccggccaccgtggtcgccacccatctgtcgcacctgatccgtgagcacgcgccggaactgctcggccacgaagaagtgcagcacctgctggccaacctggccaagagcgcgcccaagctcgtcgaagatctgacgccgaaggcgttgccgctgtcggcggtggtgcgcgtgctgcagaacctgctggtcgagcgcattccgatccgccagctgcgcaagatcgccgaggcactggtcgaacatgcgcccagcagccaggacccggccgtgctgaccgccgctgttcgcaccgcactgggccgcttcatcgtgcaggagatcgccggaatgtcggcggagctgccggtgttcaccctcaacccgcaattggaacgtgtcttgcaggagtccacgcagggcaacggcgccgcgctggaacccggactcgctgagcgactgcaccagagcctggccgaatgtgtcagcaagcaggaagcccgcaacgagcccgcggtcgtgctggtacctggcccggtgcgcgccgcgctggcccgcctggtccgccacagcgttccgtcgctgtcggtcctggcctacagcgaggtgccggaggacaagcgcctgaagctggtcggaacgatcagctga

SEQ ID NO: 495296 - DNA, 1131 bp, Stenotrophomonas maltophilia
atgtccgagaacgaatccgccggcgaaaagaccgaacaaccgaccgaaaaacgcctgcgcgatgcccgtgaacagggcaacctgccgcgctcgcgcgaacttggcaccgccgccgtgttcggcgccggcgtgctggcggtgatggccatgagcggctcgatcggccgtggcgccacggcctggatgaagcacgcgctcagccccgaacagagcctgcggcagaacccgaaggaactgttcggccacttcggcgacctgctgctgcagttcatgctggtgatcgcaccgctggtgctggtctgcctgctggccagcttcgtcgccccgctggtgatgggcggcctgcgctggtcgcagaaggcgttgctgcccgacatcaaccgcatgaacccgatgagcgggctcaagcgcctgtatggcccggaggcgattgccgaattcaccaaatcgctgctgcgcgtggccttcgtcggcgtcgccgccgggctggtggtctggaccggcttcgacaccctgcgcgggctgatccaccacccgctggaaaccgccatcaccgatggcctgggcttcaccctgcgcctgctgctggccaccgccggcgcgatgctggtgctggccgccatcgatgcgccgtaccagcgctggaactggatgcgcaagctgaagatgacccgtgaagagctgcgccgggaaatgaaggaaagcgagggcagccccgaggtgaagggccgcatccgccagctgcagcagcagatggccaaccgccggatgatggaagcggtgcccactgccgacgtggtggtggtcaacccgacccactacgcggtggccctgaagtacgagggcggcgccatgaacgcccccaccgtggtcgcgctgggcgtggacgaaaccgccctgcgcatccgtgaagtggccgacggcaacaaggtggcgatcgtctccgccccgcctttggcacgcgccttgtatcgggaaggccaactcggaaaggaaatccccgtgagactgtattcggccgtcgcccaggtcctgtcctacgtctaccagctgcgcgcctggcgcactggcccgatgccggacgccccgcacatccaggtggatgaattcggcaagggaggccgcccgtga

SEQ ID NO: 495297 - DNA, 2247 bp, Stenotrophomonas maltophilia
gtggccctacgcaccacccttgccggcctgttgctggcccttcctgttggccacgccaccgccgccgatctgccgtggtcattgccagccgatgcttccccggcccaggtcgacgctgccctgcgggccctgggcaagggcgtgctggagtcccccagcctgaccgatgcacagcgcggccacgcgttgctcgcgacaggccagacggccgaagcgcggcaatcgatccagcaggcgcgggcatcgctggcaagcgacggtgataccgcggcgatgcagcgctgggtgcccatgctgctgctcgccaccgccggcgagcgggacacggctgcctatgtccgcgccttccacagcaccttcgctgccctggacgacatcgccgcggtgcaggccgatgccgcgctctcggttgagccggccccggtgcgcgcccaactggagcaggccatcgcggcgcaggcgggggccgcgaccgtcgccgaggccatcgccctggaactgctgcgcctgcgggcggtactgcgtgcacagagccttgccgccgcactggcccctccgctggtcgcggcggaggagcagcgccgcttcgccatcgacgacgcattgcgcatccccgttggcgatggcgtcgtgctgtcggcgcagctggcccgccctcgcgccgcatcggtacccctgccgacggccatgctgttcaccatctacaccgatccacccaagaaccggcagaagatgctgctggccgctgctcatggctacgccggcatcgtggtcgatgcgcgcggcaaaggccggggcaccggcaccatcgcgccctacgaacatgacggcgcggacgccaacgcggccatcgactggatcagccaccagccatggagcgatggccgggtcgccatgtatggcggcagctacgagggcttcactgcctgggcggcggcgcgccatcaccatcccgcattgaagaccatcgtgccctacgttgccgccatccccggccagggcctgccgatggagaacaacgtgttcctgagtgccaactatggctgggcgttctatgtggccaatggcccgatgctggacaacgacacctacgaccaggacgagcgctggtcgcagctgccgcgccgctggtatgcctccggccgcccctaccggcagatcgaccaggtcgatggcacggccaacccgtggctgcagcgctggctggcccatccgtcctacgatgcctactggcaggcgatggtcccctatggcgatcagttcaacgacatccgcatcccggtgctgaccatcaccgggtactacgacgatggccagatctcggccctgaagtacttcaaggagcacctccggcaccgtcccgatgccgaccatgcgctgctgatcggcccctacgaccaccgtggcgcgcagtcggcgctcaaaccgatgcagctgcgcgattacgcggtcgaccctgccgcgcagttcgataccccggcagtcaccttccagtggctggaccatgtgctgcgcggcgcgccgcgccctgcgctggtgcctgaccgcgtgaactaccagctgaagggcgccaatcgctgggggcatgcggcaacgctggacgccgccgcgggtgcccatcgccgctaccacctgtcggccgcacccgcttcggccgatggctaccaccgcctgcaggaacagccgccagcgccgggccagctggagcagaccgtggacatggccgaccgcaacgaaatgcggcacggctactacccgttccccatcgtcgcagcacaggatgaagccgacaccgcgctggcctatgtctcggaccccttcaccggaccgatggatctggtgggcagcttctccggtgacctgaaggtgcggatcaacaagcgcgacttcgatttcaccgtcaccctgtacgagctgctcgccgatggacgccgcatgcagctgtcctattacatgggccgggccagccacgtacgcgaccccaccacgcgccagctgctgcagccaggccaatggacccacctgcccttcgatcgcacgcgcatggtcgcccgccgcctggcggcaggcagccgcctgctggtgaaggtggatgtgctgaaggacgccatgcatcaggtcaaccacggcaccggccgcgatgtcagcgacgaatcggccgctgatgcgggcaccccgctgcaggtggattggcacagcgacagtgttctgacgattccgctgcaggcggtaacgccgggcggatga

SEQ ID NO: 495298 - DNA, 2136 bp, Stenotrophomonas maltophilia
atgctggtaggcacgtacaacccgtggctggtggcgatctcgctgctggtcgccgtgatggcttcatacaccgcgctggcgatggccgggcgcacggtgaccgcaccgggcaggggcgcggcctggtggtggcggctgggcggcggcttcgccatgggcctgggcatctggtcgatgcatttcatcggcatgctggctttcgacctgcccattccattgggctacgaccttcccatcaccctgctctcgcttgcgcttgccatcgcctcatcggtgttcgcgctgtggctggtctcgctgcgcaccctgccccacccgcgattggcggtcggcgccctgctgatgggcaccggcatcgccggcatgcattacgttggcatggctgcaatgcgcatgcagccgggcatcgactacgacccgggctggctgctgttctcgctgatggtggcggtggctgcctcctggaccgcgctgtacgtggcgttccgcctgcgcgcgcagcgcacccgcatcggtgatcgtcttgcagcggcgggcctgctcggcctggccatcgtcggcatgcattacaccggcatggccgctgcgcgcttcccggaaggcagcgtctgcggtgcggcggtcggcgatggcctgcagaacgagtggctggcgatgctggtggtagtgctgaccgtggcgatcctggccgtggtgctggtggtctcatggctggaccagcgcgtggaagcgcaactgctgcggctgcgcaattcgatgctgagcacctcgttgaccgacgcgcagcaggaactgacccaggccgcgctgcacgatccgctcacccgcctgcccaaccgcctgctgctgcagcggcgcatcgtgcaggcactggccgaggccgaacagggcggcaaccgcttcgcggtgatgttcatggacctggacggcttcaagcaggtcaatgatgcctatggccatcaggccggtgatgcgctgctggtggcggtggccgaacgcacccgccagctgctgcgcccgcacgatatgctggcacggctgggcggcgacgagttcgtgctggtggtgcgcatcgagcacgacgaggacctgccgaccctggcccggcgcatcctgcaggcggtgggcagcggcccgttgctgccggacaacgaactgcaggtgaccgccagcatcggcgtggcgatctgcccggaccacgccgccagcgagcgccagctgatggccttcgccgatgcggcgatgtaccaggccaaggagtccggacgcaacgccttcgtgctgttcgccgactggatgaacgacagcgccgagcagcagttccggctgctggccgacctgcgccgcgccatcggcagcgagcagctgttcctgcactatcagccgaagatccgcgtggccacgcagaaggtggccggcgccgaagcgctgatccgctggcgccatccggaacacggcctgattccccccgaccgcttcatccgcctggccgagcgcagcggtgcgatcaacgagatcgggcgctgggcgctggaccaggcctgccagcagctgcggcgctggcacgacgccgggcatgaaagctggtcgatgtcggtgaacctgtcgccggtgcagttcagttcgccgcaccttctgcaggatgtgcgcgaggtgatcgagcgccatggcattgccccgcgccacctggtgctggagatcaccgaaagcaccgtcatgcgcgataccgataccagtcttcgcctgctgcaggcgctgtcggcgctgggcgtgggcatctccatcgatgatttcggaaccggctattccagcctgctgtacctgaagcggctgccggccaccgagatcaagatcgaccatgcgttcgtgcgcgacctggaacacagtgccgaagacgtggtgatcgtctcggcgatcgtggcgctgggccatgcgctggacatggacatcgtcgccgagggcgtggagaccgccgcgcagcgcgcctacctggaacgcctgggctgcgacttcctgcagggatacctgctgggccgcccggtcgacgcggcgcgcttcatgcagctgcacgacctgccgcggccgcgggtggaactggcacagagcccgccgcccagcggcaacgctcccctgtag

SEQ ID NO: 495299 - DNA, 792 bp, Stenotrophomonas maltophilia
atggatgccgcgacacagatggcggccgacggcctgcaggccttcggcatgatcggcaccgtgctgtggaccatgctgcgcatcggcgcggtggccatggccatgcccatggtcggcacgcgtgcggtgccgtcgcgggtgcgcgtggtactggccggcaccctggccattgcactggcaccgctgctgccaccggtaccggactggaccggcttcgacgcggctacggtgctgaccatcgcgcgcgaactggccatcggcgtttccatcggtttcatgctgcggctggtattcgaagccggtgcgatggccggcgagctgatcgcgcagggcaccggcctggccttcgcgcagatgagcgacccgctgcgcggtggcacttcgggtgtgatcggccagtggttctacctgctgttcggcctgctgttcttcaccgccaacggccacctggcgttgatttcgctgctggtcgacagctaccgcgcactgccgatcggcgccccgctgccggacccgcacgccttcttcagcatcgccccgaccttcctgctgaccgtgctgcgcggcgcgctgacgctggccattccgctcactgtggcgatgctggcggtgaacctggccttcggcgtactggcgcgtgccgcccctgcgctgaatccgatccagctgggcctgccggtctcgctgctgctgggcctgttcctgctggccctgctggccggggaaatggggccgccggtacagcgcctgttcgacgccgccttccaggctgcggacgcggtcacacactga

SEQ ID NO: 495300 - DNA, 270 bp, Stenotrophomonas maltophilia
atgtctcccgaacttgccttgaccgaactgcgtggcggcctgatcaccgtgctgtgggtggccggcccgctgctgctcaccgtactggtggtcggcgtggtggtcggtgtcgtgcaggctgcaacccagctcaatgaaccgaccatcgccttcgtcgccaaggcggcggcgctgaccgcagtgctgttcgcgctgggcagcctgctgatcggccacctggttgaattcaccacgctgctattccagcgcattccgcacctgatcggctag

SEQ ID NO: 495301 - DNA, 780 bp, Stenotrophomonas maltophilia
atgcgtgtcacccgtacccgtgttgccaccctgatgccgtggctgctgttgcttgccctgtgcctgttgccggcgctggcgttcgccgcgcccggcgccccggccaccccgctgccggacgtcaacgtcggcaagatcggcggccagccggtcagcctgccgctgcagaccctgctgctgatgaccgcgatcaccctgatcccgtcgatgctgctggtgctgacctcgttcacccgcatcatcatcgtgctgggcctgctgcgccaggcactgggtaccggccagacgccgtccaaccaggtactgctgggcctggccctgttcctcaccgcgatggtgatgatgccgacctgggacaaggcgtggagcacgggcatggcgccctatctcaacggcgacattgacttccagaccgcctggacattgaccacgcagccgctgcgcgggttcatgctggcgcagatccgcgagaccgacctgatgaccttcgccggcatcgccgggcacggcacctacgccagccccgatgcgatcccgttcccggtgctggtcgcctcgttcgtcaccagcgaactgaagaccgctttcgagatcggcttcctgatcttcattccgttcgtgatcatcgatctggtcgtcgccagcgtgctgatgtccatgggcatgatgatgctgtcgccgatgctggtgtcggcaccgttcaagatcctgctgttcgtgctggtggatggctgggtgctgaccgtgggcacgctggcggccagcttcaatcccgcgtga

SEQ ID NO: 495302 - DNA, 420 bp, Stenotrophomonas maltophilia
ttgagcctgctggcctccaccctgctggcggtcggcaacaccgcagcgccgatcggcccgcaggtcggccagcacgcggccgccgcacccagcctgttcggtgcggtgctggcgctgctggcggtgctggcgctggtgatcggcctgggctggctgctcaagcgcatgcccggcagcggcttccgcccggccgaaggcatgaagctggtggccagcctcagcgtcggcgccaaggagcgcgtggtggtggtggaggtcaacggccagcaattgctgctgggcgtcactgccggcggcatcaacaccctgcataccctgcccgaaccgttgccaccaccggcgccggtgcgcgtgccggacttcaagaacctgccgaatttcgcccagctgctgcagcagcggctgcgcaaggacccctga

SEQ ID NO: 495303 - DNA, 336 bp, Stenotrophomonas maltophilia
atgaacgatatcgacgccctcgaaccgaccccggcccagttcagcagcctgcaggccgacgaggccaacggtccggacctgaatctggacgtgatcctcgatgtgccggtgaccctgtcgctggaagtcggtcgtgcccgcctgccgatccgcaacctgctgcagctcaaccagggttcagtggtggaactggagcgcggtgccggcgaatcgctggacgtgttcgtcaacggcaccctgatcgcccatggcgaagtggtggtgatcaatgaccgcttcggcgtgcgcctgaccgacgtggtcagcccgagcgagcggatccggagactgcgttga

SEQ ID NO: 495304 - DNA, 1005 bp, Stenotrophomonas maltophilia
atgaatgatctgctgtcccaggacgagatcgatgccctgctccacggcgtggacagcggcgcggtcgagaccgatgcggaacccccgtcaggcgaagcgcgctcgtacgacttcgccagccaggaccgcatcatccgtggtcgcatgccgaccctggaaatggtccacgagcgcttcgcgcgcctgtggcggatcggcctgttcaacctgatccggcgctcggccgagctgtcggtgcgcggcatcgaactgatcaagttcaacgactacatgcactcgctgtatgtgccgaccaacctgaacctgatccgcttcaagccgctgcgcggtaccggcctgatcgtgttcgagccgaccctggtgttcgccatcgtcgacaacttcttcggcggcgacgggcgctacccgacccgcatcgagggccgcgaattcacggccaccgaaatgcgggtgatccacctgctgctgaagcagaccttcgccgacctgcgcgaagcgtgggcaccggtgatggacgtcgacttcgagtacatcaactcggagatcaacccgcatttcgccaacatcgtgaccccgcgcgagtacgtggtggtgtgccgcctgcacgtcgagctcgacggcggcggcggtgacatccacgtcaccctgccctactcgatgctggaaccgatccgcgaactgctcgacgccggcatccagagcgaccgcaacgaccgcgacgagagctggggcaagaccctgcgcgagcagctcaacatcgccgaagtcaccctgtccagcgtgctggccagcaagcgcatgaccctgcgcgacctgacccagctgaaggtcggcgacatcctgccgatcgagctgagcccgcaggtgccgctgtgcgtggagaacattccggtgttcaccggcgagttcggcatcgccaacggcatgaacgccgtgaagatcaccgctacccatccgccgggcacccgcccgcgcgtacccgtcatccaggaagacccgcaatga

SEQ ID NO: 495305 - DNA, 516 bp, Stenotrophomonas maltophilia
gtggccgcagccgctgacaaaaccaagaagaccgccgagaaggacaaggccgccaagccgcgtagtccgatcctgatcaccgcactggtggccgtactggccgccgctgccgctggtggcggcgtgtggttcttcacccagtccaagcacgaagagaagaccgcgcaggcgccgaagaagagcgcgacgccggccccggcacagtacttcgcgctggacccggcgttcgtggtcaacctcaatggcccggtcgacggcccgcgctacctgcagctggaggtccagctgatgacccgcgacccggccgcgctggaagcgatcaagacccatgccccggccatccgcgcgcgcctgctgatgctgttctcgcaggtcagcccggaccagatcgccgatgtcgccggcaagcagaagctgcaggccagttcgctggccgaggtgcagaaggtgctcaaggccgagaccggcagcaacggcgccgacgatctgctgttcaccagcttcgtgacccagtaa

SEQ ID NO: 495306 - DNA, 1170 bp, Stenotrophomonas maltophilia
atgcccgccccgctcgccagcagcgccaacccggccccgcccgccaccagcaacagtgccgcgcgcgccgcgcgcagcgaaggcgcaaaggacttcagccagctgctgcagggcggtgcgccctccgcgcccgcgcctgcgggcagcgctaccacaccgacgccgtccacgcccagccagccatcgaccgccgacagcaatggccaggcaccgggcgaacgcagcgcggacgcggaagcggcaactgccgaaacgccgccgctaccgcccgttgccctgcccccggctggacccggcaccgacaaggacaagcccgccgcgaccgaggacgccccgtggccaccgatcggcctggccggcctggtgctggcgatgccgacgcctgccgatccggccgtcgctctggcgggcagcgctgcaccgtcactggccagcgacggtacggcgctatccaccactgcccccgccgcgaccccgacactgcctgcagccgcgccggcagcggcaaccgcagcccccgtggcggccgacggcaaaccggcggcgaccagcgcggaggatgccaccgcgctgccattgccggcgatgatcctgcccggcaagcgcagcgagcgcggcgaaggcagtgacgtggccgccgttggcgaccgcgcaaatacaccgttgctgcacgcaccggcagccgccgccgtgcaggacctgaaggcggcgctcgccaccggcaacgcgatcttcaatggcgaacccacgcccaagcccgtgctgggtgacgatggcttcgaccaggccatcggcgcacgcctgggctggctggccgaccacaagatcggccatgcccacatccgcctgagcccggacgacatggggccggtcgacgtgcgcctgcagttgaacggcgacaaggtgcatgccagcttcagcagcccgcacgtggacgtgcgccaggcactggaaagcagcctgccgcgcctgcgcgagctgctgggcgaacagggcttccagctggctcacgccgatgtcggccatcacgcgtctggtggtgacggcaatgcgtcgggacaaccgggtggcggcggcatgaccggcgacggagaaccgacgccgggcgatgccagcgtgtcgtccgcgcagttgatccaccagcgcggcttgctggacgcctacgcctga

SEQ ID NO: 495307 - DNA, 468 bp, Stenotrophomonas maltophilia
atgaaccagtccaagcgcatcgatcccctgctcaagcgggcccaggaacacgaggacgcggtcgcccgcgacctggccgaacgccagcgcgtgctcgacacccatctgtcgcgcctggacgaactgcgccgctatgccgaggagtacgccaacgcccagatggcagcgaccagcccggcacagctgctgaaccgccgcgccttccttgatcgcctggacagtgcggtcgagcagcagcaggccacggtcaacggcaaccgcgaaaaagtggaggccgagcgcgcgcggctgatcctggccagccgtgacaaggcggtgctggagcagctggccgccagctaccgcgcgcaggaaaaggtggtgaccgaccgccgcgaccagcgcgagatggacgacattggcgcgcggcgcgcgcgcctggtgcaggccgaagaccaggacggcgccgagcagggaggccgcccgtga

SEQ ID NO: 495308 - DNA, 1386 bp, Stenotrophomonas maltophilia
atgagcgccgcaccgcaaacgacgccgccgccggccgactgggccgtggcccgcaacctgcgcctggcccggcgcctggacggcctgcgcgtggataccgcgcatggccgtgggctgatccgcgagggcgtgctgcgccgcgcggtcgggctcaccctggaagcggtcggctgcgaggcgccgctgggcgccagctgcaaggtggaagtggtcgatggtggctgggtcgatgccgaagtggtcggctttgccggtgagcgcacctacctgatgcccagcgccgaactgcacggcctgctgcccaacgcccgcgtggtaccgtcggcgcggcgtggcggcgtggaagtgggtgaaggcctgctcggccgcgtcatcgacagcgacggcgtgccgctggatggcaagggcccgatccgcgcagaagggcatgtcggcatggccggcgtgtcgatcaatccgttggcgcgtgaaccgatcacccagccgctggacgtgggcgtgcgcgcgatcaacgcgctgttgccgatcggccgcggccagcgtgtcggcctgttcgccggttccggcgtcggcaagtcgacgctgctgggcatgatgacccgctacaccgctgccgacgtgatcgtggtcggcctgattggtgaacgaggccgcgaagtacgcgatttcgtcgagaccacgctgggcgaggaaggcctgcgccgcgccgtggtggtggccagccccgccgaccggccacccttggcgcgcctgcacggtgcctaccgtgccaccgccatcgccgagtggttccgcgaccagggcctgaacgtgctgctgctgatggactcgctgacccgcttcgcccaggcgcagcgcgagatcggcttgtcggtcggtgaaccaccgaccacccgcggttacccgccctcggtgttcgccaagctgccggcgctggtcgaacgcgctggcaacggcgcaaagggccgcggctcgatcaccgcgttctacaccgtactgaccgaaggcgatgatccgcaggatccgatcgccgacgccgcacgcgcgatcctcgacggccacatcctgctctcgcgccgggtggccgacagcggcctgtacccggccatcgacgtcgaatcgtcggtcagccgcgtggtcacggaaatcgccgacgagccgtggcgcctgcgcatccgcaagttgaagcgactggtcgcggcgtactcggccaaccgtgacctgatcgcgatcggtgcctaccagcgtggtaacgacgcggccaccgacgaagccctggaacgctggccggaaatcatggagttcctcggccaggacgttgccaaggccgcagatctcccgcacagccaggcggcgctgcagcgcctggtggaacaagagagttaa

SEQ ID NO: 495309 - DNA, 642 bp, Stenotrophomonas maltophilia
gtgagcaacgtcgtgcgctggcttgccccggacctgctggcccagcccgaaccggcgctggagcaggaggacgcgttcgaactcaccgagccggacccggaacacgaaccggagccgccgctgcagctgccgaccctggaggaaatccaggcgatccaggacagcgcggagaaggaaggattcgatcagggccatgccgaaggctacggccagggccaggcggaggtgcgtcgcctcgccgcgcagatcgaaggcatcctcgacaacttcagccggccgctggtgcggctggagaacgaagtggtcggcgcccttggtgaactggcggtgcgcatcgccggcgcgctggtcggccgcgcctacgaggccgagccggcactgctggcgcagctggtcggcgaagcgattgacgccgtgggcggcagcacccgcgaggtggaagtgcggctgcacccggatgacatcgccgcgcttgccccgctgctgaacctgtcgccggcgcagcgcctggtaccggataccagcctcagccgtggcgacctgcgcgtgcacgccgaagccgtgcgcatcgacggcaccctggaggcccgcctgcgcggtgcgctggatgcggtgatccgccagaccggggcgacggcatga

SEQ ID NO: 495310 - DNA, 1002 bp, Stenotrophomonas maltophilia
atgactgaggccgcactgactggcgtgcagcgcgccgccgtactgctgctttcgctgggtgagctggacgcggccgaagtgctgcgccacatggagcccaaggaggtgcagaaaatcggcatcgccatggccaccatgaccgacatcacccgcgagcaggtggagcgggtgatggaccagttcggccaggagctgggctcgaagacctcactcggcgttggctcggacgactacatccgcaacatgctggtgcaggcgctgggcagcgagaaggccggcaacctgatcgaccgcatcctgctcggccgcaacaccaccggcctggacgcgctgaagtggatggacccgcgtgcggtggccgacctggtgcgcaacgagcacccgcagatcatcgccatcgtgatggcgcacctggaaaccgaccaggccgccgacgcgctgaaactgctgccggaccgtacccgcgtggacgtgctgctgcgcatcgctaccctcgacggcattccgccgaacgcactcaatgaactcaacgagatcatggagcgccagttcgccggcaaccagaacctgaagtcgtcgaacatcggtggcgtgcagtgcgcggccaacatcctgaacttcatggacagcggccaggaccaggcgatcctgggcgagatcgcccgcatcgatgcgccgttgagcaaccgcatccaggacctgatgttcgtgttcgacgatctggtcgacctggacgaccgcgagatgcagctggtgctgcgcgaggtgagcggcgagcgcctgggcctggccctgcgcggcgccgacatcaaggtgcgcgacaagatcacccgcaacatgtcgcagcgcgcggccgagatcctgctggaagacatggaagcccgcgggccggtgcgcctgtccgacgtggaaggcgcgcagcgcgagatcctggccatcgtcaagcgcatggccgatgaaggcaccgtcaccatcggcggcagcgcggaggccatgctgtga

SEQ ID NO: 495311 - DNA, 1647 bp, Stenotrophomonas maltophilia
atggcactgacgctctccaaggacagcctgaacgccgagaaggccgggcaatggttcgaccgcctgcagagtctgcagatcacccgtcggctgggcctgatggcgatgatcgcagtggcggtggcggcaggcctgtccgtgttcttctggtcacagaagccgggcatggtcccgctgtacaccggcctggaccagaaggcgaccgctgaagcgaccgacctgctgcgcgccgcgcagattccgttcgcgctcgacccggccaccggtggcatcaccgtgccggaaaagaacctgcacgatgcccgcctgaagctggccggctccggcctgaccgacagcggcaagctgggcttcgagctgatggaacgcgacccgggcttcggtgtcagccagttcgtggaaagcgcgcgctaccagcacgcgctggaaaccgagctgtcgcgcaccatcaacacgctgcgcccggtgcgcgattcgcgcgtgcacctggccattcccaagcccagcgcgttcacccgccagcgtgacgtggccagcgcctcggtcaccctggaactgcgtggcggccagcagctggaacgcagccaggtcgacgccatcgtgcacatggtcgccgccagcattccggacctcgcgccggaacgggtgaccgtggtcgaccagagcgggcgcatgctcagcatcaccgacccgaacagcgaggcggcggtcaacgcggcccagttcgagcaggtgcgccgccaggaaacctcgttcaaccagcgcatccgcgaactgctggaaccgatgaccggccccggccgcgtcaatccggaagtgagcgtggacatggatttctcggtgaccgaggaagcccgcgagctctacaacggcgagccgcagaagctgcgcagcgagcagatgagcgagaacaccaccagcacgccgggcccgcagggcgtgccgggcgcgaccagcaacagcccgccgggccagcaggccgcaccggccaccgcgcaggccccgaccgaaagcagcaagaacgccacccgcaactacgagctggaccgcaccctgcagcacacccgccagccggccggccgcatcaagcgcgtctcggtggcggtgctggtggacaacgtgccgcgcgccggcgccaacggcaagatgagcccgcagccgctgtcggctgccgaactgacccgcgtcgaagcgctggtcaagcaggccgtcggcttcaacgccgagcgtggcgacaccgtgtcggtgatgaatgccccgttcgtgcgtgacaccacgccggtcgaaggcccgtcgtggtgggagctgccgtgggtgcacgatgccggccgcatgctgcttggcgcggtggtggtgctggcgctgctgttcggcgtgctgcgcccggcgctgcgcgcgatcaccggccagagcaggaagaacgacgaacaggcactcgagccgcataccgcggacgtgcagctggtcgatgacgatggcatgccgctgccggcgctgggcgctgaccgggccagcctgggcgggccggaagcactggccctgccggtggattcatatgaggaacgattgcggatggcgcgtgaagccgtgaagaccgactccaagcgcgtggcccaggtggtcaagggttgggtggcaaatgactga

SEQ ID NO: 495312 - DNA, 366 bp, Stenotrophomonas maltophilia
atgtcccactccgtcacttcgatcctttcgcagatccgctcctatcagacccagatgggacagccggcgctcaacccgctgggcgaaacgccgcgcagcaatgccctgccgggcacggtgctggatgcgccgcaggcgcagccggccagcttcaccgaaaccctgcgtggtgcgattgccggcgtcaacgacgcgcaacagaaatccggcgccctcgccaaggccttcgaaatgggcgaccccagcgccgacctggccaaggtgatggtcgcctcgcagcagtcccagatcgccttccgcgccaccgtggaagtccgcaaccgtctcgtccaggcctaccaggacgtgatgaacatgccgctgtaa

SEQ ID NO: 495313 - DNA, 174 bp, Stenotrophomonas maltophilia
atgtgcgtgcggggttgcaccccgcgccccgcggtagtgccggccgctggccggcaacctcaacggcaacggcggaagccgaagccgaagccgaagccgaagccgaagccggagccggagccggagccggagcaacagcaacagcaacagcaacagcagaagcgggtctactga

SEQ ID NO: 495314 - DNA, 417 bp, Stenotrophomonas maltophilia
atgcatcacctgatcctgctcgccgtcctgctctgcccggccctggccaccgcggccaactgcacactgcccgccgcgctcgaccaacgccggttcaccaacctcagcgacccgttgtacgcgccggacaaccccaacgccggacgcatggtgcagctcagctttgctggcagccagtacgtgctggacatcctcggcaccgacctccgcatcggcggcagctaccgctaccagcgcctggccccgcatatcgcggaaatccagatgaccgaggcccacccggccggccccgcccactacaccctgctgctgacctgccagagcgaccgccagggccgcttcatctacacccagcatgacggccccatcgcaccgcgccagcgccagaattccggccgatggaccctgcagccatag

SEQ ID NO: 495315 - DNA, 1506 bp, Stenotrophomonas maltophilia
gtgagcgaatcgcgcatcctggtgctggacaacgacgccgtgcgcgcagagcgcaccgttgccctgctggaattcatggacttcaacccgcgctgggtgtccgacgcggccgacttcgacctgggccgccagcgccagaacgactggatggcggtgatcgtcggcagcctggacgacagcgccgccagtaccgcgctgtaccactggctgggcggcagcagcctgccgccgccggtgctgctggccgatggtgatgctgcagcgtttgcccagcagcacggtctgcacgaagccaacatctggccgctggaaacgccgctgcgccatgcgcagatggaagccctgctgcgccgcgccagcctcaagcgcctggatgccgagcaccaggccggcgccgcgcaggatcaaggcccgaccggcaacggcccggcggtcaccgcgctgcgcaccatgatcgagcaggtggccgcgttcgacaccaccgtgctggtgctgggcgaatccggcaccggcaaggaagtggtatcgcgcgccatccaccagcgctcgccccgccgtgatggcccgttcgtggcgatcaactgtggcgccattccggccgacctgctggaaagcgaactgttcggccacgagaagggcgccttcaccggcgcactgaccgcgcgcaagggccggtttgaaatggccgagggcggcaccctgctgctcgacgaaatcggcgacatgagcctgccgatgcaggtgaagctgctgcgcgtgctgcaggaacgcagtttcgagcgcgtcggcggcaaccagaccatccgctgcaacgtgcgcgtggtggccgcgacccaccgcgacctggagacccgcatcgccgagggcaagttccgcgaggacctgttctaccgcctcaacgtgttcccgattgacgtgcccgcgctgcgcgaacgacgcgaagacctgccggcgctggtggaaaccatcgccgcgcagctggcccgcaccggccgtggcgaagtgcgcttcaccccggaagccctgcaggccctggccggctacgagtggccgggcaacgtgcgcgagctgaccaacctggtcgagcgcctggcggtgctgcatccgggcggctcggtgcgcgtgcaggacctgccggctcgctatcgtggcgatgccacgctggcagcggtggccgcagcggcaccggcagcgccgattgccagcgaagaacgcctggacctgcgcagcttctcgttccataccccgggcagcggcggccagccggcgctggagcacggcatcgccgtcaatcgcacagccgccccggcggcactgcccgacgacggtctggacctgcgcaaccacatggccaacatcgaactgggcctgatcaacgaagcactggaacgcacccaaggcgtggtcgcccacgccgcccagctgctcggcctgcgccgcaccaccctggtggaaaagctgcgcaagtacggcatcgagcgcgagcaggccgaactggccggctga

SEQ ID NO: 495316 - DNA, 378 bp, Stenotrophomonas maltophilia
atgaacaagctcacggtcctgctggtcgatgaccacgagggcttcatcaacgcggcgatgcgccatttccgcaagatcgactggctgcagatcgtcggcagcgccggcaacggcctggaagcgatcgagcgctcggaaacgctgcgcccgcaggtggtgctgatggatctggccatgccggaaatggggggcctgcaggccacccgcctgatcaagtcgcaggacgatgcgccgtacatcgtgatcgccagccacttcgacgacgccgagcaccgcgaacacgcgctgcgcgccggcgccgacaactttgtcagcaagctgtcctacatccaggaagtcatgccgatcctggaaggcctcagggaggatcgatcgtga

SEQ ID NO: 495317 - DNA, 1410 bp, Stenotrophomonas maltophilia
atgaaggctgcactctcgacccagctgggccagcaactccacctcaccccgcaactgctgcagtcgatccggctgctgcagctcgatggcctgcacctggagcaggaaatccagcgcctgctggactccaacccgctgctggagatcgaggaggccgaagcgcccgctgctgaagccaccgaagcgagcgccaccaccctcgacaccgccgccttcgacgagctgcccgagccgtcgatgtgggatgtggccggtgccaattggcaggacggtgatgacgaccgcatggcacgcatcgccgccggcgagtcgaccgacccgcagctgcgcgtgctgcagcgcctggcgctggacatggacgaccatcagctggcggtggccgcgttctggctggaccactgcgatgaagccggctacctgcaggcgccgctggcccagctgcagctgctggccagtgcccagttcgacatcaccgccgacggcgtggaagccatccgccagcagctgctgcatggcgaacccgccggcatggccgcgcaggacctgcgcgaaggcctgcaggcgcagctgcgcagcctgcatggcgtggtgccggcccgccacctggccgcacgcattctcgatggcgcgctcgacgcgctcgcggcccacgactaccccgccctcgcccgccagcacgacgccgagatcgacgacgtgcgcgaggcggtgcgcctgatcctctcgctgcagccgcgcccgggcgacagcctgctgcccgaacgcaacgccgtggtggtgccggacgtggtcgcctggcacgctgatgggcagtggaaggtcgcactgaacccggccaccagccgccgcgtgtcgatcaacagccagtacgaacaggccctggccgagaccagcgacgccgccccggcactgcgcgaaatgctgcaggaggcgcgctggttcagccgcggcctgtcgatgcgctacgacaccctgctgcgcaccgcgcgggtgatcgtcgagcgccaggccgccttcctggtccgtggcgaagaggccatggcgccgttgaccctgaaggaagtggccgaggagatcggcatgcacgagtccaccgtctcgcgcatcaccaccggcaagttcctgcagaccccgcgcggcaccttcgaactgaagcacttcttcgccgtgcgcctggaaggcgccagcgtctccggccaggcggtgaaggccatggtccgccgcctgatcgacgccgaaccggccggccgcccgctggccgatgaggccattgccggcctgctgtcacgccagggggtgaacattgcccgccgaaccgtcgcaaaataccgagaacaactggatatcgccccggcccgcgaacggcgccggctcagcgccaggcaaccccagctggcccgggtgggctga

SEQ ID NO: 495318 - DNA, 639 bp, Stenotrophomonas maltophilia
gtgcctgtgcgagttctcatcgtcgacgatcacacccttgtccgcgccggcctggcgcggctgctgcaggggtttgccgacgtgcagctcgtggccgaggccagcaacgccgaacaggcactgcaactgtccctgcagcacgcaccggatgtggtgctgatggacctctcgctgccgggccgcaccggcctggaagcgctcagcgacatccgcctgcgtgcccccggtacccgggtggtgatgatgaccatgcacgacgatgccgcccacgtgcgcgatgcactggatcgtggcgcggtcgggttcgtggtgaaggacgccgcaccgcaggaactggaactggcactgcgggccgcgcacgccggccaggtgttcctgagcccgcagatctcggccaagatgctggcgccgatgctgggccgcgagaaacccaccggcatcgccgcactctcaccacggcagcgcgagatcctgcgccgcatcggcaagggcgagagcaacaaggaaatcgccgccgatctcggcatcagcgtcaagacggtggagacccaccgcgcacggatgatggaatcgctgggctgccgccgcgccaatgacctgctgctgctggccgcgcgccatcagcacgagctcgagtaa

SEQ ID NO: 495319 - DNA, 579 bp, Stenotrophomonas maltophilia
atgacctcgctgccgaccacctcgctgcatcacccggccgaaagcgagctgttcgacgagacgctcagctgcgaactggccctgccggccgagttccaggcgggcagcgcggccggccgcaccagcagcgccgaaggcctgctgcgcagcctggcactggtcgaggacagccgcggcgacgagcacgacgaacgcaacgaagccagcctgcagctgcagcgcctggaagccaagctggacctggcgatggtgctgctcggccggctggtgcgccagcagggccaggagctgaccctgcgcccggtgcgctggtcgcgccgtggcatccgcctgcagctgggcccgcgcagtggcgcaagccccggccaggccggcgtggtgcgcctgcagcccagcgattggctgcccgaccacatcgacctgccggtggaggtcgtcgcagaagccgccgacggtagcggcgggcacttcctgtggctgcgcttccagcgtttgggcgatggcctggagatggcgatggagcggcacctgttccgcctgcaccgccgccaggtggccgaggcacgccgcgcacgctga

SEQ ID NO: 495320 - DNA, 294 bp, Stenotrophomonas maltophilia
atgagcctgcaggaactgcatgcgcagctggatgccttcgagaaggcactgggcgaagaatccctcgaccaggccgacagcctgctcgacggccacgacagcaccctgcacgctctgctcagccagccgctgaccgctgcggaccacgcgccgctgagcgccctgttcgagcgccagcagagtctgctcggcctgctgcgccagcgccgtgatgccgtggccgcactgatgaacgacggccagcgctcccttcgcgcggcgcatgcctatctgcaggcagaatcgctggcatga

SEQ ID NO: 495321 - DNA, 417 bp, Stenotrophomonas maltophilia
atgtacggttccagccgtcaatatgccgagcagtaccgccaggtgggggtgaccagtgcggtcgccgatgccgatccacacaagctggtggcgatgctgctggccggcgcgctggagcgcgtgcgccgcgccctggccagccttgaacgcggtgaccaggccggcaagggcaaggcgatcggcgaagtctgcgcgatcgtcggccacctcaacggctcgctggaccatgaggccggtggcgagatcgccggaaatctgtcggcactctatgactacgtgctgcagcgcctgaccgaggccaacctgcacaacgaccgtgccgcgctggatgaatcgctgcagctgctgggcgagatcgacagcgcctggaacgcgatcccgcacgaacagcgccgcccggccgcggtggcgccatga

SEQ ID NO: 495322 - DNA, 1416 bp, Stenotrophomonas maltophilia
gtggcagactttggatacggtggcattggctcgggactggatatttccagcatcgtcaaccagctggtcgcagctgaccgcaagcccgccgacaatgcgctgaacctgcagcagtccaaggccaagatgcagttgtcgtcgatcggcaccatcacctctgctttcgacaagctgaagacggcgctgaccgcactgaaggccaccacggcgttcgacacgcgcacggtgaccgccagcaagggcggcgacaagggcaccgacgagatcctgacggcgtcggtcgcgctgtatgacgttggcaccaccaaggctgcggcctccaacggcacgcacgtggtcaatgtcacctcgctggcgacagcgcacaaactgatcgccgatacctcggtacccaagaccgacacgtttgctgccggaaccttgacgctgaccgttggcgtgggcgacaaggccaagaccatgaacgtggaggtggaggacggcgacacgctgaccaccatccgcaacaagatcgatgcggccggccgcaaggaaggcgtgcaggccgccctgatcagctccggcgacaaccagtacctgtcgatcgcccaggagaagaccggtgccgccaacgcgatcaagctcgaatacgccggcagcgacgccaaactgggcggcctggtcaacagcctcaagcagaacaccgccgccgccgacgccgagctgaccatcgatggtgtgaaggtcgtcagcgccagcaacaccgtggccgatgcggttccgggcctgaccctgaacctgaagatgccgggcaccagcacggtgaccatcagcacggacactgcggcagccaccaaggtgatgcaggagttcgtcaccgcctacaacgctgcactggccgccatcaacaccgaaaccaagtacgacgccaagaccaaggaagcctccacgctgaccggcgatgcgcagatgcgcggcgccaccagccagctgcgctcggtgatgtcgagcgtgctcaaggacctggccggtgacaagctcgatgccaaggcgatcggcctggatacccgtgggtatcccaatgccgacggcacgctgatcctggacaccaccaagttcgccgccgcactggccagccagccggagaagatgcgccaggcgatcaccggtgataccggcggtgccggcaagctgtacacgctggtcgacggctatgtcagcaccacggtcggcaaggaaggcgccttcgttgcccgcaccaagggcctgaacaccacgctggacaacatcgacaagcgccgcaaggacctcgacacgcgcatgaagagcgtggaagagcgctacaagaagcagttcctggcgctggacagcctgatgggcaagctgcagcagagcaacaccgcgctgcagcagcagctggcccagttgaaccgctga

SEQ ID NO: 495323 - DNA, 1179 bp, Stenotrophomonas maltophilia
atggcacaagtcatcaacaccaatacgatgtccctgaatgctcagcgcaacctgagcaccagcggcagctcgctggctaccaccatccagcgcctgtcctccggttcgcgcatcaacagcgccaaggacgacgccgccggcctggcgatctccgagcgcttcggcacgcagatccgcggtaccgacgtcgccatccgcaatgccaacgacggcatctcgctggcccaggtcgccgaaggttcgctgaccgaaatcggcaacaacctgcagcgcgtccgcgagctgtcggtgcaggcctccaacgccaccaactcggccagcgaccgcaaggcgctgcaggccgaagtgacccagctggtctcggaaatcgaccgcgtcgccaagcagtcggacttcaacggcaccaagctgctggacggcaccttctccagccagctgttccaggtcggcgccaatgccggccaggccatcgccatcgacaagaccatcgatgccaaggccggctcgctgggcacctcgaccttcgccaccggcgcgactgccgccctggctgccagcaccgacggcgcccgtttctccggcaccgtgatgggcgtggacatcggcacggttgaagtgaaggccggcgccaccacggccgatgcctccaaggccgtcgccaccgccatcaacgccaagatcggcgaggccggcatctacgccgaagccaatgccgacggcaccctgaagctgagctcggtgaaggaaggcaaggctgtcgccgccgccgatatcgccctgatgcgcagcgactacgacgcgaccgccaagacctggggcaccgcggcagctgcgggcgcctacactgccggcaccgatacctcggccaacgtgcagaagctggacgtgagcaccgtgctcggcgcccagcaggcgctggaagtggtcgacaaggccctgggtgcgatcaacagcacccgcgccgacctcggtgcgatccagaaccgcttcacctcggtcgtggccaacctgcagacctcgtcggaaaacctgtcggcgtcgcgcagccgcatcaaggacaccgacttcgccaaggaaaccgccgaactgacccgcacccagatcctgcagcaggccggtacggccatgctggcccaggccaaccaggtgccgcagggcgtgctcagcctgctgcgctga

SEQ ID NO: 495324 - DNA, 1185 bp, Stenotrophomonas maltophilia
atggcacaagtcatcaacaccaatacgatgtcgttgaatgctcagcgtaacctgagcaccagcggcagctcgctggctaccaccatccagcgcctgtcctccggttcgcgcatcaacagcgccaaggacgacgccgccggcctggcgatctccgagcgcttcggcacgcagatccgcggtaccgacgtcgccatccgcaatgccaacgacggcatctcgctggcccaggtcgccgaaggttcgctgaccgaaatcggcaacaacctgcagcgcgtccgcgagctgtcggtgcaggcctccaacgccaccaactcggccagcgaccgcaaggcgctgcaggccgaagtgacccagctggtctcggaaatcgaccgcgtcgccaagcagtcggacttcaacggcaccaagctgctggacggttcgttctccagccagctgttccaggtcggtgccaacgccggccaggccatcgccatcgacaagaccatcgatgccaaggccaacgccctgggcggcgccaagttcgataccaacgcgctggccctggccgacccgggcaccaacgctgatttcagcaccagcggcctgcagatcaatggcgttgccattgccgatgtctcggtcaagcagggcgccgacgccgctgccaccggcaaggcctcgcgtgaagcactggtgaccgcgatcaacgccaagatcggcgagaccggcgtgttcgcggaagtgaacggcaccgctggcgtgaccctgacctcggtcaaggacagcgtcaacgccgatggctcgttcaaggccatcaccgcgaccccgggcacctggaccggcgctaccgcgccgaccttcaccgcctcgacggccgcgccggccgccaagtacgccagcgacctggacgtcagcaccgtgaagggtgcccagcaggcgatggaaatcgtcgacaaggccctgggtgcgatcaacagcacccgcgccgacctcggtgcgatccagaaccgcttcacctcggtcgtggccaacctgcagacctcgtcggaaaacctgtcggcgtcccgcagccgcatcaaggacaccgacttcgccaaggaaaccgccgaactgacccgcacccagatcctgcagcaggccggtacggccatgctggcccaggccaaccaggtgccgcagggcgtgctcagcctgctgcgctga

SEQ ID NO: 495325 - DNA, 1218 bp, Stenotrophomonas maltophilia
atggcacaggtaatcaacaccaatacgatgtcgctcaacgcccagcgcaacctgagcaccagcggcagctcgctcgccaccaccatccagcgcctctcgtccggcctgcgcatcaacagcgcgaaggacgacgcggccggcctggccatcagcgagcgcttcaccacccagatccgtggtctggacgtggccatccgcaacgccaacgacggcatctcgctggcccaggtcgccgagggttcgctgaacgaagtcggcaacaacctgcagcgcatccgcgaactgggcgtgcaggcttccaacgccaccaattcggccagcgaccgcaaggccctgcaggctgaagtgacccagctggtcagcgagatcgaccgcgtcgccaagcaggccgacttcaacggcaccaagctgctggacggcagcttcaccagccagctgttccaggtgggcgccaacgccggccaggccatcgccatcaacagcgtggtcaacgccaaggccgattcgctgggcgcggccaccttcgccaacggttataccggcaccgcactggcggtggacaaggcgacggccgacaccacctactccggcctgcaggtctcggtcaccccgccgggcggcaccgccaccacggtgaccatcagcgacttcacggtgaaggccggcgaatcgatcacctcggccaccgcagcggcgatcaacaacaagctgggtgaaaccggcgtggttgcctcggtcaatgccggcgtcgtcagcctggcctcggtcaaggatggccagaccttcgccctgggtgtcagcgcggcgactccgccggccggcgccaccgccgcgaccctcgccggcctgggcctgaccgagaccagcaccaacggcggcaccctgaccggtgcagcggccagcttcgtcaaggacctgaacgtcaccaccgccgaaggcgcacagaaggcgatgtcgatcgtcgacaaggccctggaatcggtcaacagcgtccgcgccgacctcggcgcgatccagaaccgcttcacctcggtggtggccaacctgcagacctcctcggagaacctgtccgcgtcgcgcagccgcatccgcgataccgacttcgccaaggaaaccgccgaactgacccgcacccagatcctgcagcaggccggtacggccatgctggcccaggccaaccaggtaccgcagaacgtgctcagcctgttgcagcgctga

SEQ ID NO: 495326 - DNA, 1203 bp, Stenotrophomonas maltophilia
atgagcagccgcatctccaccagcatgatgttcaaccagtcggtgtcgctgatgatggccaagcaggccaagctcagccacctggagcagcagattgccaccggcagcaagatcgtcagcgccaaggacgatccggttgccgccggcactgcggtcggccttgaccgcagcctggctgcactggaccgcatgaagctcaatgccggcaacgtgcagaaccgcctgggcgtgcaggaaaacaccctggcacaggtcaacgacctgatggcacgcgtcaacgatctgaccatccaggccagcaacccggcgctgagcgcggcggacaagaagacgctgatcaccgaggtcaaccagatacgcgacggcctgctgtcgctggccaacgccgatgatggcaccggccgctacgtgttcggtggcaccaacgacggcgacccgccgtttgccaagatcaacggcaaagtggtctaccgtggcgaccagacccagcgccaggttgaagtcggtccggatacctacgtgaaggacgcgctgcccggcagcgagatcttcatgcgcattcccaccggcgatggcttcgtcgacggcagcgctgcggccggcaacaccggcaacggcgtgctcaccaacatcacccgcgacggcagcgacagctggaacggccagggcttcagcgtgcgcttcaccactggcaaccaatacgaggtggtggacggtgcgggcaacgtgaccggaaccggcacctacaaggccggcgacgatctggaagtgaacggtgtgcgcctgcgcatcaccggcgcaccggcagcgggcgacagcttcagcgtacaggccgcgagcagccgcgacatcttctccaccatggacaacctggtggcggcgctgggtgccgacaccggtaccaccgcgcagatgaccgcgcagcagaaccagctgcagagcgcactgcgcgacgtggcgcgcgcttccgagcggatgatcgattcgcgtgccgcaggcggtgcgcagttgaaggcgctggacaatgccgccgacatgcgcgaggccaatggcgtgaccctgaagaccacgctgtcgcagatgcgcgacctggattacgccgatgcgctgagccagtaccagctgcagagcaccgcgctgcaggcggcgcagacgatcttctcgcagatgcagtcgatgtcgctgttcaacaagctgcgctga

SEQ ID NO: 495327 - DNA, 1881 bp, Stenotrophomonas maltophilia
atgtccagcgtactttccaccggtaccggtgccctgctcgccttccagcgtgcgttggcgaccaccagccacaacgtggccaacctcaatacgcccggctacagccggcagaaggtcaacttcgctaccgccgacccgcagaactacggctatggcacggtcggcaacggcacccggatcactgacatccgccgcacggccgaccagctggcgatctcgcgcctgctcgacagcagcggtgaactggcgcgcctgaaacagctttcgggcatggccgaccgggtcaacgcgctgttctccgatgcggccaccaatgtggccggcgtctggtcgaacttcttcgattcggtcagtggcctgtcgtccaacgcggccggcaccgccgaccgccagaacatgctcgacggcggcaaggccttggccaaccgcttcgtgcagctcaacacgcacttgaacaacctcaacagcgaggtcaacaacggcctgctggccggtgccaccgaggtcaaccgcctggcgcaggaaatcgcgcagatcaacggcgccatcggcaccaacgtcgccaccgcggcgcccgatctgctcgaccgccgcgaccagctgatcacccagctgatcggctacaccggtggcacggcggtgatccaggacggcggcatcatgaatgtctacaccgccggcggcaacgcgctggtggtgggtaccacggcgaccaaggtcaccaccgtggccgacccgtaccagcccgagcgcctgcagctggcgctggagacccagggcaacaccatccgcctcgacccgaaggcggtcggcggccagatcggtggcctgctggaattccgcgacaccgtgctgacccctgcccaggctgaactgggcaagctggcggtgggcctggccgagagcttcaaccaggcgcaccaccagggcgtggacctgtatggccagctgggcggggacttcttcaccatcggcaacccgcgcgtcaccggcaacaacagcaataccggcaccgccagcctcagcgcaacctacggcgacctgggcaagctggacgcgcagaacgtggtgctgcagttcgatggcaccaactggaaggccagccgcgccgacaccggcgccagcatcccgctgaccggcaccggcaccgccgccgatccgctggtgatcaacggcgtcaagctggtcgtcggcggtacgccggctgcaaatgaccgcttcctgctgcagccgaccgcgggcgtggccggcagcatggaagtggcaatcaccgatccgtcgcgcatcgccgccgctgcagcggtgaagggcgcggccgccaccgccaacaccggtaccggcaagctgagcggtgtcaccgtcaccgattcgaccaacgccaacctgcgcaatccgtcggcgatcgtgttcacctcggccaccacctacaccatcgacggtgggccgccgcagacctacacgcccggccagaccatcagcgccaacggctggagcttcgtgctggacggtgcaccgaaggtgggcgataccttcaacatcaccccgaccccggctggttcgtcggacaacagcaacgcgtcgaaactggccaaggtggaaagcgcgaaggcgttcaacgccggaacggtgacactgaacggcgcgctgggtggcctgaccacccaggtcggcgccgccgcccgctcggccgagtactcgctcgacgcgcagctggtgatcaatgacaaggcgcaggaagcccgcgacgaagtctccggcgtgaacctggacgaggaagcggcggacatgctgcgcctgcagcaggcctaccaggccgcctcgcagctgatctcgaccgccgacagcatgttccagaccatcctgggagccgtccgccgatga

SEQ ID NO: 495328 - DNA, 1200 bp, Stenotrophomonas maltophilia
atgcgcatcaatcccgcattcgacctgcacccggcgcagcagaacgacccggcgaagatcgacaaggtcgcacgccagctggaaggccagttcgcacagatgctggtcaagagcatgcgtgatgccagtttcggcgactcgctgtttcccggcgagaacaagatgttccgcgacatgtacgaccagaagatcgccgaggcgatgacccgcggcaaggggctgggcctgtccggcatgatcagccgccagctgtccggccaggccgccgacggccccgcgctggatacccgcgtggatccggccaaggccagccgcgcctaccagctcaacgcgccggacaagccggcaccgtcgctgccgttggaagatggcagccaggccgtgcgcatgctgcagcagatggcggccggcgcacagcacggcgcgcaggccgcgctggcaccgatggaacaggcactggacctgatcgccggtcgcgaaagcagcagcctgcaccgctcgctgggcaccgaggatccgtacatcggcaacctgcagggcgaggactggtccaccaacaacgaccagtggtcggcgacggccagcaaccgcggtacggccatgagccaggccgatgcgatggctacccgcaccgccgtggcccagctggggccgcacacgccggaaggtttcgtcgccagcatctggcagcacgcgcagagcgcggccagggaactgggcgtggatgcccgtgcgctggtcgcccaggccgcgttggaaaccggctggggcaagcgccacatccgccagtccgacggcagtacctcgcacaatctgttcggcatcaaggccaccggctggagcggccagcgcgttgcagccggcacccacgaatacgtggatggcgtgcgccgcaacgaaaccgccagcttccgtgcctacagctcgccggccgaaagcttcgccgactacgtgcgcctgctgaagaccagcccgcgctaccagcaggccctgcaggccggcaccgacgtgcagggcttcgcccgtggacttcagcgcgccggctatgccaccgacccgcgctatgcggccaagatcgccgcgatcgccggtggcccgaccatcgagcgtgccgtagcggccgtgaccgacgccggcgcgcgccttggccagaccttcgccagcaccgcgaccgcggcgctgggtatcacccgtcgttga

SEQ ID NO: 495329 - DNA, 1131 bp, Stenotrophomonas maltophilia
atgaaactcctcccctcttcttcctggcatcgccgcgtggcgtcgttcgtcgcgctgatgctgctggtcgtggcagccccggccagcgccgagcgcatcaaggacctggcccaggtcggcggcgtgcgtggtaacgccctggtgggctacggcctggtggtcggcctggatggcagcggcgaccgcaccagccaggcgcccttcaccgtgcagagcctgaagaacctgctcggcgagctgggcgtgaacgtaccggccaacgtcaatccgcagctgaagaatgttgcggccgtcgcgatccatgccgagctgccgccgttcgccaagccgggccagccgatcgacatcaccgtgtcgtcgatcggcaacgccgtctcgctgcgcggcggctcgctgctgatggccccgctgcgcggcgccgatggccagatctatgcgatcgcgcagggcaacctgatcgtcggcggctttggtgcgcagggcaaggatggttcgcgggtttcggtgaacgtaccgagcgtgggccgcattcccaatggcgccacggtcgagcgtgccctgcccgacccgctggccaatggcggcgacatcacgctgaacctgcacaacaacgatttcaccaccgtttcgcgcatggtcgccgcactcaacaacgcgttcggcgaaggcgccgcgcgtgcggtcgacggcgtgaccgtggccgtgactgcgccgaccgatccgggcgcacgcatcggcctgctggcccgcatcgagaacctggagctgaccccgggcagcgccccggccaaggtcgtggtcaattcccgcaccggcaccgtggtcatcggccagcaggtgcgggtcggccctgccgcgatctcgcatggttcgctgacggtgacgatccaggagaacaccaacgtcagccaacccaatgccttgtccggtggccttaccgtggccagcccacagtcgaccatcaccgccaccaacgacggcagccgcatgttcaagttcagcggcggcaccaccctggacgagatcgtgcacgcggtgaacgccgtgggcgcggcgccgggcgacctgatcgcgatcctggaagccctgaagcaggccggcgcattgagtgccgagctcgaggtgatctga

SEQ ID NO: 495330 - DNA, 693 bp, Stenotrophomonas maltophilia
atgtcgcccatttccagattcacccgcactgccctcgcctgcgccgtggtcgccctgctcggtggctgcgtgatcgccggcgacgtgcgcccctacgcggcgatggcaccgatccagccgatcatgccgccgcaggccgcgccgaccgccggtgcgatctacgctgccggcccgaccctgcagctgtactcggaccgccgcgcacgcgatgtcggcgacctgctgaccatcaccctgctggaaaacaccaccgcgcagaccagcgccaacacggccaccaacaaggaatccaacctgagcctgggcacgccgtccatcctcggtgcgccggtcaccctgggcggcaaggacatcctcagtgcgacggccaagggcgcgcgtgacttcaccggcaagggcaacagcgcgcagagcaaccgcctgcagggcagtgtcaccgtcacggtgatccagcgcctgcccaatggcaacctggtggtacaggggcagaagaacctgcggctgaaccagggtgatgaactggtacaggtgcagggcatcgtgcgcccgggcgacatcagccaggacaacaccattccttccagccgcgtggccgaagcccgcatcgtctacggcggccgcggcccggtcgcgcagtccaacgcgatgggctggctgagccgcttcttcaattccggcctgacgccgttctga

SEQ ID NO: 495331 - DNA, 786 bp, Stenotrophomonas maltophilia
atgaaccaggcattgtggatcgcgaaaaccggactggatgcgcagcagatgcgcatgtcggtggtttccaacaacctcgccaacaccaacaccaccggcttcaagcaggaccgtgccagcttcgaggacctgctgtaccagcaggtacgccagcccggcggctcttcgtcggcgcagacccagctgccgaccggcctgcagctgggtaccggtgtacgcgtggtcgccaccgccaagaatttcgagcagggtggccagcagcagaccggccgcgcgctggacgtgatggtcaacggccgcggcttcttcgaagtgcagatgcccgacggcagctcggcctacacccgtgatggctcgttcaagatcaaccaggacagcgagctggtcaccaacagcggctacccggtgcagccgggcatccagattcccgagggcgcacagtcggtgaccatcggtaccgacggcaccatcagcgtgaagatggccgacggcgcggcgtcagtggaagtgggtgcgctgaccctgaccgacttcgtcaatccggccggcctgcaggcgcgcggcgagaacctgttcctggaaaccaccgcttccggtccggcacagaacggcaatcccgggctcaacggcctcggcaccgtggtgcagggcgcgctggaaggcagcaacgtcaatgtggtcgaagagctggtgtcgatgatcgaaacccagcgcgcctacgaaatgaacgccaaggcgatctccaccaccgattcgatgctcggctatctcaacaacaagctctga

SEQ ID NO: 495332 - DNA, 750 bp, Stenotrophomonas maltophilia
atggataaagccctttacgtggcgatgaccggtgcccgcgcctccctgcaggcgcagggaacgctcagccacaacctcgccaactcggacacccctggcttcaaggaagcgctggccaacaccgaagccttcccgatcaagggcccgggctttgcctcgcgggtggatgcgctgcacgtcgacgccggcttcaaccgtacgcccggctcgcagcacatcaccggcaagccgctggatctgtccctgcagaccggcacctggctggccgtgcagtccagcgacggcagtgaggcgtacacgcgcggcgctgcattgtcggtcaccccgaacggccagctggtgacctccagcggccgtccggtactggatgacaacaacaacccgatcgccattccgccctaccaggcgatggaaatcggtgccgacggcacgctctcgatcatcccgcagggcgaaggcccgcagaccatggcgcagatcggccggatcaaggtggtacaggcgccggacgagcgcctcgagcgtggcctggatggcctgttccgcaacaccgacccactgcagccgttcgcaccggcacagggcacggccgtgcacagcggccagctggaaggcagcaacgtcgatgccgccggtgcactggtgcagatgatccagctgcagcgccagtacgaaatgcaggtgcaggtgatcaagcacggcgacgacaacgcgcgcagtgccaacagcctgctgcgcctgggcagctga

SEQ ID NO: 495333 - DNA, 1224 bp, Stenotrophomonas maltophilia
atgggcttcaatgtctcgctgtccggcatcaacgccgccaacaccgacctgagcgtcaccgccaacaacgtcgccaacgtcaacactaccggcttcaagcagtcgcgcgcggagttcgccgacctgttcgcttcgaccagctacggcctgtcgaagaaccagaccggctcgggcgtgcgcgtttccaacgtcgcccagcagttcatccagggccacaacgagcagaccgggcgcagcctggacatggccatttccggtgaaggcttcttcaccatgaacatgaatggttcgcgcgtgtactcgcgtgccggcaacttccagaccgactcggccggctacgtggtcaacccgcagggtgcgcgcctgcaggtgttcgcgccgaatgccgatggcaccaacttcgatgccggccgcctggtcgacctgcagctgctgaccaccgacagcccgccgaagcagaccagcgaagtgaaggttggcttcaccctgccggccaacgccaagcagccgacggtggcgaccttcgacccggccgattcgaacagctacaaccactccagcggtggcatcaccgtgtacgactcgctgggcgtgagccacatccaggtctcgtacttcgtcaagggcgccaaccccaacgaatggaccgtgcgcaattacgtcgatggccagccggccggcgcaccgaccccggtcaccttcgacaacagcggcaagctggtcgcacctgccaacggcaaggtcagcctcggcaccttcaccccgaccaccggtgccggccagttgaacatgacgctggacatcagcggctccacccagtacggcgagaagttcgccctgcgcaatacccagcaggacggctatgccgccggcaagctcaacgaagtgaccgtgtccgaatccggcgtggtctacgcccgctattccaacggcgacgacaagccgctgggccaggtcgccctgaccaccttcaacaacacgcagggcctggaatcgaagggcaacaacctgtgggtggagaccttcgaatcgggcacgccgcgcaccggcatgccggacacctccaacctcggcaagatccaggccggctcgctggaagcgtccaccgtcgatctcaccgagcagctggtcaacatgatcaccgcgcagcgcaacttccaggccaacgcgcagatgatcaccacgcaggaccagatcacccagaccgtcatcaacatccgttga

SEQ ID NO: 495334 - DNA, 684 bp, Stenotrophomonas maltophilia
atgaccaccgccgtcaacaaccagaccagccaggacgtctattccgcgctgggcctgaacgcccccaacagcaacgccacgaaaaagaagaacacgctggaccaggccgacttcctgcgcctgatgaccgagcagctgcagcaccaggatccgctgaagccgatggacaacacgcagatggtcgcgcagatggcgcagatgtccaccgtgcagggcatcaccgatctgaacaagacggtgaagggcttccaggagtcgatggccagcgaccaggtgctgcgtggcgctgcgctggtcggccaccaggtgctggtgccgtcggaaaagctggtgctggagaaggaaggcaatgtcgaaggcacggtggctgcaccgtcggccggcatcatcaccgtggacatcaccgacgccaacggcgccaaggtcacctcgctgagcgtggaagccaaggctgccggcgaaaccgccttccagtgggacggcaaggatgccaacggcaagcgcatggagccgggcaagtactccatcgtcgccaaccatgtcgacaccgccggcaagagcaccaagctgtccacctacgtacaggcgccggtggagagcgtgaccgttggttccgacggcctgtacctgaacctcaagggcctgggcacggccccgatcgactacgtgctccgcgtcagctga

SEQ ID NO: 495335 - DNA, 408 bp, Stenotrophomonas maltophilia
atgagcaacctgccgatcttcgacatcgccggctccgcgctgcaggcgcagtcggtgcgcatgagcaccatcgcctccaacctctccaatgccgacaccgtcgccggttccgccgacgccgtgtacaagccgctggaaccgatcttccaggccgtcaccagcaagaacgatcccaacatcacctcggtgaaggtgaaggagatcacccagagcgaggccgcaccgatcaagcgctacgagccgggccacccgctggccgacgccgatggctacatctaccagcccgatgtcgatccggtggcgcagatggtcaacctgatctcgacctcgcgcaattaccaggccggcgtggagatgttgaccaccgccaaggaactggccttggccaccctgaccatgggccgctga

SEQ ID NO: 495336 - DNA, 396 bp, Stenotrophomonas maltophilia
gtgcgcaacctgattaccgactacctgggcgtccacgcccaggccatgccgttgcgcgaacagcggatgaagctgatcgccagcaacctcggcaatgccgacactcccggctacaaggcccaggacctggacttcgatgccgccctgcgccacgcccaggggcaggatgccaatggcctgatggccaccacccatgagcagcactacgagatcagtagtggcctgaacccgttccagatcgcgcgcgaaggcgtgcagcccagcctggacggcaacaccgtcgaccccgatgccgagcgtgccgcctatggccgcgccgcactggaataccgcgcctcgctcagcttcgtcgagagcaaggtgcgttccatgctgaccgcgatcacggggcaataa

SEQ ID NO: 495337 - DNA, 945 bp, Stenotrophomonas maltophilia
atgtcccatgacctgctcaaccggatcgaccagcggacccgactggccggccacaaccgcctggcgctgctgctgttccgcctcggcggacgtcagctttttggcgtcaatgtcttcaaggtgcaggaagtcctgcgccgcccggagctgttccaggtgcccggcctgcccagccagttctccggcgtggccgacgtgcgcggccgctcggtgccggtactggacctgggcctggcgatcggccaccccgagcgcgaaccggacgcggacacctcgccgggctacctggtcgtcaccgaattcaaccgctcgatccagggcttcctggtcagtggcgtcgaacgcatcgtcaacatcgcggtggaagacatccacccgccaccggagctgggcgccgagtcgagctacctgaccgcggtgacccgcttccagggcgagctgatccaggtgatcgacgttgagagcgtgctggccgatatcgcccaggtgcgcggagaagcggtactcgacccggcaatggccatgcccgccgacggcccgcagctgcaggtgctggtggtggacgactcgcgcgtggcccgccagcagatccgcagcgtgctggaccagctgggcgtgggtgccaccctgctttccgacggcaagcaggcgctggaccacctgctgcaggtccacgcctcgggggaaaacccggccgagcgctatgccatggtcatctcggacatcgagatgccggccatggatggctacacgctgacgacggaaatccggcgccacccgggcctggccggcctgtacgtgctgctgcacacctcgctgtcgggcgtcttcaacaacgccatggtcgagcgcgtcggcgccaatgcgttcgtcgccaagtactcgccgcacgagctggccgacttcgtgctggaccgcctgcgcaaggtggcgctggcggcgtaa

SEQ ID NO: 495338 - DNA, 657 bp, Stenotrophomonas maltophilia
atgcgccggatcacatccctactggcccttgcactggccgttgctgcgccgtgggccgccgctgccgactggcaaccggtggccagcatccgcgcggccgcattgtcgacactgcctgccggcagtgaaggcgaggcgcaggtggccgatgcgctgcgcctgccgaaatgtggcagcgcgttgcaggtgcagcccaccgccaacaccacggtagaggtgagctgtcccgatgcgggcggctggcgcctgttcgtgccggtgaaggtgcggcgcaaccagaccgtgctggtgctcaaccgcggaatcggcactggagaaaccctcacggccgccgatatcaccactgcccagcgtgacgctgcccggattgccggcgcggtgctgtccgatcccaatgcagcgatcggccgcatcgcccgccgtccgttgcaggccggcgccctgctgtcgaacaacgatctggtggtccagcgtctcatcaagcgaggagacaatgtagccctggtatcgcgtcgcggctcggtcgaggtgcgcattgccggccgtgcgatgggtgatgccggtgagaacgagcgggtctcggtcgagaacctgtcctcgcggcggatcgtgcagggcacggtcgacgccgcaggtgacgtaatcgtggcgcgttga

SEQ ID NO: 495339 - DNA, 306 bp, Stenotrophomonas maltophilia
atgagccagaaaatcgacggcaacctgcaggtcccccaggcactgcgcagcgtgacgaccccggccagcaagcccggcgtcagcaccgatgcggcggcgcgcccggtcgaggcggccgacagcctgcgcctgaccggcgaggccaccaatctgcaggccatcgagcgtgagctgaccaccgccccggcgattgacgcccagcgcgtggcggccgtgcgcgagtcactgcagaacggcacctacaagatcaatccggacgcgatcgcatcgcgcatgctcgatctggaccagcagctgcacggatga

SEQ ID NO: 495340 - DNA, 327 bp, Stenotrophomonas maltophilia
atgagcgagccgctgcagcgcctcgcccaggccctggacgttgaacgccaggccttggtcgagcacgacgtgcacgccctgatccgggccaccggcgccaagctggaagcgctgcgtgcgctggaaggcgcgccgccggtgggcgagggcgaacagctgcaggaattggccgagcgcaaccgcgccaacggcgtgctgctgtcgcgccgtcgccgcgaggtgaactgggcgctgcgccagctcggccgtaccgaagatgcctcggcctacgatgccaagggccagtcgcacacggtcagcatcggccggccactcgccgtcgcctga

SEQ ID NO: 495341 - DNA, 1221 bp, Stenotrophomonas maltophilia
gtgtccgctgccaacgccctggttaccgccccccttccgccgcagccggtgctgcaggccctgcttgagcgcctgcgcgaaggcctgctgctgttcactgaagacgggcaggtggcactggccaacccggccgcgcagaacctgctggccagtggcgaggacggcggattgccgccgccgcagcggctgcgcgaactgctgccccccgatgcactggagcaggcccgccagcatggccactggaatggcagcctgccgctgggcgagggcgtggtcatcgcccacctgtaccaccatggtccggtcggcgaagggcatttccttgcgttgttccgccacatcgaagggcaggaagactacgagcgcgaactgcagcagcgccacgccgagctgcgccaggcctacctgcgcctcaatggcacccaggaaaagctgctgcagtcggagaagatggcctcgatcggccagctcgccgccggcgtcgcgcacgagatcaacaacccgatcggttacgtgcactccaacctgggcagcctgcaggagtacctgcgcagcctgttcaccgtgatcgaagcctacgagcgcgccctgcgcgcgccggacccgaaggcactgatcccggaaatcgatgacatccgtgaccgcctggacatcgacttcatcagccgcgacctgccgcagctgatggcggaatcgcgcgaaggcatcgagcgcgttacccgcatcgtgcgcgacctgaaggacttctcgtattccggtcgcgacgaatcgtggaagctggtcgacctgcacgcgggcctggaatcgaccatcaacatcatctggaacgaactcaagtacaaggtcaccctggtacgcgaattcggccagttgccgctggtggagtgcctgccgtcggagttgaaccaggtctacatgaacctgttgctcaacgctggccatgccatcgccgagcgcggcacgatcaccgtgcgcaccggcgttgatggcgatcacgtgtgggttgaattcgaagacaccggcggcggcatctcgccggaactgcgccagcgcattttcgatccgttcttcaccaccaagccggtcggcagtggcaccggtctgggcctgtcgatctcctacagcatcatcaacaagcatcacggccgcatcgacctggacagcaccccgggcgtgggctcgcgcttccgcgtggtgctgccggtgaagcagccgcgctga

SEQ ID NO: 495342 - DNA, 1773 bp, Stenotrophomonas maltophilia
atgtggaatcccaacctgcccccggtcagcatcgatgatgcccccgaccgccttggcgccggcaaccccgagctgcaggcgatggttgccgaggcggcctccggcggcattgcgctgatgctgatgcacgtggacatcgaccacttcgcatcggtcaacgagaacatgagtgccgaagtgggcgatcaggcgctggtactggtggcgcagcgcctgcagtcctacctgcgcgggcgtggcaagctgtggcggcatggcagcgacgagttcctgatcgcggtgccccgcaccgcggacctgccgctgccggaggacttcgctgaagagatccgccagcagatggaactgccgctgtcggtgcttccatacacgctgttcatgaccggcaagctgggcgtgagcctgtgcccggaacatgccagcagcgcctcgcgcctgctcgaccatgccgaagatgcgctgtaccaggccgcccgcgaaggcggcaatgccgtgcgcatccatgccgtggataccccgccgagcgcgcacagcgagagcatcatcgcgcgccagatcgtcgatgccattcccaatggcgagctgaagctgcgttaccagccgctggtgagcgcccgcgacggccacgtggtcggcatggaagcgctgctgcgctggcagtcgccgaccttgggcatgctggtgccggagcgcttcatgcgcaccgccgagcgcctgggcatcatcgtgcagatcggcacctgggtgctggaaggcgcattgaagcaggcgcggttgtggcgcgaccagggctttgatgacttcaccatcgcggtgaacgtgtccaccctgcagctgctgcggccgaacttcttcgccgaggtgatgtccctgctgcaggccgcaggcgtgccggcgcacatgctgacgctggagatcaacgagagcgcgctgaccaacaacgtcaatttcgtccatgaaacgctggccaacctgcgcaacgaaggcatcagcctgagcctggacaacttcggcaccggcgattccagcctcagcgcgctggtgcgctacccggtggacaagctgaagatcgaccgcagcttcatcaagagcgcaccggctggcaatcgcgaagcagccattgcccgcgcgatcattgccatgggccaccagctgggcatgaccgtgattgccaacggcgtggaatcgcaggcccagctgggcttcctgcgccgcaacgactgcgatgtgttccagggctacctgttcggcgagccgatgtcggccgatgccgccggcatgaccctgcgccgccgctacctgcgcccggaagccttcgccgaaacgcgcccggaccgcacgttgctgctgctggatgacgaggagaacgtgctgcgctcgctggtgcgcctgttccgccgcgacggctaccgcatcctggccgctggcaacgtgcgtgacgcctttgatctgctggcgatcaacgacgtgcaggtgatcctgtccgaccagcgcatgagcgatatgagcggcaccgagttcctgggccgggtgaagatgctgtacccggatacgatccgcctggtgctgtcgggctacaccgatctgaacacggtgaccgatgcgatcaaccgcggcgcgatctatcgcttcctgaccaagccgtggaacgacgacgagctgcgcaagcacatccaccaggcgttccgcacgtacgaagaacagcgccgcagcaatgccggtccggcaccggtggaaaccggggatggtggcgaggatcggccgctgcggtga

SEQ ID NO: 495343 - DNA, 2103 bp, Stenotrophomonas maltophilia
atgcccgcagaaccgaccggcaacgccccagttcccgacccgcggatggcgcaggcgctgagccgtgaccggcgccgggtggtgctgagctacctggtgatggcgctggcctggatgatctccaccgacagcgtggtgcaggcgctggtgcccgatccgcagcaggcggccctgtggcagggcctgaagggctcgttcttcgcgctggccagcgcgggcctgctctatctgctgctgcgcccgctggccgaacacgtgctgcatacccatgcgcgccagcaggcctccgagctgcgcctgcggcagatgttcgagggcaaccccgggccgatcctcgtctacgacctggacacgctggcgatcctcgatgccaaccccgccgcctgcggcgccttcggctgggaccgcgacgagctgctggaacagaccatcgacgccttgtggccgccgggccaggaccaggccctgcagaccaagctggaggcgatccgcgaggcgcccgaggagctgtgcatcctgcgcgctcagctgcagctgcgcgatggcgcgctgcggcagatggagctgcgctccaacgccatcagctacgacggccacaacgcccgcctgctgatcgccatcgaccgcaccgccgaggatctggcccagctgcgccgcgaccaggcattggcccgggtggaggaagcccatgagctggcccgcatcggcgcctgggaactggacccgtccaccgggatgggccgctattccaaccaggtctatcgcctgctcggccgccgcccgcccgaggcccggcgctggcaccgcttcgatgagctgctggtgccggccgacccggccaccgccacccagaccgaacagctgctggccgaactgtgctccggcgagccggtacagatggacgtgctgctgccgctgctgtcgatggacggccgtgcattgatggtgcacctgcgggcggccagcggtatcgacgaagccggccgcagccgcgtgctgggcacgctgcaggacatgaccgagcgcgagcagtcgcggcgcctgctgcgcgagcgcgaggaacagttccgcgagctggtgcgggtactgcccgacggcgtggtgatcctctccgacgagcacgtgctgtacgccaacgcctgggccgccggcctgttcggctacggcagccacaccctgctgggcgagccgctgtcggcactggtcgctgccgccgacctgccacgggtgcgcagccagctgcgcgccggccagccccacctgggaccgggccacagcagcgtggtggccatgcagcgtgccgacggccgcagcttccatgccggcctggcggtgggcgaagtgcgctacggcggtcgtgactgcaagctgctgatcgtacgcgacctgagcgattccgaacgcacccgcagggcgctggaaaccagcaatcgcgagctgcaggcgatggccgggcggctgttctcgctgcaggaggacgagcgtcgcgcgatctcgcgcgacctgcacgatgacatcggccaggccattaccgcgatcaagctgtcggcgcatgcggcgcaggatgaggacgatccgaagcgtcgtggcgaggacctggcgcagatcgtcagcctggctgacaccaccgtggccaagctgcgcgacatctccaccctgctgcgcccgccgcagctggatgcactgggcctggaggcggcgctgagctggcaggcgcgggtgctgttccgctcttcgccggtggagctgctggccgagatcgagccgctgccgcaccgccccgacaacagcatcgaacaggcctgcttccgcatcgcacaggaaagcctgaccaatgcgctgcgccatgcgcgcgccagccaggtcctgctgcagctgcgcgacgtcagccagcgtggcctgcacctgcagatccgcgatgatggtgaaggcttcgatccggacggcccacgtggcctcggcctgatcgtgatgcgcgagcgcgcgcagagcgtcggtggccacgtgcggatcgaatccgcgcatggcgaaggcaccctgatcgacgtccacctcccctaccaggcgaccagcatggccgccgtcgattcaccggaatactga

SEQ ID NO: 495344 - DNA, 2760 bp, Stenotrophomonas maltophilia
gtggaccaagggatcatcgccagcctgctgcagcacccgcttgcgtcggcgctggtcatcgtcgaccgtgccgggcgcccgctggcggccaatccggccgcgcgcgagcatggcctgccggccaccgtggcggcctatgcgccgatgctggaagatctgcgcctgatggccgccgatggtggcatcgttgcctgcacgctgccgggcggcccgcgggggcactacgacggtcacctgcgtgcggtgcacgacggtgccggcaacctgctggcgttcaccctgagcattcccgagccggtgccggtcgatgcgggcgggcgctgggagctggcactggacagcgccggccacagcctgtgggactgggacatccccagtgaccgggtggcgcgcacgccggcgctgggcgacgagaccgccactgaattgctatctcgcgtgcacggcgaggacatcgcccaggtgcgcgccgcgctcgacgagcacctgcgcgggcacagcgagcagtacagcgcacagttccgtttccgccaggccgatggccagtggcgttgggtgctcgatcgcggccgcgtggtcgctcgcaccgccgatggccagcccctgcgcatggtcggcacgcataccgatatcgagcagcagaagcagctcgaatcgctgctgcaggaacagcagctgcacctgagcgaggcccagcgcatcgccagcatgggcagctggtcgtttgatcccaacagcgggcatttctggtggtcgccggaactgcgttcgcttctggcactggagcagggcgccgttccgggccagcggcggtggctgaagcagctgcatccacgctcccgcggcgcgctgcgcgcggcatggcggcggttgtggcgcgatggccgcgctgccaacctcgagctggagctgacccgcggccatgagccttcgcagcacctgcggctatggatgcaaccgctgctggacatggacgggcaacccaagcgcctgctcggccaggtacagaacatcaccgaacagcaccagaccgatgcgttgatccgctggcgcaccgaactgctgaaccgggtctccgcgctgggccgcatcggcggctgcgagatcgaagtgcagacccgcagcatgcaatggaccgaggagtgctaccgcatccatggcctgcgcaaggaaccgatcaccctcgaccaggcgctggcgctgtacacggaggactcgcgcaacgcgttcgaggcggcgctcgcccgtatcgccaacggcggcctgcccgagcagctggacctgtgcttctaccgccagtccggcctgcgcgtctgggtgcaggtgctgatcgaactggaccgccgtgacggcctgccgccgcggttcgttgtcctgttccgtgacatcacccgcgagcgcgaagccaacgagcgcatcgaactgctggcccactacgacctgctgaccggcctgcccaatcgcgtactgctcggcgaacagaccgccgaagccatcgaggaagcacgcgaccgcggaacctcgctggccatgctgttcatcgacctggacggcttcaagaccatcaacgacagcttcggccacgccaccggcgatgcgctgctgaaggccgcagccacccgcctgcaccagaacctgcgcaacaacgacctgttcggccgcttcagtggcgatgagttcatcgtggtgctgcgcgacctggccgagccggaagatgccggtcatgtcgcccgcaagctgattgcctcgctggctgagccgctgcgccgtggcgagaccacgttgaaagtcggcgccagcgtcggcatcgcgatgctgggcgatgcgcagaccgatttctactcactgctgcgcgcggccgacgccgcgatgtatgcggccaaggaagccgggcgcaacacctaccagtactacagccaggacgccctagcccgcatccagcgccggctggacgtcgagcatgccctgcatggggcgatcgagcgcgacgagttcagcctggcctaccagccgctgctgcacgcccaccacggcgagccaccggcgatcgaggcactgttgcgctggcaccgccccggcatcggctactgcagcccggccgagttcattcccattgccgaaaagtgcggcgagatcgtgcgcatcggcgactgggtgctgaacgaggcctgccgccaggcgaccgcctgggaccgtgccggactgcactttgatcgcatcgcggtcaacgtgtcggcggtgcagctgcgtgatcgcggcttcgccgagcgcgtgatcgagatctgccatgcccatggctggccgccgcaacggctggaactggagctgaccgagtcggcgctgatccgtgataccgacatcctgcgccattgcttcgacgtgctggaacggcacggcgtgccgctggcggtggatgacttcggcactggcttctccaacctcaattacctcaatcgcttcccggtggggcgcctgaagatcgaccgcagtttcgtgcagggcatgctgcatgattcgggcacggccgaagtcacccaggccatcgtccacctgggccacgcgctgggcatgaaggtggtggccgaaggcgtggaaacccaccaggaagaagacatgctgcgccgccagggctgcgacgagatccagggctacctgtactcgcgcccgctcagcccgcgtgatctggcgcagtggctgcgccagcagcgcccggcgccgatgcgcaccgacgccagcggcgaagcggtgctggtgcgctga

SEQ ID NO: 495345 - DNA, 507 bp, Stenotrophomonas maltophilia
atggccatcgccctcatcgcagtgctcctgatcgaagccgtgctcctgatggcttgggtggccggctatttcagttggggcatcaccctgttcaacgaacgcatcgcggcgtcaccggccatgcaggcccggctctcgctgggcagcctggaacgtgacctgccgcaggacaggtggctgcgactggccttccatgcgctgcccgatggcagcatggcgttccgcgagagcttcgcgccgagcttcggcctgcgctacttcccggtgatgcgtggacgcatcgttctcaacgcgcgacggcacgaggtgcgggtgatcggcctgtgcagctggttcgtggcaatcctgtcgctgctgctgttgccactggtggcaatgcgcccgatggtggcaccgatgctgctggtgctgccgctgttcctggccagctatctggtccagaagcggcgctatgcggccatcgtcgaggccctgcgcatgcagttgaaggcggagtttcccaggtag

SEQ ID NO: 495346 - DNA, 216 bp, Stenotrophomonas maltophilia
atgaccctgatccgcgccctgccctccctcaccgataccgagcgcccgcgcaacgcgagcgtgcgtgagcagctgcagcggctggaagacgtggcccgcgaggaactgctcgaactgcagcagctggccgatgcgcgccccgccccgtcacgggcggacgaggcgctgctgggactggcgtgggacctggggctggatggcgaagccctgaagtag

SEQ ID NO: 495347 - DNA, 1191 bp, Stenotrophomonas maltophilia
atgtactcacgcattttcatccgtctggccgcccccctggctctgaccctgctgctccccttcgccatcggtttcgaatggccggccgccctgcgctgggcgatcctgaccacgatgacgctgagctggctcggctttgcgtggtggaccacccgcgcacaggcacatcgttcccccgagcacgcccgtgtcctgcgcgaacaggaccagctgctgaccgagctgcgcaacttcgtcggcaacgagatcgacggttcgcgtggcgaagtggaacgcgcccgtgacctgatccgccaggccgtctccagcctgggcggcagcttcgatgccatgaaccgcaagtcgcgccagcagagccaggccctgtcgcgcatcgtcgaccgcgccggtgatgaaggcaatgccggcctcgacgtcgcccgtttcgcccagcacgccagccatcgcatggaacagctggtggaagcgctggaacaggtgagcggccagagcagcaccaccgtgcagcacatcgaccagatggcgcagcacctggatggcatcttcgcgctgctggaagacgtcaagtcgatcgccgaccagaccaacctgctggcgctgaacgcggccatcgaagcggcgcgcgccggtgaagccggtcgtggcttcgccgtggtcgccgacgaagtgcgcaacctgtccgagcgctcgaccaccttcaacgagcagatccgcaagctggcgcacagctccaaggacgccatcgccaaggtgcgcgagacggtttcgcacatggcctcgcgcgacatggaccgctcccgcgaagcccgccaggaagcagcagcgatgctcgacaacgtcgcgcagatcaacgcctcgctgggcgacggcatgcgcgaagtgtccgagtgcgcgcgtgcgatcgatggcagcgtggccgaagccgtgcgcgccctgcagttcgaggacatcgccacccaggcactgggcggcgtgcacacccacctggaccgcctgaccgccatcaatcgcgaagcggtggccctgcaggagctgctgcaccgcaatggcggcgtgttcgacgaagagattgccaccgcgctgcagcgcaccggcaaccgcctgcgcgagctgcgcagcgaatgggaacgcccgccgcacaagccggttgcccagcagagcatgggcgccggcacggtcgagctgttctga

SEQ ID NO: 495348 - DNA, 615 bp, Stenotrophomonas maltophilia
atgagtttcactgtcgacgaccgcgtcctggccttggccggcattgcccaggccctgcagcaggtgcgccgcatcgccgataccggccattccgacgccgccgccgtgcgcaccgccgtggacagcgtgttccgcgtcgatgcgtcctcgccgcaggcggtgttcggtgaccgtcatgcactgaagtccggcctgcgcctgctgcacaactacttccgcagccagggccaggacccgatcctgcccaagctggccctgtcggtgctgcagctggagcgccgcttcgtgcaggatggggcgaccgtgaacaaggtcgcctcgggcatcgagcgcgcccagcgccaggccaccgaactgggcgacagtggccacccggacgtactggccaacctcggcggcctgtatgccgacaccatcagccacctgaaaccgcgggtgatggtgcagggcaacccgcactacctgggccaggccggcgtggtcgccgagatccgtgccctgctgctggccgcggtgcgttcggcggtgttgtggcgccagctgggcggcagctactgggacttcctgttcagccgcaaggcgatgatcgaggccgtggaccgcctgctggcctga

SEQ ID NO: 495349 - DNA, 1143 bp, Stenotrophomonas maltophilia
atgagcactccgcgtgtgatggtgggcgtctccggcggcgtcgattcctcggtcgccgcctggcgcctggtacagcagggcgaggccgtggccggcctgttcatgcagaactgggccgacgatggcagcggtgattgccgtgccgaggatgaccgtcgcgacgcggtggccgtgtgcggcctgctgggcatcccgttccacttccgcgacttctccagcgagtactggcagggcgtgttcgagcacttcctggccgagtacgcggccggccgcacgccgaacccggacgtgctgtgcaaccgtgaagtgaagttcaagcatttcctggacgccgcccgcgagctgggcgccgagcgcatcgccaccggccattacgcacgggtgacccagcgcggccaccagtggctgctgctgcgcggcgccgatcgatccaaggaccagagctacttcctgcatcaactgggccaggaacagctggcagccaccctgttcccgatcggcgaccttgaaaagagcgacctgcgccggatcgcgcgcgacgtcggcctgccgacccacgccaagaaggactccaccggcatctgtttcatcggcgagcgcgacttccgtgagttcctcggccgctatctgccggccaagcccggccagatcctcgacccggccgacggcagcgtgattgccgaacacccgggcgtgttctatttcaccctgggccagcgcgagggcctgaacatcggcggcgtgcgtggccgcccggccgcgccgtggtacgtggttggcaaggatgtggccagcaacgtgctgtacgtggaccaggaccgcgacagcaagtggatgctgtccgaccgcctgcgttcggaaaccgcgcactggatcgccggctcaccgccggcacggcgcttcgaatgcaccgcccagacccgctaccgccagcccgacgagccgtgtacggtccaggtgctggacgatggcagcgtgctggtcacctttgcgcgcccgcagcgtgccgttacccccggtcaatcgctggtgctgtatgacggtgatgtgtgcctgggcggcgcggtgatcgccgccaccgatgcgccgctggaacaacgcctgcgcaccaccccctccccttttgaggtaatcgctgcatga

SEQ ID NO: 495350 - DNA, 462 bp, Stenotrophomonas maltophilia
ttgaacgccacgccggacccgcgctgggcaccgcacgccaccgttgccaccgtggtgatcgacggcggccgcgtgctgctggtcgaagagaccattgacggccgccaggtgctgaaccagccggccggccacctcgagccgggcgaaagcctggccgaggccgccctgcgcgagacccgcgaggaaaccggctggacggtgcagctgacccacttcatcggctgctaccagtggactgccggcgacggcacggccttcctgcgcttctgctacgcggcgcacccggtttcgcacgatccggcgcagccgctggacaccggcatcgaccgcgcgctgtggctgaccccggccgagctgcaggccgccggcgagcgccagcgcagcccgctggtgtggcaggtggtagcggattacctgggtggccagcgccacccgctttcgctggtccgggaggtcgcatga

SEQ ID NO: 495351 - DNA, 474 bp, Stenotrophomonas maltophilia
atgaaaaggacccttctctccaccctgctgatcaccctggctgctgccggttctgccgccgcggcgaccagcgccgacaagtccgtggcccgccacctggacaagctgggctatacctacgaagtcgacgaggatggcgactaccgcatggtcttcgacgtcgagggcgaccgcacccagatggtctacgtgcgctcggcggtggaagacttcggcagccacaacatccgcgagatctggtcaccggcctacagcgccaagaccaagcagttcccggtggccgtggccaaccgcctgctggaagattcgcaggacgccaagatgggcggctgggtaaagcaggacaccaccgccatgttcgtggtgaagatcgacgccgatgccaccgccgaccagctcagcgacgccatcgatgcggccatccgcaccgccgacgcgatggagctggaactgaccaagaaggacgagttctga

SEQ ID NO: 495352 - DNA, 327 bp, Stenotrophomonas maltophilia
atgccccatgagtcctcccccgattcccagcacgagcacggcgttgccgtggagcccgcgcgcccggaagtggcgccgccgccgttctatcaggtgatgctgctcaacgacgactacaccccgatggatttcgtggtggatgtgctgcagcagttcttcagcatggacctggacaaggccacgcaggtgatgctgcacgtccatacccgcggccgcggcgtctgcggggtgttcacccgcgaagtggccgagaccaaggttgcccaggtcaacgagtactcgcggatgaaccagcacccgctgctgtgcacaatggaaaaggcctga

SEQ ID NO: 495353 - DNA, 813 bp, Stenotrophomonas maltophilia
atgagcgaaccctacctgagccgctggcgattgcggcgtgatggcgcggccatcgagacgccccacgcccagctctggccggtgctgaccgccgacggcgaaccggcgatgctgaaggtcagcagcgaaaccgaggagcagaacggccatcgcctgctgcgctggtgggacggcgatggtgccgcccgcctgctggcccacgaggggccggcgatcctgatcgagcgtgccggcggcgattcgctgcggcaacgttcgatcgagggcgacgatgatgcgtgtaccacgatcctgtgccaggtcctgcggcagctgcaccggccacggagcgcgccgccagcggaactggtctgcctgcgtacatggttcgccgacctgctgcagccaagggccgcgctgccgccactgctggaacagtgcagatcactggcggagcgggtgttgcaggaagaacgcgagatccggccgctgcacggcgacctgcaccacgacaacgtgctggatttcggcgcgcgtggctggctggcgatcgacccgaagcggctgctgggcgaccgcgcgttcgactacacgacgatgttcagcaacccggacctctgtggcccgggcatccatgtggccacccggcccgagcggtttgccgcccggctgcaacaggtaagcgcactggccggcctggaacgcacgcgcctgctgcgctggatcgcggccagcactgcgctgtcggcagtgtggttcagggatgacggcgcccccgccgacgtcgacgagacggtggcgcggatggcgctggaggcgttggcggaggcgtga

SEQ ID NO: 495354 - DNA, 2286 bp, Stenotrophomonas maltophilia
atgttcagcaaagacctcgaacacaccatcggccagtgctacaagcgcgcccgtgaggcccggcatgaattcatgacggtcgaacacctgctgttggcactgctcgacaacccgtccgcccaggccgtactgaaggcctgtggtgccgacgccgaacgcctgcgccaggagctggagcaggccatcgaggcttccgtgtcccgcctggccgaagatgacggccgtgatacccagccgaccctgggcttccagcgcgtgctgcagcgggccgtgtaccacgtgcagtcctcgggcaagaaggaggtcaccggcgccaacgtgctggtcgccatcttcggcgaaaaggactcccatgccgtctattacctcaaccagcaggacgtgacccgtctggacgtggtcaattacctgtcccatggcatcgccaagctgggcgaggaaggcgagcagccgtcctcctcctccgatggcgaaggccgcatcgaaggcggggagggcgagccgaagggtgatgccctgaccgagttcgccagcaacctcaacgaacaggcgcggtccggccgcatcgatccgctggtcggccgtgccgacgagatcgagcgcaccatccaggtcctgtgccgccgccgcaagaacaacccgctgtacgtgggcgaggccggcgtgggcaagaccgcgattgccgagggcctggcccgccgcatcgtcgagggctcggtgcccgacgtgctggccgacgcggtgatctactcgctggacctgggcgcgctggtggccggcaccaagtaccgcggcgacttcgagaagcgcctgaagagcgtgctgaccgcactgaagaaggtccccaatgcggtgctcttcatcgacgagatccataccatcatcggtgccggttcggcctcgggtggcaccatggatgcgtccaacctgatcaagccggcgctggcctccggcgagctgcgctgcatcggctcgaccaccttccaggagtaccgcggcatcttcgagaaggaccgggcgctggcccgccgcttccagaagatcgacatcgtcgagccgaccgtgggcgagacctacgagatcctgcagggcctgaagtccaagtacgagctgcaccacggcgtgacctattcgaacgaagcgctgcaggcggcggtggatctgtcggtgaagcacatcggcgaccgcctgcttccggacaaggccatcgacgtgatcgacgaggccggtgcccgccagcggttgctgccggaaggccagcgcaaggagctgatcgacgtcgaggaagtggaggcgatcgtggccaagatggcgcgcatcccgaccaagcaggtcagtgccaccgacaaggatgtgctgcagcacctggagcgcaacctgaagatggtgatcttcggccaggacccggccatcgagacgctgtcctcggcgatcaagctggcccgctcgggcctgggcaatccggaaaagccgatcggcaacttcctgttcgccggcccgaccggtgtcggcaagaccgaggtgaccaagcagctggcgctgcagctgggcatcgagctggtccgcttcgacatgtccgaatacatggagccgcattcgatcagccgcctgatcggtgcccctccgggctatgtcggcttcgaccagggcggcctgctgaccgaaaagatcgtcaagacgccgcactgcgtgctgctgctggacgaaatcgaaaaggcgcacccggacatcttcaacatcctgttgcaggtgatggaccgcggcgtgctgaccgataccaacgggcgtgaggccaacttcaagaacgtagtgctggtgatgaccaccaatgccggcgcggcgcaggcctcgcggcgttcgatcggtttcaccaagcaggatcatgccaccgacgcgatggagaccatccgccgcagcttcaccccggaattccgcaaccgactcgatgcggtggtgcagttccaggcgctgggcttcgagcacatcctgcgcgtggtcgacaagttcctgatcgagctggagatgcttctgcaggacaagcacgtcagcctgtcggccacgccgaccgcgcgcgactggctggctcaccacggcttcgacccgctgatgggtgcgcgcccgatggcccgcgtgatccaggacaagatcaagcgtcctctggccgacgagctgctgttcggcaaactggtcaacggcggcaaggtgaacatcgatgtccgcgacgacgagctggtcgtcgagacccaggccgagccggagcgcctgctgccggtcaccgtggagtga

SEQ ID NO: 495355 - DNA, 381 bp, Stenotrophomonas maltophilia
atgaacatgctcacgttgaccgccctgctcgtcgccgttgccgcgtccgccagcgcatcgcctgtgcgcgccgccgagcccccttccacggccagtgactgcatccagctgggcagcgaccagcagatcgtgcgcgccggcgtttcgcgaaacatcctgctgcgcaatggccaggaccactatgtcgtgcacttccagaacgactgctccactgccggctactcgcggaaactgagcttcatcaccgaaggccagcagggcctgctgtgcagcgccggccgcagccagctgcgcaccgatgccgaccactgccgggtggcgcagatcgaaccgatcgacgaagccaccttccagaagaaggcccgccagcgcggccgttga

SEQ ID NO: 495356 - DNA, 219 bp, Stenotrophomonas maltophilia
atgtcgaaagacgattccatcgagttcgagggcaccgtcagcgagacgctgccgaacaccactttccgcgttcgcctggaaaatgggcacgaaatcatcgcccacatttccggccgcatgcgcaagaactacatccgcatcctcaccggtgaccgggtcaaggttgaaatgaccccgtacgacctgaccaagggtcgtatcacctaccgcatgaagtaa

SEQ ID NO: 495357 - DNA, 741 bp, Stenotrophomonas maltophilia
atgacccgccagctgccctggcgcctggccgacgcgccggacgcccccttcccgccggccgagaccgccctgcgccagcccgacggcctgctcgccgtgggcggcgacctgcacccggcgcgcctgctcaacgcgtatgcgggcggcatctttccatggttcagcgagggcgagccgatcctgtggtggtcgcccgacccgcgcatggtgttccgtaccgatggcgtgcatctgtccagccgcttccgacgccagttgcgcggcagcacatgggaggtcaccgccgacaccgccttcagccgggtgatgcgcgcctgtgcggcggcaccgcggcctggccaggacggcacctggatcagccccgacatggtcgaggcctacagccagctgcatgacctcggctttgcccactccttcgaggtctgggaccggcagacgctggtcggcggcatctacggggtggcgatcggaacgatgttcttcggcgagagcatgttcagtggcgccagcggcggctccaagatcgccctggccgcgctggcatccacgcttcacggctggggctgggcgctgatcgatgcccaggtggagaatccgcacctgctgcggatgggcgccgagcacctgccgcgcgcggcgttcctgcagcacgtccgccacgcggtgcgccatgacggccgtgaaggcccgtggacgcaggcggtcggacgcctgccggcacagcgtttggccgggggttaa

SEQ ID NO: 495358 - DNA, 1125 bp, Stenotrophomonas maltophilia
atgccctccccccgcttcctcgactccctgcagtccattcccgccaccgactgggatgccctgcacgacggccagaatccgttcgtcagccacgccttcctctccggcctggaacagcacggctgcctgcgcgaggactggggctggcagccccggcacttcacgctctgggaaggcgacaccttggtcggcgccattccgggctacctgaagaccaactcccacggtgaattcgtgtttgaccatgcctgggccaacgcctacgcccgccatggccgcgactactacccgaagtggcttggcgcagttccgtactcgccggtgaccgggccgcgcctgctggcccgtcacgattcagagcgcaccacgctgctgtcggcgttgcgcgatgcactgccggcactggccgtgtcatcggcccatatcaacttccacgccgcagcggacgaggcgctgttcggcgatgactggctgctgcgcgaggacgtgcagttccagtggcagaacccgagtgactgggcgacattcgaccagttcctcggcgcgatgaaccacaagcaccgcaagaacatccgccaggaacgggccaaggtcgcccgccagggcatcagcttccgcgtggtgcatggcgacgaggccagccgcgccgacctgcaggcgatgtaccgcttctacctgcagaccttcctggaatacggcaatgccccggccctgaccgaggccttcctgcgccatctggccatttcattgggtcgcgggctggtgctgttcctggccgaacaggacggcgagccgattgccggcgcgctgtgcctgcgcggcggtgacacgctgtacggccgctactggggcggcgccaccctgcccggcctgcacttcgaggcctgctattaccagggcatcgagtactgcctacgcgaaggcctggcccgattcgagccgggtgcacagggagagcacaagctggcgcgcggtttcctgccgacgctggtgcgcagccggcactgggtggctgatgcggagttcgccgaggcgttgcaggagtggtgccggcaggagcgacgggatgtgcggcgctaccaacaggagctgctggggcacagcccattccgcgcggacgggtga

SEQ ID NO: 495359 - DNA, 1563 bp, Stenotrophomonas maltophilia
atgaaccagaaatttcgccttggatccctttctgtcctgctgtctcttctgggtggcggactgttgataagccccgcgcaggccgttgacgctcctcctgcggtggagcaggacactgggctcgacatcctcttgacccagaaggcgcgcgacattctggagcgcgttcgtctcgtggatggccaggcacgtagtcgccgggttgaggtatcagcagatatcgccaacggtgtagtgaccgtggcgctggatcgtgacttcgttcctgccgattacggaccgtcgttcgaggatcagcgaagcgagatcagttttggactactgcattgggccgagcaggtggcgccgttcagtcgtgtcgtttttctgtatgacgggaaagagatcgaatactactttcctgagataaaggctgcggacgatgcggcgcggaaagcgggggatgcgctgaggcggatgcgtggaacgcctgggtccgggatggcatttgtcgcagccggccatgggtatttctacagctacaaggacaaccggtgggtgacctcaagggatgaatggaatggcgtctccgaggggttgttgactccgtcgtacgctgcggagctgaaggcgatgatcgagcaaaggagccaaatgcctgtcgtccgtccgcgcgttcagatcacgggaacgactcatcctccgagtggtgaggagtggtggaccatagctgcgcgctacgcgattgccgagcagtatccggccgagacaaagatatggaacacgtacgcaggcagtacgctttgggatcgggaggagcgtgaagacatcaacagtcggccgcttctcgcaaaccaccacggagctgaggtagcgattcatctgcacagcaatggagaaccctcgggggccgcgcgcggtactcgtgtgatcgtgcaacctggtaggccgatggatgctgctcttgcagagagtgtcctgtgctcgatgaaggagctgattcactcgctacctgagtatgcggcattcaccgtggctcccgctccgcacgcgctgaacaagggggagaaccgagaggcgcacatgccatcgatcatcgtagagacggcgtttcacacgaatccggatgatgccaaggcgctgcaggaccccgtcttccgctcggcgtcgatgaaaggggtggagaagggctatcgcctgtgggcaacaggaaagacgtgtgagccgctgtccgggcagccgatcgcagatgtcgacgttccatccggcgactcgcgcgaggtggacgtggcgtttgcgggccatccgcaattcccgatcagcctgatcacccgcaatacgctgtgcccatcagggtggaactgcagcggacggacggtggtcatcgattcgcctgaccagcccagcaggatgcaactaagctgcggtcgcgacagcgtggggacgctcggctgggagacgcatgtgttggatgcggatggggtcaagtcgcagcccgtgcctcacaccgttcgttgtgttcccgatgcggccggccctgatcgaaatggcttgcctgagaatacggctgccgcagggatgtaa

SEQ ID NO: 495360 - DNA, 972 bp, Stenotrophomonas maltophilia
atgagcaccagcctgccctcccgccaccagcgcctcgtcatcctcggttccggaccggccggctggaccgccgccgtctacgccgcccgtgccaacctgaagccggtcgtcatcactggcctgcagcagggcggtcagctgatgaccaccaccgaggtggacaactggccgggtgacgcccacggcctgatgggcccggacctgatggcgcgcatgcaggcccacgccgagcgcttcgagaccgaggtcatcttcgaccacatccacaccgccgacctgtcgcagcgcccgttcaagctgatcggcgacagccacgagtacacctgcgacgcgctgatcatcgccaccggcgccaccgccaagtacctgggcatcccgaccgaagaccagttcaagggccgcggcgtgtccgcctgtgccacctgtgacggcttcttctaccgcgaccaggacgtggtcgtggtcggcggcggcaacaccgccgtggaagaagccctgtacctgtccaacatcgcccgcaaggtctacctggtccaccgccgcgacaccctgaaggcggagaagatcatgcaggacaagctgttcaggaaggtggccgaaggcaagatcgagaccgtctggcaccaccaggtggaggaagtgctgggcaacgatgccggcgtgaccggcgtgcgcgtgaagtccaccctggacggcggcacccgcgacatcgacgcccacggcttcttcgtggccatcggccaccacccgaacaccaccctgttcgacggacagctggcgatgaacaacggctacctggaaatccgttcgggcctgggcggcaacgctacccagacctcggtggaaggcgtgttcgccgccggcgacgtggccgatcaacactaccgccaggcgatcacctcggccggcttcggctgcatggccgctctggacgccgagcgctatctggacgcgcagggcaaggccagctga

SEQ ID NO: 495361 - DNA, 2361 bp, Stenotrophomonas maltophilia
gtggcgaagcaggtccctgaacgctccaagtcggacgacagcaaggcgtcacgtcgcacggccgcggcggcgacgaccgacaatccacgccgccagcgcctctggcgcgacctgggcctgatcgcgatcgcgccggccctgctctatctggcggcgagtcttttcacctattcagcgacggatccgggctggtcgcataccggcagcgtggtcgcgccggtgcacaacctcggtggtcgcgcgggcgcctggatcgccgacgtgctgctgcagttgttcggctacatcgccttcctgctgccggtggtgctcggtgcgctgtcgtggattgccatgttcggcctcaagcgcgagagcaagggcgagaacgacctggacccggcgctgcgcctggtcggcctggtcggtttcctgattgctggcaccggcttcctgcatgtacgcctgttcagtggcgatgtctccagcgccggcggcattctcggcaagctggttggcaattcgctcacggtgggcttcggtgcgctgggcgcgaacctgttcgtgctggtgctgctgctggcctcgattaccctggccaccgggctgtcctggttcacggtgatggaaaagatcggccgtggcgtgatgtcgctggcaccgttgctggcgcgcaagaaggaagaagtcaccgagtggcagcagacccgggtgatgcgcgaggagcgccaggaagtgcgaaaggccgatgccgaggtccgcgccaagcgcgagccggtgaagatcgagccgcgtccggaaccggtgatcgagaagagtgaccgggccaagcgcgacacgcagatcccgatgttccgtggcgtcaacggcgacggctcggacctgccgccgctggccctgctggacgaccccaagccgcagccggtgggctacgacaaggaaaccctggacgcgctgtcgcggcagatcgagttcaagctgaaggacttccgcatcgacgcccaggtggtcggcgccaatcccggcccggtcatcacccgcttcgagatcgagcccgcgccgggcatcaaggtcagccagatcagttcgctggacaaggacatcgcgcgcggcctgtcggtgaagtcggtgcgcgtggtcgacgtgattccgggcaagtcggtgatcggcctggaaattcccaacgtcacccgcgagatgatctacctgtccgagctgttgcgctcgaaggaatacgacaagtcggccagcgtgctgaccctggcgctgggcaaggacattgcagggcgctcgaccgtggccgatctggcgcgcatgccgcacctgctggtggccggtaccaccggttcgggcaagtcggtggcggtcaacgcgatggtgctgagcctgctgttcaaggcctcgccgaaagatctgcggatgctgatgatcgacccgaagatgctcgagctgagcgtctatcagggcatcccgcacctgctggcgccggtggtcaccgacatgaaggaggctgccaacggcctgcgctggtgcgtggccgagatggagcgccgctacaagttgatgagcgcggtgggcgtgcgcaacctggccggcttcaacaagaaggtgaaggaagcgcaggatgccggccagccgctgatggacccgctgttcaagccgaacccggagctgggcgaggcgccgcgtccattggagacgctgccgttcatcgtcatcttcatcgacgaattcgccgacatgatgatgatcgtcggcaagaaggtggaagagctgatcgcgcgcctggcacagaaggcgcgtgcggccggcatccacctgatcctggccacgcagcgcccgtcggtggacgtgatcaccggcctgatcaaggccaacatcccgacgcgtatcgcgttccaggtcagctccaagatcgactcgcgcaccatcctcgaccagtccggcgcggaaaccctgctgggccacggcgacatgctgtacctgccgccgggcaccgcgctgcccgagcgcgtgcatggtgcgttcgtgtccgatgacgaagtgcaccgcgtggtcgagcacctcaaggcgatgggcccggccgactatatcgacggggtgctggacgaggtgcagacgatgggcgacggcgtggtcgtcggtgccaccggcctgcccgagaccagtgcggccggcgacgagtccgacccgctgtatgacgaagcgctgcgggtggtcaccgagacccgccgcgcctcgatttccggcgtgcagcgccggctgaagatcggctacaaccgtgcagcgcgactgatcgaggccatggaagcggccggcgtggtcagcccgcccgagcacaacggcgaccgcacggtgctggcaccgccgccgccgaagtaa

SEQ ID NO: 495362 - DNA, 1944 bp, Stenotrophomonas maltophilia
atgcttcaccccgtaccaagcgcgctggcgctggcgctggcagccttcctggctgccggcccggcactggcagaaaccgccacctccgcgcccgccacggcgccgccttccaccagcggcgataccgaagccagcaataatttcagcattgtccgttaccgcgccgactaccaggtgcggccggatgcgggcaatgtgcagaccgaaacctacgaagtcctgctcaagaccaaggcctccgtcgagcagttcagccaggtgcggctgagctacagcgaaaagatggagacgctggaagtgctcggtgcctacaccatcaccgccgatggccagcggcgcgacgtgccggccgatcgcatctacacccaggagagttactccagcgcctcggcggcgatgtatgccgaccgcaaggtgcgggtgatcgtgttcccgaacctggccccgggcacgcgcctgtactaccaggtgcgccgcacccaggccacgccgtacttcccgggctatttcggcctgtgggagaccttcaacgtcttcaccgagtacgaagacgccgaggtcaccctgactgcgccggccaacctgccgatgttcgtcgacagccgcggcgtgcagggcagcgatcgcccgacggtgaagaacggccaggcgcagtggcgctggcgctaccagcggcgcgaagccatgccggcacagaactggtcggcggcgggctgggagttcggcccgaacatcatggccagcacctatcgtgactggtcgcagatgggacgcgcctaccagctcaaggccggcccggcggccgacgtgaccccggcgctgcaggcgctggctgatgaaatcaccgctggcatcagcgaccggcgcgagcaggccgatgcgctgtaccgctgggtggcgcagaacatccgctatgtggcggtgtacctgggcaatggcggcctggagccgaacagcgcgcagagcatcctcgacaaccactatggtgactgcaaggaccatgtgacgatcctcgaggcactgctggcagccaagggcatcgccagctcgccggtgctgatcggtgccggcggtggcccgacgctgccgaagattccggtgctgggccgcttcaaccacgccatcacctacatcccggaattcgatctgtaccttgattcgaccaccgcgtgggcccgcttcgggcagctgccggaaggtgacctgggtgcgccggtgatgcgtacccgcgacgccacgctggcacgcaccccggccaacacgccgcagcgcaatgccacctcgatggaagtgcgtttcaccttcgacgccaacggcaacctgcgcggcgagaccattccgaagctgggcgagaacgccgagatcggcatgcgcgcccagttctcccagctcaacgcgcagaatcgtgcgcgcgccgaggagcagatcatggccgcgtccggtttcgacgggcgagggcagctgcagatccagggcgtgccggtcgacctgacccggccgttcggctatcgcatggccttccaggccgaggactacgccgacttcagcgtggccggcggcatggccgtgccggatccgccgggcggcgagtcggtgcgtggcctgtacgccaccgcttctgcgccggccaacgagacgccgttctactgcaatgccagcctgcgcgaggaaacctatcgcctgcagttccctgccaatgcgccgatcatcgccatcccggccaaccagcgtttcaccaacgccgctggcgagtaccgcgtggactggagccgcgaggggcaggacgtgatcgcgcgccatcgcctgcagcagaacgcggtgcgtggcccggaggcgctgtgccagccgcaggactacaccgcattccgcgcgttgtatcgcgaagtgcggcgtggcttccgtggccaggtgctgtacggcaagctgccgggctcgggcggctga

SEQ ID NO: 495363 - DNA, 639 bp, Stenotrophomonas maltophilia
atgaacttccgcttccgccgtttccttgccaccaccaccctggccgtggcctgcgccgccgccggcagcgcctgggcaggcgcccgcgatgacctgaagaccttcaccagtggcctgaagggcctggatggccagttcagccagcaggtgttcgacagccgcggcaaggtgaaggaatcgaccagtggccgcgtggccctgtcggcgccgcgcctgttccgctgggaatacgtgcgcccgcacgagcagttgatcgtggccgacggcaagaaggtctggatgtacgaaccggacctggagcaggccaccgtgcgcgagcagggcaaggaagagcagaacagtccgctgaccgcgctgatcaacccggcgctgctggaacagcagtacgacgtcagtgaagaggctgcgcagcgcgacggcctgcagtggctgtcgctgtcgccgaagcgcgagaccgaagccagcttccagtacgccgcgctgggcttcaatgcccagggcctggccaagatggaaatcaccgatgcggttggccagcgcactgtgatcagcttcagcggctggaagcgcaacccgggcttcgcggccggcaccttcagcttcaccccgccgaagggtaccgacgtcatcggtaattga

SEQ ID NO: 495364 - DNA, 1173 bp, Stenotrophomonas maltophilia
gtgcgcgatcccgaatccaatgtccttgagttcattgctggctgcgcggtcgatgcggacatctactatctggctgcagcccttggccctgggcatgaatactacgacccggatcccggcccacccacccgcatgttcgtctttggccgcacccccaaagaggagtggttctaccatgacctgcaggacttccaggtcatgtccacagagcttgtcccagaggaagaaggcggtcgcccccgtcgtgtgcttgcccttgatttctatgggcagctggaagattactcccgtgctggggccacgatcgagtacgtctcggcggaaggcgccgacttccccggaggtcttacccgtttgcgactgctgggcgacgcccttttctgcgcgggcccaagaggacagatctatcatcggggcgacggcggatggcggcagcttccaacccaattcgcgactgccttctgcgaggagggcgaagacgagtcggatctggatgacttcgacagttggctcgaagatttcggccacctgctcgaactgggcgatgctcccgcacttcctcgagatccgatggaacgcgacgcagagcttcgccggagattcgccgattggcgcgcccacatgacccatgtccgggaggatgagcgattcaaccagctactcgctgagttccgcgtgggcagcgtgaacgacctctgcggaacgggctttgctgacctctacgcaatcggatcccaaggcttgattgcgcactgggatggctcgagctggaccgtgcccgaacaagtcactactgcggagctgcttcatgcttgcaggaccgaccagggccgcctcgtccttgtaggaatgcacggcaccatcgttacgggcgacatctccactggattcgagtgcctccaacacgaggtcggcgaaggcatcaacttcaactctgtgtgccagtacaagcaacaggtttacatcggctctgagaatggcggcctctacgtctacagtctagaaaccggcgtagttgaaccgttgctggaaggcatccccgaagaactgagagatgcaacgattgttgatatcagttccgtcggtagcgtgctgtgggtgctgacgccctgggacctgattcgatttgatggcaccgcgtggcaggtgatcgttcacccggacaacggatga

SEQ ID NO: 495365 - DNA, 165 bp, Stenotrophomonas maltophilia
atgcacgcgaccggattcgaccgcgcgacgcagcgcgctgtccggcgccagcaggcgcttctgcccaaccatttcgtcgagagtgcgcggacgcatgcgctcggccagcgggcgcaggtgttcccgatcgacgctcagcagatcgggaccagggaaggaagttga

SEQ ID NO: 495366 - DNA, 642 bp, Stenotrophomonas maltophilia
atgaacgcccccaccttcccgtacgacaccgcgcgcctgagcgaactggcccagctgctgatcgacaacgtccgcgaactggcgcacgccggctggaccccggccaccagcagcaatttctcccaccgcctggatgaccgccacgccgcgatcaccgtgtccggcaaggacaagggccggctgatcgaggacgacatcatggtggtggacttcgacggcctggccgtcggtcgcccgctgcgcccgtccgccgagaccctgctgcacacccagctgtaccgccgcttcccggaaatcggctgtgtgctgcatacgcattcgccggtgcagaccatcgcttcgcgcctgtacgcgccgcagggtcatatccgcctggaaggctacgagctgctgaaggccttcgccggcaacagcacccatgaaatggccatcgacgtgccggtgttcgccaacacccaggacatgaacgtgctctcggcgcaggtcgacgacctgctcgaccggcagaacctgtggggttacctgatcgacggccacggcctgtatgcctggggccgtgacatggccgaggcgcgccggcacctggaagccttcgaattcctgttccactgcgagctcgagctgcgcaagctgcgcggctga

SEQ ID NO: 495367 - DNA, 558 bp, Stenotrophomonas maltophilia
atgagccgactgcgcatctacgacgacacccgccccgaatcgccgctgctggacacccaggacggcgcggtcatcgctgccgagctgcagaagatcggcgtcaccttcgagcgctggcaggccaccgcgccggtcgcgccgggcgccagccaggaggaagtgttcgctgcctaccgtgcggacatcgaccgcctggtcgccgagcgcggcttcaagagcgtggacgtcgcctcgatcgccccggacaacccgaaccgcgccgagctgcggaagaagttcctcgacgagcacttccacaaggaagacgaggtgcgcttcttcgtcgcaggctccggcctgttcaccctgcacgtgggtgacaaggtctatgagatcgaatgcgtgaaggacgacctgatcgccgtgcccgatggcaccacccactggttcgacatgggcgatgaaccgagcttcgtggcgatccgcttcttcaccgagccggacggctgggtgggtcatttcaccggcaccgacatcgcgcagaagttcccccgttacgtacctacccaggcgtcctga

SEQ ID NO: 495368 - DNA, 696 bp, Stenotrophomonas maltophilia
atgcagccccgcgtcatcctgaccgacatcgaaggcaccaccagcagcatctcgttcgtcaagaacgtgctgttcccctatgcccgccaggccttgccggcgttcgttgccgaacatggccagcagccggaggtccgccgctggctggacgcggtggctaccgagatcggcggcgcctgccaggacagcctggtggccgagacgctgcagggctgggtcgaccaggaccgcaagcacaccgcgctgaaggcgctgcagggcctgatctgggatgaaggctaccgccgcggcgactacaccgcgcacttctacccggaagtggcgccggtgctgaagggctggcatgcctccggcctgccgctgtacgtgtactcctccggctcggtgccggcgcagaagctgttcttcggcttcagcgatgccggtgacctcagcccgctggtgtcgggctggttcgataccgagatgggtggcaagcgtgaggccgacagctaccgccgcatcgtgcaggccattggcgtgccggccggcgagatcctgttcctgtccgatgtggtcgaagaactggatgctgcccgcgaagccggcctgcagacccggctgatcgatcgcctggatgactacccgatgccgcgtaccggccaggccgccaacggccacgagcgggtcgagaacttccagcagatccagctgtaa

SEQ ID NO: 495369 - DNA, 2619 bp, Stenotrophomonas maltophilia
gtgcatcgtctttccctcgttgtccgtctgctcctgctgctggtcgcaacgtcggccttcccggcaactgcagcgcccctgcaggcacagtgggagttccgcatgctgcccggcgacgcgcagggcgcagctcatccaggcctgcagcaatggcgtacggcgacggtgccgggcagcgtgcacaccgacctgctggcgcatgcgctgatccgcgacccgtacgtgggtgcgcccgaagcggagctgcaatggatcggcctggcggcctgggagtaccgcgcgcgcttcgacgtggacgcggcgatgctggccaagcccaatgccgaactgcgcttcgacgggctggacacttatgccgaagtcagcctcaacggcaagccgctgctgcgcgcggacaacgcgcaccggacctggcgcgcgcgcgtggaagggcatctgcgcgccaggggcaatgaactgcagatcgtgttccgttcgccaatccgcaccctgttgccgggcgtggaggcaatgccacacaagatcgctggcaactacccgtcgccgtatggcgatgagccgaaggacgcgatggtcggcaacttcgcgcgcaagccggcctaccacttcggctgggactggggcccgcgttatgtcaccgccggggtctggcgcggggtcgacctgcaggcctgggatacgcaccgcctgaccagtcttgccgtgcgcaccgatgcattgagcgcggagcaggcgaagctggcggtgctgctgcaggtggagcagggcgcagcggccggctccgcggtggtgaacgtggatgtgcgcgatccgcagggccgcaacgtggcccaggtacagcgcacggtgctgctgaagcccggccagaacacggttgaactaccgattgaactggcggaaccgaagcggtggtggccggtcggccatggtgcgcaggatcgctataccgtgcaggcgcgcctggatggcggtgccgacgcaacgctggtgcgcgagcagcgcatcggcctgcgcacggtcgaactgcgccgcgaagaggacggcaagggcgggcagggcttcgccttcgtcatcaatggcgtgccgatcttcgccaagggcgccaacgttattccgttcgatgccttccccgcacgcgtcgacgcagcacgcctgcgccaggtgctgaccgccgcgcgcgacgccaacatgaacatgctgcgcaactggggcggtggctactacgaggacgacgcgttcttcgacatcgccgacgaactgggcctgctggtctggcaggacttcatgttcggcggcggcatgcagccgggctacgatccggccttccgtgccagcgtggtggccgaggcgcgcgacaacgtgcgccggctgcgccatcaccccagcatcgtgctgtggtgtggcaataacgaggaagaaaccgcctggaaggactggggtcacggccgcgacctgaaggcggccgacccggcatttgcggcaaaggtctggcagggctatgtcgacctgttcggcaacgacctgcgccaggtggtgggcgaggaaggactgggcgtaccgtactggtccagttcgcccagcaacgatctggacgagaaggccaacgattccacccgcggcgacaagcactactggcaggtctggggcaatccggcgctgccggtgcaggcctacctgcgtgagacgccgcgcttcatgtccgagtacgggctgcaggcgtggccgtcggtggcgacggtggatcagatcgccacccgcgccgagcagcgcatcgacagcccggtgatccgcgcgcaccagaaattcatggccggcgagggcaacagccgcctgctgcactacatcgaacagggctatggcacgccgaaggacttcgaggacttcgtctacctcagccaggtcatgcaggccgatggcattgcactggcggcgctgcatcatcgcgcctcccggccatacacgatgggttcgctgtactggcagctcaacgatgtctggccaggcgcctcgtggtccagcgtggattatttcggccgctggaaggcgctgcacttcgccgcgcggcgtttcttcgcgccggtcacggtagccgcgctgcgcgatgagggcagcacgcgggtgcgcctgatcaatgacggtgcggcgctggatgcacgttggcggctgcgggtgatggacgtggaagggaaggtgctgcgccgtcgcgaggatgcggtgacgctggcggcgtcgggtgtgacctcgatcggtgatttccgcgatgccgagttgctggccggtgccgacccgaagcgcacggtggcggtgtttgagctgctgcagaacggggcggtgagcgcgcggcaggtggtcggattcgtcgaagccaaggaccaggtattgccgcggcagaagctcaaggctacgttgtccatcgaaggcgaccactatcgactgcggctggaaagcgcggcttacgtgcgcgcgacgtggatcgacttcggtgcgctggacgtgcaggtcgaagaaaacctgctggatctgctgccgggcgaaacccgcgatatcgcggtgcgcggcccggtggatctggttaccctgcgcgaggcgctgaaggtgaagaccctcaacgaccgttga

SEQ ID NO: 495370 - DNA, 1227 bp, Stenotrophomonas maltophilia
atgagcacctcgcccgatttccgttcgcccgcgttcctgcgcgcgcacatcgccgacaccatggcgttctaccacccgcgctgcatcgatcccaatggtggctttttccactacttccgtgatgacggcagcatctacgatgccagccaccgccacctggtgagcagtacccgtttcgtcttcaactacgcgatggcctaccgcgagttcggcaatgccgagtaccgcgacgcggtcgagcacggtgtgcgctacctgcgcgaggtgcaccgcaacccggccaccggtggctacgcctggaccctgcgtgatggcaaggtcgaggacgacatgaaccactgctacggcgtggccttcgtgctgctggcctacagctgcgcgctgaaggcaggtatcgagcaggcgcgcgcgtggatggacgagacctggcagctgctggaagcgcgcttctgggagccgcagcacgggctctacaaggatgaagcggacggccagtggaacttcaccggctaccgtggacagaacgccaacatgcacatgtgcgaggcgatgctggccgcgttcgaggccagtggcgagcagcgctatgtggagcgcgcgctgcagctggccgacaacatgacccgccgccaggcggccaaggccggcgggctggtctgggagcactacgatgagaactgggagatcgactgggactacaacctggacgaccccaagcacctgttccgcccgtggggcttccaaccggggcaccagaccgagtgggccaagctgctgctgatcctcgatcgccacgtgcaggccgactggctggtgccgaccgcgcagcacctgttcgacgtggccgtggcgcgcagctgggacgacgcgcgaggcggcctgtactacggcttcgcacccgaatcgcgccggcagccgggcatggatggcgcgccgatcgggggcgacagcttcgtctgcgacgacgacaagtacttctgggtgcaggccgaaacgctggctactgccgcgctgatggccaagcgcaccggtgatgaccgctactggcagtggtacgagcgcatctgggcgtacgcgtgggagcacttcgtcgaccatcagttcggcgcctggttccgcatcctcgatgccgacaaccgcaagtacagcgacgagaagagcccggccggcaaggtggattaccacaccatgggcgcgtgctacgaagtgttgaacgtggtgcgttga

SEQ ID NO: 495371 - DNA, 996 bp, Stenotrophomonas maltophilia
atgggtgccatcgtttgcttcggcgaaattttgatcgatctactagcacagccgccggcctcggccgataccccgcgtgcgttcctgcagtacgccggtggggcgccggccaacgtcgcggtggcggctgcgcggctgggtgcgaagacccagttcgtcggcatgctcggccgcgacatgttcggtgacttcctggccgacagcctggtcgagcatggcgtgggtaccgactacatcgtgcgtaccgacgcggccaagactgcactggccttcgtggccctggatgccaatggcgagcgcagcttcagtttctaccgcccgccggcggctgacctgctgttccgtgacagcgacttccaggcggcgtgcctcgacagcgcgcaatgcttccacgtctgttccaacagcctgaccgagccggccatcgccgaggcgacctttgccggcatggaccgtgcccgcgctgctggtgcggtggtcagcctggacctcaacctgcgtcctgccctgtggccggcgaacgaggacccggcgccgcgcctgtggcaggcgctggaacgcgccgacctggtcaagctgtcgcgcgaggagctggactacctggccgcgccgctgggcgccgatggcgaggcggcggtgctgcggcgcctgctggccgcgcgggcgcgctgggtgatcgtcaccgatggtgcagccacgctgcactggtacacccgcgacaaccacggcaccgtcaccagcttccgcgtggccacggtcgacaccacagcggccggtgatgccttcgtcggtggcgtgctggtcggcctgctggagcgcggcggggccggtgccggttttaccgccttctgccaggaccccgaggcgatcaccgccacgctgcgcttcggcgctgcggtcggcgcgctggctgttacccgcaagggcgcgttcgccgcgatgccctcgctctatgaagtgcagcagctgctgcaggcacaggacattaccgcatga

SEQ ID NO: 495372 - DNA, 1314 bp, Stenotrophomonas maltophilia
atgccgatctccgcaacgccccgtccaacgggatcttcgggcaacgcacctgccgtcaccaacggcaaggcgctggccgtggtcaccacgatcttcttcatgtggggcttcctgacctgcctcaatgacatcctgatcccgcacctgaaggcggtgttcgagctgaactacgccaaggcgatgctggtgcagttcaccttcttcggcacctatttcctgatgtcgctgccggcgggtcggctggtggcggcgctgggctacaagaagggcatcgtggccggcctggtgattgccggtatcggtgcgctgggcttctggccggcggccgaactgcgcgtctatggcgccttcctcggcgcactgttcgtgctggccaccggcattaccgtgctgcaggtggccgccaacccctatgtcgcgctgctgggcccggagcagaccagctccagccgcctgaccctggcgcaggcgctgaactcgctgggcacggccatcgccccgatcttcggcggcatgctgatcctgtccaacacggtcaagagcgctgacgacatcgcggcgctgccggccgccgagcagctggcctaccgtgccgccgaggcgcaggctgtgcagggtccgtacgtgggcctggcggtggcgttggtgctgctggcgctgttcgtattcctgttccgcctgccggcgctgagcgacgccaccgagcaggccgaccagggccaccaccacagctacctggatgcgctgcgcaagcgccacctgctgctgggcgtgctgggcatcttcttctacgtcggcgccgaagtgtcgattggcagcttcctggtcaactacctgtcgatgccgaacatcggtggcttcagcgagcagcaggccacgcattacgtgtctgcctactggacgatggcgatgatcggccgcttcgccggttcggcgctgctggcgcgcttctcgcccagccgtctgctggcgatcttcgcgctggtcaacgtggcgctgctggtcaccaccatgctgagctccggcaacgtcgcgctgtactcggtggtggccatcggcctgttcaactcgatcatgttcccgaccatcttcgcgctgagcatcgagcgcctcggcccgctgaccaacaaggggtccagcctgctgatcatggccatcgtcggcggtgccgtggtgccgtacctgcagggcgtgctggccgaccacatcggtgtgcaggccagcttcatcctgccgctgctgtgctacggctacatcattttctacggactggtcggcgcgcgtacgccggcctccgcaacgcagggaggctga

SEQ ID NO: 495373 - DNA, 1050 bp, Stenotrophomonas maltophilia
atgaacgacaacggcagcagtcccagcaagcgcgccggcaaggcggtgacggtgaccgacatcgcgcgtgcgatcggcgtgtcacgggcaaccgtgtcgctggtgctgcgcggcagcccgctggtcaatgtcgatacccgcgccaaggtcgaggccgagctgcgccgccagcgctatgtctacaaccgcgcggcggccaacctgcgccggcgcacctcgtcgagcatcgcgctggtgatcaacgacctgtccaacccgttcttcgccgaattcgcgtcaggcgtggacgaggcgctgggcgggcgcggttacgtgacgttgctgggcagcaccggggaatcgccggagcgccagcaggccgtgctgtccacgctgatggagcacaccccggccggcctgatcctgtcgccggccgagggcagcgacaccgcgcagttgcggcaggcgctgggcgccaatgccaacgtgctgctgttcaaccgcgaactggccggggctgactgggacttcctgaccctggacaaccagcacggcgcctatctggccacgcgccacctgatcgagcgcggccatcgccagatcgccttcttcggcggccacgccgcatcgagctcgtgccaccagcgccgtgccggtttccagcaggcgctggccgaggccggtctgccgctgccgccgggctggatgatcgagtcggcaccgaaccgcctggaagccgcagcgcgcactgatgagctgtttgccgatggccatcggccgagtgcggcggtctgctacaacgacaccgtcgcgctgggcctgatgctgggcttgaattcacggggcatccgtccgggaggtgactttgccgttaccggcttcgacgatatttccgaggctgcggtggcggtgccgccgttgaccacgctcaccgccgatccgcgcgagcggggccggcaagctgcggcgctgctgctgcaacgactggacgaaccggacgccccgccacggcgcacggtcgcgccggtgcagttgcgcatccgcgaaagcagtgccgcacgaccgaactga

SEQ ID NO: 495374 - DNA, 2466 bp, Stenotrophomonas maltophilia
atgcgcccagtgccgtccgctcccgccgtcccatcatcctcgcgcccgctggtgcgcctggcctgcctgcttgcgctgtcggcggcgccgatgctgctgcaggccgcgccggcagcgctggagcgcgaggtcaataccttcatcggcagcaaggacgacggcaatacgttcccgggcgcgtcggcgccgttcggcctgatccaggtcagcccgatcggcagccactattcgggttggcgctatgacgacgagaagatccgtggcttcggccactccttcatctccggtgccggctgctgggaacagggcggccaggtgtcggtgctgccggtcacgggctcgatcggtccgggcggcgatttcgataccggcaacgccaggcagttcgaccacaaggcctacgctgcgtcctacacccacgatggcgaggtcggccaggccggctactacaaggtgcggctgaccagctacggcggcatcgatgccgaggcgaccgcgcgtacccgtgccgcggccgagcgctacaccttcagccagcgcagtggcgatggccacgtgctggtcaatgtcggccaggccaacgagcgccattcggtgatcggcagcgtggtcgatgtggtcggcgaccgcgtggtcgagggcaagctggttaccaagagtttctgcggcggccatcagtacaccacctggttccgcatcgagttcgaccgtccgttcaaggcgcatggcacctggggtgagggcggcggcctgccgggcgcgcgccacagcatggaaggcgagcagaagccgaacggtgcctggctcagcttcgacctggccaagggccagtcggtgacggcggtcagcgcgatctcgcacgtggatgccgaaggcgcgcgcaccaacctgcgtgccgagggcatgcagggtgggtcgctgctcggtttcgaccgcatgcgcgcgctgtcgcagcaggcctggcgtgagcagctgggccgtgtacgcgtgcagggcggcaccgccgatgaccgcaccgtgttctacagcgcggtctaccacgcgctgctgcagccgatgaccggcaacgatgccgatggccgctaccgcggctatgacgatggcatccaccgtgccgatggctggacctattacgagtacttctcgctgtgggatacctatcgcgcgcagaaccagtggctggcactgacccgcccggacgtggcgcgcgacatcggccgcaccctgctggcgatcgatgagcagggcggttggctgccgcgctggggctatgccaacttcgaaaccaacatcatgaccggcgatccggtcaccccgttcatggtcgacctgtggcgcttcggtgcactcaagggccgtgaatcgcaggcgtgggatacgctgcgccgcaatgccttcggcacgccgccgctgaactcgcgcatggccggccgctccggcaacccgacctacctggacaagggctacgtggcctatgaccgtgcattcccgtccaagggcatggacgtcgatccgcaccacggtggttcggccacgctggagtacgcgctggccgactgcgcgctctcgcagatggccgacggcctgggccatgcccaggatgcggcgacgctgcgcgagcgcggccgcaactggcgcaaggtgtgggacccgcaggtgcgcgacgccgagaccggcttcaccgggttcccgcgcccgcgtaccgaggacggccagtggtacaccccgtccgacggccaatacagcccgcgctcgcaccatggcttccatgaaggcaccgcgtggcagtaccagtggctggcgcagcaggacgtgccgggcctggtcgaagcgatggatggccgcgagcaggcgggccgccgcctcgatgcgttctttgcgatggacgcgctgcaggccgacccgctcaatgccgcccgcaaggcgtgggtggtcgggccgtacagctactacaaccagttccgctacaacccgaacaacgagccggacctgcactcgccgtggctgtacacgctgatcggccagccgtggaagaccgcggccgtggtgcgtgccgcgcagcagctgttcaccaatgcccccaacggtgtgaccggcaacgatgacctcggcacgatgtcggcctggtacctgttcagtgccatcggcgtgtacccggcggtgccgggcagcggccagttcctgctgcacaccccgcgcttcagcaaggtggaagtggacatgggcaatggccgcaccctgcgcatcgacgcgccgggcgccgatggccgccgcctgcagtatgtgcagggcgtgcaggtcgatggccaggcgcatgcaccggtgtggctggactggaaccgcctgcagcagggcccgcgcgtgcgctttgcgctggatgcgaaggtgccggagcagggctggggcacggcggtgaaggacctgccggtatcctggtgcgcggcaccgggcagccagctgcgctga

SEQ ID NO: 495375 - DNA, 3078 bp, Stenotrophomonas maltophilia
atgggaatgaagcattcaacacgtacgcacggccaggacgcattgtcgctggccatcgcgctggccctggctgccgccgtcattccggcaggcgccgccgcgcagcaggccacgtccaccggctcgcaggacgccacgactctggacagcgtccaggtcaccggctaccgctacgccatcgaaaagagccttgagcagaagcgcgacgccaacgccgttgtcgaagtgatcaccgccgaggacgttggcaagttccccgacaagaacgtggccgacgcactgcagcgcgtgcccggcgtggtcatcacccgcagcggtggtgaaggcaagagtgtcagcgtgcgcggccttgcgccggacctgaccctgacccagttgaatggcaactacgtggccacgtcggaaaccaacgacgaagccacccgttcgttcaactacaccctgctgccgtcgaacatgctgtccagcgccgagctgttcaagtcgccggaagcccgcatcgacgaaggcggcatcggcggcacggtcatcctgcacacgcgccgtccgctggacatggagtccaactcgggcttcgtcacgctcgagggcacctcctccgatacccaccacgatatcgacccgcaggcctcggccctgtattcgtggcacagcaaggatgagcgtttcggcgtgctggtcggcgtcacccagcagaagcgcaccacccgcaccatggaggccagcaccgaggactaccagtggtacggcgccggcaaggcacgcgacgcctatggcaacgtgcagcagcaggatggcatccactactggtggggcaagtccggtttcaacaaccagaccggcggcaactacagcgacttcttcatgccgacctcggtgaacttcgcggtgaaggaagaaaagcgcgagcgcaagggcggccagctgaccttccagttcaagccggtcgacaacgtcacgatgaccgccaactacttccgcttcgagctgcagggtgactacacccagaacatgctgaagattccggaatggagcatggcgcgctacaaccaggacggcaactgggccggaggccgccttctcaatggcctggacttcgatgccagcggcaacaccgtcacgggtgcccaattcgaaaagctggctggaaagacctactactgcagcgaagaccaggccaaggccgccggcctcaagcccggcggctggggcccggacgactgcacgattccgacaccgcagctgaccggtggctacagcaaggaaaaggcgctgtcgcagaccgccgacctgaccatcgactgggacatcagcccgctgtggaaggcctcgttcaccggtggccgcacctggtccgaaggtggtccgtcgatgaacttccgcatgtcggccaagccgcgccgcaaggtcggcaacgactacctgtccggtaaccagtacagcgcatgggacctgaccggcacgccgtctgccaccttctcgcccgacctgcagcagcaattgatgaacggcatcgccgaagtcgacaccggctcgaccgattcgtcgtggaagcgcaccgaggtcaagcagaactacttccaggccgacgtgaccaagctgttcgagtccggttggctggattcgatccagttcggtgccaaataccgtgatggcaaggtccaccgcaacacgggcaacacctactgggtatgcccgggccgtgacccggccgactatgacaacagccgctaccagagtggctgcgatccgactgccggcgatgcgcagcccggcttcttcctgtcgaacccgatcagcaacattgccggtggcttcaatgccaacgtgttcccgggcatcaactacccggcgtacatcgactatctgaacaagacctacggtggttcgcacaaccgtaccgaggaagacttcgtctacaacgtcaacgagaagatctactccggctacttccaggccaacttccgcaccgaacgcctgcgcggcaatgtcggcgtgcgtgtggtgcgcaccaagcagttcgcgcagtcttccgactcgatcgagaagttcaacgactacttcctggacaacgcgtccggcgcgccgatggcgtgcaccgaccccgccgctgcggcctacccgacctacagctgcgagagcggcttcgtgcgcctgccgcatgacctggcgcagagcaagacctacagcctgatcggcgtggaccgcacctacaccgacgtgctgccgagtttcaacattgcatgggacatcaccgacacgctggtgctgcgtggtgccgcatcgaaggtgatcgcccgccctggctacaccgacatcgcagcaccgggcgcactgagctactacagcgaggagtacgtcaatgatcgccgcgttgccggtggcgcatcgaccgcaggctgggtcggccagggcagcaacaagcagctggagccgttcaaggccacccagttcgacctgggcctggagtggtacttccagccgggcgcggtcgccggcgtcagcctgttccgcaagaacgtggacaacttcaccctgccggtggtgcgcgacacgcccatggtcatcaacggtgaagcggtgaacgtgcagcgctacgagacccaggccaatggccgcgatggtgtgtcgcagggcgtcgagctgtatggccagtacaccttcgatttcggcttcggcgtgcaggccaactacacctacaacgacaccaacctggcttccattgttctggacgggcaggaaatcggctcctcgccgctggtcggcagcgccaagaaccaggccaacgtgacggtcttctacgagaacgagaagttcctcgcgcgcgcctcgttcaaccgtcgcggccaggtggtcggtgggctcaacaatggcctcaccgtctacaccgagccgtatgaccagctggacctgaacgtggcctacaacctgaccccggactggaccctgaccgcatcggtgatcaatgccaccaagtcggagcagcgcgtgcacctgggaagcgacaccaaggcacgcctgatctccaatacctatgcaggccgccagctgtacttcggcgctacctggaagttctaa

SEQ ID NO: 495376 - DNA, 195 bp, Stenotrophomonas maltophilia
atggaattccatgtcgacggcatgacctgcggcggctgtgcgcgcagcgtgacccgtgcgatccagcagatcgatccgaacgccagcgtggtggccgatccgccgaccgggctggtcaaggtgcagaccaccgcgtcgcaggaacaggtgttcgccgcggtgaacgatgccggcttcccgccgcgtactgcctga

SEQ ID NO: 495377 - DNA, 456 bp, Stenotrophomonas maltophilia
atgaatatcggtgaagccgccaaggcctccagcgtgtcggcgaaaatgatccgctactacgaacagatcggcctgattcctgcggctgatcgcaccgagtcgggctaccgggcgtactcgcaggcggacatccaccgcctgcgcttcatccgccgcgcgcgcgacctcggcttccaggtggccgagatcaccgatctgctgggcctgtggaacgacacctcgcggcacagcgccgacgtcaagcacctggccgaacagcacattgccgacctggagcaacgcatcgagcacatgcggcagatggccgacacgttgaaatcgttgatcagttgttgtgcgggcgacgagcgcccggaatgcccgatcctggagcggttgggcgaagaccatgatgccccggtgccggtcgtcgccgccaagaccggcgcggtgcggcgacgcgcacagaagcattga

SEQ ID NO: 495378 - DNA, 2502 bp, Stenotrophomonas maltophilia
atgagcacgccccgcgccactgcagcccccgcaagccctgccaccatcagcctgcccatcgagggcatgacctgtgccagctgtgtcggccgggtcgaggcggcgctgtccagggtcgaaggcgtgggcagtgtttcggtcaatctggccaccgagcgcgcggatatccgcccgtccggtccggtcgatcgggccgcgttgatccaggcggtggagcgggtgggctacgacgtgcccgctgccaccaccgagctgtcggtcgagggcatgacctgtgcgtcctgcgtgggccgagtcgaacgtgcgctgttggccgtgcccggcgtcagccaggccagcgtgaacctggccacggagcgcgccacggtgcgtggcgtggcggaagttgcagcgctggtcgccgcgatcgacaaggccggctatgacgcacgcgtgattgaagccggcgtgcagtccgatgacgaggccgcggaaaagaaggatgccgagcgcgccgaactgaagcgcgacctgatcgtggcgtccgcgctggcgctgccggtgttcgtgctggagatggggtcgcacctgatccccggcatgcacgaatgggtgatgtccaccatcggcatgcaggccagctggtacctgcagttcgtgctgaccgcgctggtgctcgccatcccgggccgccgcttctaccagaagggcatccccgcgctgctgcggctggcgccggacatgaattcgctggtggcggtgggcactgccgcagcgtttggctactcggtggtggccacgttcctgccgacgctgttgccggcgggcacggtgaacgtctactacgaagcagcggcggtgatcgttgcgctgatcctgctcggccgcttccttgaggcccgggccaagggccgcacctccgaggcgatcaagcgactggtcaatctgcaggcgaaggttgcccacgtggtccgtgacggccggacggtggatgtcccggtcaatgaagtgctgagcggcgacgtggtggaagtgcgcccgggcgagcgcgtgccggtcgacggcgaggtggtcgagggccgcagctacatcgacgagtcgatgatcagcggcgagccgatcccggtcgagaagcagccgggcagcagcgtggtgggcggtacggtcaaccagaagggcgcactgacggtacgtgccacggcggtgggcgcgcagaccatgctggcgcagatcatccgcatggtcgaacaggcgcagggctcgaagctgccgatccaggcggtggtcgacaaggtcaccctgtggttcgtgccggcggtgatgctggccgcgctggcgaccttcgcagtctggctgatcttcgggccctcgccagcgctgagcttcgcgctggtcaatgcggtggcggtgctgatcattgcctgcccgtgcgcgatggggttggcgacgccgacctcgatcatggtcgggaccggccgtggcgccgagatgggtgtgctgttccgcaagggtgaagcgctccagttgttgaaggatgcacaggtggtggcggtggacaagaccggcacgctgaccgaagggcgcccgcgcctgaccgatctggagattgctgccggcttcgatcacaacacggtgctggcggcagttgccgcaacggagtcgcgctcggagcatcccatcgcccgcgcgattgttgatgccgcgaccggccagggcatcgcgttgccgggcatggtcgacttcgaatcggtcaccggcatgggcgtgcgggccagtgtcgagggtgcacgcgtggaggtcggtgccgatcgcttcatgcgcgacctgggcgtggacatcactttgtttgcgacgctggcggcagagctgggcatccagggcaagtcgccgctgtatgccgccatcgacggccgcctggccgcaatcatcgcggtatccgatccgatcaagccgagcacgccggccgcaatcgcggcactgcatcagcttggccttaaggtggcgatgatcaccggtgacaacgctggtaccgcgcaggcgatcgcgcgccagctcggcatcgacgacgtggtggccgaggtgctgccggaaggcaaggtcgaggcggtgcgccgcttgaaggccacacatggccatgtcgccttcgtcggcgacggtatcaacgatgcgccggcgctggccgaggccgatgtcggcctggccatcggcaccggcaccgatatcgcggtcgagtcggccgatgtcgtgctgatgtcgggcaacctgcagggcgtgccgaatgccattgcactatcgaaggcgacgctgggcaacatccgccagaacctgttctgggccttcgcttacaacaccgcattgattccggtggcggccggcgtgctgtatccggtctggggcgtgctgctctcgccggtgttcgcggccggtgcgatggcactgtccagcgtgttcgtgctgggcaacgcgctgcgcctgcgccgcttccagccgccgatggcggacgcccccgccgcgatccattga

SEQ ID NO: 495379 - DNA, 2958 bp, Stenotrophomonas maltophilia
atggctcagatcgtccacaagcgtcgccacctgctgtcccaggccctgatcctggccctgttgccgctggcagccagcgcgcaggaagctgccagttcgtccaccaaggatctggacgcggtcaccgtcaccggctcgcgcatcaagcgcgccagcgtcgagggcccggcgccggtcaacgtgatcaccgccgcgcagatccagaaggaaggctttgtcagcgtgtacgacgcgctgaagaccctcaccgaggccacaggcaccgttgaagccgcatcgcaatggggctcgcatacgcccaatgccagcggcctgaacctgcgcgggatgggcccgaaccgctcgctgctgctggtcaatggccgtcgtgtagcggattacccgctgccctacggtggcgaaaccaacttctccaactacggcaacattccggccgcggcggtggagcgcattgaagtgctgaccggtggcgcctcggccatctacggttcggatgcgatcgccggcgtggtcaacgtcatcctcaagaccaactacgacggcgacgaagtgcgcgtgcgcggcggcacttccaccgaaggcggacgtgatacctgggatctgtcctgggccggtggcaagaccggcgacaactggagcgtgacctacgcgctgcagtacaccaagcgcgacccgctgttcgggcgtgatcgcccgcagatggacgatgccgacgatgcgccgtacccgtcctggaacatggaacaacgcaaggtcggcttccgtcccaccgccggtctggcgctgatcgatccgaccacgggccagcgcctggcgccgcccaccggcacctgcgaaaaattcgacggcgagtattacaccgccgatcgattggtctacaactacgccgccaaccgcatcaccaacaccggccgcctgtgcggcatgagcgccgactacgccaactggctgcttaccggcggcgccgagaacgtgtccggaaacctgtacgccaccttcgatttcagcaatgacctgcaggtctggaccaacctggcggtgtatcgctccgaagcgatctggggcaccaatccgcccggcgtgtcgctgatcgacgatgacaacggctattactgggatgccaaccgcaaccggccgatcctgggcgtgcgccagttcaccccgaacgaagtcgggggcctggatacgctgcgcaacaccaaccgcgaactgtcctgggactggagcgcgggcctgcgcgggcgcctggccgaccgttttgactggagtgccacggtggggcgttcctattaccgcgtggaagaacggcagaacgtggtcgacaagcagaagtcgtatgactacttccttggcccgcgcctgggcaccaccgccgatggcgaggcgatctatgcgttgaacgaatcgcgctggtggaacccgctgacgccggaccagtactggcagatggggaccgtggcgaagaaccgcgcggcgtcatgggtcaaccaggcgtcggcggatatcaccggcgagctgttccagggctgggccggcccgatttcgtttgcggcggtggctgaagtcgcgcagcagggctatcacctcagtccggacccgcgcgctggcatcgacttcgacctgcagaatgtcgatcgcggcggcggtgagcgtacccgctactcggccggcgtcgagttcaagatcccgctgttggacagcgtgaccgccactgcggccgcgcgctacgaccgctatggcaactacaaggccgatgacagcagcgaagcgctggacatcggcagccagaaggaaaccacctggaacgtcggcctggaatggcgcccggtcgaatcgctgctggtgcgtggctcatacgccaccagcttccatgcgccggacatgcattacctgctgggccagccgagcagttcggaagtgcagacctatgaccgcctgcgctgcatccagagcggcgcgtacctggtcaacaactgtggcgtgggcaacaccgacgtctggtacacgttcgacgtgaaccggcgtgggacgccgctgctgcgctcggagaccggtgattcgtggacggtcggcttcgtctgggacgtgctgccgaacctgtcggtcagtgccgactactgggcgatcaagctggaagacatgatcgtcgacgtcggcgccgatgaggtgctggccagcgaggccggctgcctgaccggcaagaacatggacggtacgccatgggccaacccggccggtggcgagtactgcgccggcatcctggcccgcgtgaaccgtgacagcaacggtcgcctggtatcgatcgagcgcggcccgttcaacctggccagccgcgaggtgcgcggcatcgacctgaccgcgcgctatcgcctggaaaccgcgcggtggggcagcttccagctgggcgtgaactacaccaaccagatctcgaccaaggagcaacgctacgccgccgacccgaatccggaacgccgcgatcgcgacctgcgcagcaagctgcgcgcgagcctggcctggcagcgcggcaactggaacgccaacgtctatgccgaccgcatcggttcggtgccgggcgtgcgctaccactggggtaccgaccgcctggacaaccccggtggctgcctgccgttcgccgatggctacgtgcccagtgacagcccgtcgctgaactgcctggagccggcacggctgccggatggttcggtgaacccgaaccccaacgccgggcagcagacggcgcgctactacggtcgagtggggccgttcatcacctggaacttcaacgtgggctaccagctgaccgaacacgcgaaggtaaacgtgtacgtcaacaacgccttcaacgccgccagctggaaccacaaggacccgtacaagctggattacgacttcgctccgacccgcctgctgggcgcggtcggccgcgagttcgcgttggagtatgtgttcaccttctga

SEQ ID NO: 495380 - DNA, 732 bp, Stenotrophomonas maltophilia
gtgagtacgcggcggaccctggagatcgccagcaactcgctggcctcggcgctggctgcgcaggctggcggcgccgaccgcatcgaactgttcgacaacctggccgagggcggcaccacgccgtcgttcgccagcatcgcgatggcccgcgagcgcctgtcgattccgctgttcgtgctggtgcggccacgcccgggcgacttccactacgacgcgctggaaaccgaactgatgctgcgtgacatcgcgcagtgccgcgcgctgggttgcgatggtgtggtgatcggcgcgctggacgtgcagggcggcatcgacctggcgctgtgccgggaactggtgcaggccgccgggccgttgcaggtgaccttccatcgcgccttcgacgccgcccgcgatctgccggcggcgctggagcaggtgatcgggctgggctgccagcgcgtgctgacctcgggcgggcaggccagcgccgaggccggtgccgatgtgctggcgggcctggtcacccaggcggcggggcgcatcacggtgatggctggcgccggattggccccgggcaacatcgcaaccgtcgcgcggcagaccggctgtaccgaactgcacgcctccgcaaaaggcctgcgccgctcggcgatgcagttccagaacccggcgctgcgcggtctggacccggactggagccagaccgccaccgctaccgtggccgcgctgcggcaggcgctggacggctga

SEQ ID NO: 495381 - DNA, 999 bp, Stenotrophomonas maltophilia
atggtggatcgcaggcagttcctgcaggccggtgcactggtcgcaggcatggcggcattgccgggcgtgcaggcgcgcacgcagggtggggcccgggtggtctccacctgggacttcggcgtaccggccaaccagaccgcatggaaggtgctggcgcaggggggcagcgcgctggatgcggtggaggcgggcgcacgctgggccgagagcgagctgtgcaaccccaccgttggccattgcggcaatccggatcgcgacggcgtgctgagcctggatgcgagcatcatggacggcgatggccgttgcggtgcagtggccgcgctggtggacatcctgcatccggtgtcggtggcccgcaaagtgatggagaacagcccgcatgtgctgctggtcggcgagggcgcgcagcagtttgcggtgcagcaggggttcgagcgcaagcatctgctgacgccgcaggccgaagcggcctggcgcgagtggctgaagaccgagaagtaccagccgcagatcaatgccgagcgccgtggcattcccggcaacagcgacaaccacgacaccatcggcatgctggcactggatgccaagggccggctggccggtgcctgcaccaccagcggcatggcgtggaaactgcacggtcgcgttggcgacagtccgatcatcggcgccggcctgtacgtcgacaacgacgtcggcgcggccactgcttcgggtgtgggtgaggagatgatccgcaacgcggcttcgttcctggtggtcgagctgatgcgccaggggcgttcaccggcgcaggcctgccgtgaagccatcgaccgcgtggtgcgcaagcgcccggaagcgagcagaacgttgcaggtgtgcttcctggccatgaacaagcagggcgaggtcggcgcctacgcgctgcatcgtggcttcgtctatgcggtgtgcgatgcgcagcgccaggatgacctgcgtgactcgccgtcgatctacacgagcacccaggcgtga

SEQ ID NO: 495382 - DNA, 1023 bp, Stenotrophomonas maltophilia
gtgaccatcgcagcagcgtcaacggtttcctccgactccgcccgcggcggtcttccgcgccgtctggtcgtcgccgatgtcggcggcacctttgcccggctcgcgctggcagaaacccgacccggccagacgccgctgctgggcagccaccgtacctatgcctgtgccgagcattccagcctggccgcgatcctggccgatttcaccgccggcctcggccaaccggtgcagaccgcggtggtcgccatcgctggcctgctggatggcgatgtgctgatcaactcgaacctgccgtggacggtctcgctgtcggccacccgcgcgcagtccgggctgcacgaactgcagctgatcaatgatttcgaagcggtggcgctggccatcccctacctgcagccggaaaccctggtgccactgaacggcgacgccgatccggcgcaggccttcccggcgctggtactgggcgcgggtaccgggctgggcgccgcgctgcgtttcgctgatggcgagcgtccggtgctggccagcgagatcggtcatgccgcgctgggcgccggcaacgcgctggaactccaggtgctgggccgcctgctgcagcgttggccgcacgtggacaacgaacgcgtgctgtccggcagcggcctgatgaacctgtatccgtgcctgtgcgaactgcgcggcgtcaccccggtgtggaacagtacggaggcgctgatcggtgccgcgcgtagcggtgaggatgcactggcggtggaaacgttgcaggtcttctgtgcgtggctgggcagcctggccggcgacgcggcaatcgccgtcggcgcgcgctcggtgtacctggccggtggcatttccgcgcatgtgcaggatttcctggccgatggccgcttccgtgagcgcttcctcaacaagggcgtgctgaccgaggtgctgcgccaggtgccggtgtggcgcgtggagcatggccagctgggcgtgcttggcgcagcggtctggcacgccgcacggcagcccacgcacgactga

SEQ ID NO: 495383 - DNA, 285 bp, Stenotrophomonas maltophilia
atggatatccgcttcatggccggcaccacaccggtgaccctcagccgccactggttcaccggcgcgatgctgctgcagagcgccaccgagaaggtctgggtgcagcacccgctgcatccgggcacccacttctcgttctcgctggtacagtcgtggctgcgccacatcgccggccacgaagtgctggtcgagcgcacccggccgctgctgttcgccggcttccgcccgcagcgcctgcgcgtgctggtggatggggtgcaggtggccgaacaggaaggcatgtag

SEQ ID NO: 495384 - DNA, 1590 bp, Stenotrophomonas maltophilia
atgaaactgcctgccgcctggctgtgctgcctgttgctgacctcgccggcctgggccgcggacaccgtggtcagcggcaaggtctatctggagcgtgacggcaagcccggccgcggtgcgaccgatccgggcctggccggggtgcaggtttccaacggcgagaccatcgtcaagactgccgctgacggcagctacagcctgccggtgcgcgacggccagaccgtattcgtgatcaagcccgatgcctacgccttcccgaaggcggcggacggcctgccttcgttctggcgccactaccgcccgaccggctcgccggcgctgaagtacggcggcatcgccgcgaccagcgacgtcacccgcaactgggacttcgccctgcagtcggatcgccatgacagtcgccgtggtttccagatgctggtgttcaccgattcgcagaccgccagcctgaaggacatcggctactaccagcagtcgatcgtggcgccgctggtcggccagaccagggcacgcatgggcaccaccctgggcgacatcgtcaacgacgacctgaccctgtacccggcgatcaacaaggtcaccaccgaactcggcgtgccgtggttccacgtgccgggcaaccatgacctcgacttcgatgcggccagcgacgaacactcactggacagctggcgcaacatctacggcccggacacctacgcggtggaagagggcggcgccagtttcgtgttcctggacgacgtggtgtacgaccccaaggccaggccgaagtacgtcggcggtctgcgcgaagaccagttcgccttcctcgccagctacctgaagggcctgcacaaggaccgcctgctggtgctgggcatgcacatcccgctgttcgacgcggcgccggggcgcgagaccttccgccatgctgaccgccagcgcctgttcgacctgctgaaggacttccgcaacgtactggtgctcagcggccacagccacacccagcagcacgtctaccacggtaaggccgagggctggaacggcgacaagccgctgcacgaatacaacgtcggtgccaactgcggtgcgttctggtcgggcgtgaagaatgccgctggcgtgccggacagcaccatgagcgacggcacgccgaagggctatgcattgctcgacgtggccggcaacggcagctatcgcctgcagtaccgcgtggccggcaggcaggccagcgagcagatcggcctgcacgcgccgaaggtgctgcgccagggggcctacccggcgtggggtgtctacgccaacgtctacatgggcgaggatcggagcgtggtcgagtaccgcgtcgatggcggcgcctggcagccgatgaagcaggtcagccagcccgaccctcgcctgatggtggagaacgtggccgatgatctggccagcagcctgcgcggctacgaccgttcaccggaggccactgcatcgccgcacctgtggcgtggcgcgctgccgaccgatcttgcagtgggcagccataaggtcgaggtacgctccacccagcctgatggcgcagtgttcaccgccaccaccagctacagcctgcagactgcccagccctga

SEQ ID NO: 495385 - DNA, 621 bp, Stenotrophomonas maltophilia
atgtctattgaagtgaggccatcgctggatgcgctgcaggcgctggactggggcaaggacgacggcctgctgccggccgtggtgcaggatgccgataccctgcaggtgctgatgctgggctatgtcagcgccgaatcgctggcggctacgctggccatcggccacatgacctttttcagtcgcagcaagcagcggttgtggaccaagggcgagcagtccggcaacgtgctggtggtgcagtcgatccgtgtcgactgcgacgccgatacgctgctggtgatggcgcgcccggccgggccgacctgccacaccggtgccgagagctgtttcgaccaggcgccgaaggatttcctgggtgggctgggccagctggtggccatgcgtgacgcgcagcgccctcccggcagctacaccaccagcatgtttgaaggcggcatccgccgcatcgcgcagaaggtgggtgaggagggcgtggagaccgcattggccgccgtggcgcaggatgatgaggcattgctgggcgaggcgtcggacctgctgtaccacctgctggtgctgctgcgcgcgcgcgggctgtcgctggatgatgcgcgcgcggtgctggaaaaacgccatcgttga

SEQ ID NO: 495386 - DNA, 777 bp, Stenotrophomonas maltophilia
atgttgagccgccgcatcattccgtgcctggacgtgcgcgatggccgcgtggtcaagggcgtgcgcttccgcgatcacgtcgacatgggcgacatcgccgagttggcacagcgctatcgcgaccagggcgcggacgagctggtgttctatgacatcggcgccagtcccgaggcacggtcggttgacgtcgcctggatcgagcgcatcgcgcgcctgatcgacattccgttctgtgtggccggtggcatcgacagcgtggaaaccgcgcgccgcgtgctgttcgccggtgccgacaaggtgtcgatcaattcgccggcgctgggccggccggagctgatcaccgagctggcggacgagttcggcgtgcagtgcgttgtggtgggggtcgattcggtgcgcgaggccgacgggcaatggcgggtgcgtcgtttcagcggcgatccggacaagacccaggcggtgccgctgcgcacgctcgactggatcgtcgaagcgcaacggcgtggagccggtgagatcgtgctgaactgcatggacagcgacggtgtgcgccgtggctacgatgtcgtgcagctgcagcaggcgcgggcgctgtgccaggtgccgctgattgcctccggtggtgccggagcgatggagcacttcgccgacgccttcgaccaggccgacgtcgacggtgcgttggcggccagtgtgttccacagcggcgccatcgccattccagaattgaagcgctacctgcgcggacagcagatcgaggtgcgggatgtctattga

SEQ ID NO: 495387 - DNA, 735 bp, Stenotrophomonas maltophilia
atgagtttcatcgtctaccccgcgctggatatccgcgacggccgcgtggtgcggctgcgccagggcgactacgcgcaggaaacctcctatggggatgaccctgtgccgcgcgcgcaggccttcgccgcgcagggcgcgcagtggatgcacctggtcgacctggatgccgcacgggccggtggctacacgctggcgccgctgttggcatccattcgcgcgcagaccccgctgcaggtgcagaccggcggtggcgtgcgcggccgcgacgatgtggcgcgcatcctcgaagctggcgccggccgcgtggtggtgggttcgctggcggtgcgtcgtcccgatgaagtggtcggctggctggaggaattcggcgccgatcgcatcacgattgcgctggacgcgcgccaggacgcacaggggcaatggcagctgccggtgcacggatggaccgagaacgccggggtgaccctggatgacctggcccggcgctacgcgcacgccggcatgcgccatctgctgtgcaccgacatcgcccgcgacggcatgctggccgggcccaacatcagcctgtaccagcacctgtcggcgctgttgccgggtgtggcggtgcaggcgtccggtggcatccgtgacgtggccgatgtggccgaggcgcgtgctgccggctgcggcggtgccatcctcggcaaggcactgctggagcagcgcatggacctgagcgaggcgttggcatgttga

SEQ ID NO: 495388 - DNA, 603 bp, Stenotrophomonas maltophilia
gtgagcgatgttgcgctgatcgatgccggtggcgccaacctgggctcggtgcgctacgcactggagcgcctgggcgcgacggtgcggctggtgcgcgatgcggacggcctggttggtgcgcggcgggtgatcctgcccggcgtcggcgccgccggtcccggcatgcagcgcctgcacgctcagggcctggtggaaccgctgcagcgactggaggtgccgctgatgggcatctgccttggcatgcagctgctgttcgaacgctccgaggaagcgggcgtagagacactggggcttgttccaggcgtggtgcgcaagctggtgccagcctgtggcatccgcgtgccgcacatgggctggaaccgcctgctgccgctgcgcgaatcgttgttgctgcagggcgtgccggaacgcgccagcgcctacttcgtgcacagctatgcggcgccgctcaatacccacaccgtcgctgcctgcgaccacggtggcctgttcaccgccgtggtggagcaggggcgctactacggcgcacagttccatcccgagcgctccggcgagaccggctcgctgatgctgcgcaacttcctcgagggcactgctgcatga

SEQ ID NO: 495389 - DNA, 1074 bp, Stenotrophomonas maltophilia
atgaccccgatcctgttcattgaccgcgacggcaccctcatcgaggagccgtccgacttccagatcgacgcctacgaaaagctgcgcttcgtgccgcaggtgatcccggcgctgctgaagctgcgtgatgccggctaccagttcgtgatcgtcaccaaccaggatggcctcggcagcgacagctacccgcgcgccagcttcgatggccccaacgacctgatgctgcagatcttcgagagccagggcatcaccttccgtgacgtgctgatcgattccagctggccgcaggacaatgcgccgacccgcaagccgggcatcggcctgatgaccgcctacctgcaggaccgcagcatcgactgggcacgctcgggcatggtcggtgaccgcatcaccgacctgcagtttgccgccaacctcaacatccgtggtttccagctgcgcaccgcgcagtttggtggggagtgggactggccgggcatcgcccatgcgctggccgacgcgccgcgcaccgccgttgtccagcgcaacaccaaagaaacgaagatccgcgttgagctggacctggaccgcgcgggtgatgcacgcattgccaccggcctgccgttcttcgaccacatgctggagcagatcggcaagcacggcggcttcgcgctggacatccaggccgagggtgacctgcacatcgacgagcaccacaccatcgaggacaccgggctggccctgggccaggccctgcgcgaggcgttgggcgacaagcgcggcattggccgttacggcttcaccctgcccatggacgagaccctggccagcgctgcgctggacttcagcggccgcccctatttcgtgttcgagggcgagttcaagcgcgagcgcgtgggcgatatgccgaccgagctggtgccgcacttcttccgttcgctgtgcgatgccagcggtttgaacctcaacctgcaggtgcgtggcgacaacgatcaccacaaggtggaggcctgcttcaaggcgctggcgcgcgcgctgcgtccggcgctggcccggcagggcacggcactgccgagtaccaagggggcgttgtga

SEQ ID NO: 495390 - DNA, 1095 bp, Stenotrophomonas maltophilia
atgagcgcggcgatcgatgaggtgctggcactggtgcgcccggacctgcaggccttcgccggctacagctcggcacgcagcgcggcggtgcagggcgaggtctggttgaatgccaatgagtcggcctgggccaatgcggccgataccgcaggcagcagccggcgctatccggagccgcagccgctcgcgctgcgcgagggactggcggcgctgtacggcgtgacgccacagcagctgctgatcggtcgcggcagcgacgaagccattgatctgctggtgcgtgcgctgtgcgtgccgggtcgcgatggcgtgctggtcacgccgccggtgtttggcatgtacgccgtctgcgcacgcctgcagggtgccgccttgattgaagtgccgctggtggacagcgaggatggactgcgcaccgatctggatgcggtgatcgacgcggccaaggcgcagggtgccaagctggtgttcctgtgtgcgccgtcgaacccggccggcagtgacatcgccctggatgaggtcgagcgcgtggcggttgcgctgcgcgggcaggcgctggtcgtggtggacgaggcctatgtcgagtatgcacaacggccctcggcgaccacgttgctggccgcgcacgccaatctggcggtgctgcgcacgctgtcgaaggcgcacgcgctcgcggccgcccgcgttggcacgctgatcgctgccccggagctgattgccctgctgcgtcgctgccaggcgccgtacccggtaccgacgccgtgcgcggaactggccgtgcaggcactgcagccggccgcgctggcgcgcaccgccgagcgcgtgaccacggtgatcgccgagcgcgagcgcctgcgtgcagctctggccggcctgcccggcgtgtgccgggtgtatgcctcggccggcaactacctgctggtccgcttcgccgatccccagtccgcgttcgatacgctgctggctgcaggcgtggtggtgcgcgaccagcgcgctgcgccgcagctgggtgatgcgctgcgcatcagcatcggcagccccgaagagaatggccgcgtgcttgcggccctgtcggcgcggagggccgcagcatga

SEQ ID NO: 495391 - DNA, 1296 bp, Stenotrophomonas maltophilia
atgaaccgtctgatctggtcccgacttgatgaggccgcgcgcagcgcggcattgacccgcccggtgcaggccgtggcgcagcagacccgcgatgccgtagcggccctgatcgcgcaggtgcgtgcacagggcgacgacgcgctgcgtgcaattacggcgcgtttcgatggcgtcgagctggcctcgtttgaagtttccgaagccgaattcgccgctgccgaagccgccgtgcccgccgaactgcgacaggcgatggtggacgccgccgaacgcattgcgcgcttccacgccgctggcatgggcaaaggctatgcagttgaaaccgcgccgggcgtggtctgcgaacgcatgctgcggccgattggccgggtgggcctgtacgtaccggctggcagcgcgccgttgccgtccaccgcgttgatgctgggcgtgccggcgcagctggccggttgcccgcaggtggtgctgtgcaccccgccgcgcgccgacggcagtgccgatccggcagtgctggtagccgcccgcctgaccggcgtgcagcgcgtgttcaagctgggcggcgcgcaggcgatcgcggcgatggcctatggcacggccagcattccggcctgcgacaagctgttcgggccgggcaacagcttcgttaccgaagccaagcagcaggtcgcacaggacggcgccgccgccatcgacatgcctgccggtccttcggaggtgctggtgattgccgatgctggcgccaatccggcgttcgtcgccgccgacctgctgtcgcaggccgagcacggtccggattctcaggtgctgctgctgaccgacgacgccgtgatgctggcggcggtcgaagccgaggttgagcgccaggtggccctgctgccgcgccagcagatcgcgcgccaggcactgtcggcatcgcggctggtgcaggtcgatgcgttggacgaggcgttcgcgatcagcaaccgctatgcaccagagcacctgatcctggccctgcgtgatccgcgcgcatggctggacaaggtgcaggcggccggctcggtgttcctgggcgattacacccccgaagcactgggtgactactgcagcggcaccaaccacgtattgcccaccgccggtgccgcgcgtgcctacagcggcgtgagcgttgccagcttccagaacctgatcagcgtgcagagcgccagcgccgccggcctggccgcgatcggcggctgcgcgcgcatcatcgcccgtgccgaaggcctggatgcgcacgagcgtgccgttgcgttgcgcatggaggtggcggcatga

SEQ ID NO: 495392 - DNA, 912 bp, Stenotrophomonas maltophilia
atgagtgcatcccaggcagcgccggcacgagaccggctgcgtatcgccatccagaagagcggccggctggccgagcccgcccgcaacctgctcagcgcctgtggtctgagctggcgcgagagccgcgacaagctgttctgctacggcgaatcgctgccggtggacctgttgctggtgcgcgacgacgacatccccggcctgatcgccgatggcgtctgcgacctcggcatcgtcggtcgcaatgaactggacgagcaggccgcagcacgccgccagatcggcctgccggacgcctaccaggcgctgcgcgggctgggcttcggccagtgccggctgatgctggcggtgcccgaggaatggcagtggcagggtccggcgcagctggccggcacccgcatcgccaccagctacccggccatcctcaagcagtggctggcggagcagggcgtggacgcgcaggtggtcgagctgtccgggtcggtggaaatcgccccgcgcctgggtaccgccgacctgatctgcgatctggtctccagcggcgccacgctgcgtgccaaccagttgaccccggtacacaacctgctcgacagcgaggcggtgctggctggtgcggtgcgcgtgccggatgacgcacgtgcatcgctgcgcgcgatgctgctgcgccgcctcgacggcgtggtgcagcgccaggaccgcaagctgctgatgttccgtgccagcgaagatcgcgtcgacgcgctggcgcagctgctggccgatgccgagccgctggtgcggctgccggccgatggtggcgcgctgcgcctgcagaccatgtgccccggcccgctgagctggcagcgcatggaagaactcgagcgtgcgggcgcgcagggcctgatggtattgagcgtggagcggtcgctggcatga

SEQ ID NO: 495393 - DNA, 309 bp, Stenotrophomonas maltophilia
gtgaaagcccgccccgagattgccgccaaagacccgaaggccgacctggaagccctggcccgggcctttgccgcgctgcgcgagccggagcaggtcgaggcattcctgcgcgacctgtgcaccccggccgagctggaggccatggccgaccgctggaaggtggtgccgctgctgcagcagggcgtgccgtaccgcgagatccacgagcgcaccggcgtcagcgtgaccaccaccggacgggtggcacgcacgctcgagcacggccatcgaggctatgccgccgccatcgaccgccttgcttcgcgctga

SEQ ID NO: 495394 - DNA, 297 bp, Stenotrophomonas maltophilia
gtgaagccggccgtcgcaggggtactcaccgtgctcctgttggcgggctgccagagtgacccggtgctgcgcagtgatcggctgggcccggcgcagtaccggctgcaggttgatcgctgtcacgtgatcgaccgcgcgcagcttgagggcgacctgcgggccctggcctcgcggacgtgcccggcgggtgcaggggcgttgcagaacatccagtccctgccgagccggcagggcagcctgttcggggagtgcccgcggcgcgggacgctgcaggcggaggtgcgttgcctgccctga

SEQ ID NO: 495395 - DNA, 1398 bp, Stenotrophomonas maltophilia
gtgatcaagccccgtaccccgcccggcacccttgagctgctgccgcgcgagcagattgcgttccagcgcatgctggacgtcatccgccgcaactacgagcgcttcgggttcctgccggtggagacgccggtgttcgagctgtccgacgtgctgctgaccaagtccggtggtgagaccgagcgccaggtgtatttcgtgcagtccaccggcgcgctggccaacgcggccgagtcgggcgaccgttcgctgccggaaatggcgctgcgcttcgacctgaccgtgccgctggcacgctacgtggccgagcacgaacacgaactgaccttcccgttccgccgttaccagatgcagcgcgtgtaccgcggcgagcgtgcccagcgcggtcgtttccgcgagttctaccagtgcgacatcgacgtgatcggcaaggacagcctgagcgtgcggtacgacgctgaagtgctggcggtcatccatgcggtgttctcggaactgcgcatcggtgacttcagcatccagctgaacaaccgcaagctgatgcgcggcttcttcgagagcctgggcgtggctgaaggcgagcgccagctggcggtgctgcgcgaagtggacaagctggacaagcgtggcgccgattacgttcgcgagacgctggtgggcgagggcttcaacatcccggcagaacaggtcgagaagatcctggccttcgtcgctgtgcgttcgcagggccatgccgatgcgctggcgcagctggccacgctggaagccggcgccggttcttcggagatcctgcgtaccggcgtcgccgaactgcgcgaagtgctgcagctggtgcaggcgctgggcgtgccggaaaccgcatactgcctgaacttctccattgcgcgcggcctggactattacaccggcaccgtctacgagaccacgctgaccgaccacccgcagatcggctcgatctgttcgggcggccgttacgaagacctggccagccactacagcaagtcgaagctgccgggcgtgggtatctccatcggcctgtcgcgcctgttctggcagctgcgcgaggcgggcctgatcgacggcatcgaagccagcagcgtgcaggcgctggtggcgctgatggacgagcagggcatgccgcagtcgctggacatcgcgcgccgcctgcgcgccggtggcatcaataccgaagtgcagatggagccgaagaagatcggcaagcagttccagtacgcggccaaggccggcatccgcttcgtggtgctggccggtgaagacgagctcgcgcgcggcgtggtggcggtaaaggacctgctgcgtgagcagcagttcgaagtgtcgcgcgacgagctggccagcaccctgctggtggagctggagcagtccagggcgatggtgtga

SEQ ID NO: 495396 - DNA, 753 bp, Stenotrophomonas maltophilia
atgtcacggccttccggcgctccgcccgccaccaacgatcccgcctcgccgtcctgcaccacgctggactgcctgcactgctcggttcggcaccttgcggtgtgctcggcgctgtcgccagacgaagtgcaggcgctggaacaggtcaccgtctcgcagcaggtcagcatgggcagcacgctggcccgcaccggcgaagagcgcgaccatgtctatacattgaccgccggcgcactgcgcctggtgcgcaccctggccgacggccggcgccagatcaacggtttcgtgctgcccggcgactacctgggcctgagcggcagcgaccaccaccgctacgacatcgaggccatcgccgacagccgcgtgtgccgtgtcgcgctgccacagatgaaggccctgcgcagccgcttcccgcacctggagcgcaagctgctgcagcgcgcctgccaggaactggatgccgcacaggatgctgcgctggcgctggcacgcctgcagccggccgagaagctggccgatttcctgctgcgcctggccgcgcgcgaggccaagctggggggcgacggcctgcgcgtgtcgctgccgatgggccgcggcgatatcgccgaccatctgggcctgaccatggaaacggtcagccgcaccttcaccaagctgcgccagcaggggctgatcgccctgccccacctgaacgtggtggagatcctcgacgaggatgggctgcgcacgctggccggtgaagggttgatctga

SEQ ID NO: 495397 - DNA, 1287 bp, Stenotrophomonas maltophilia
atgcaatttgtttcgacacgcgggcagtctcccgccgttggcctcagcgcggcgatcgccgctggattggcgcccgatggcgggctgtatgttcccgcgcatctgtcggccgcgcgcaagctgcaggccggggcgaccctggccgataccgccgccgatctgctggcaccgttgtttgcgggcgacgcacttgagactgcgcttccggggatctgccgcgaagcgttcgacttcccggtgccgctgcgtgcactcggcgagggtgaccatgtgctggagctgttccatgggccgacggcggcattcaaggatatcggcgcgcgcttcctggccggtacgctgtcgcggctgcaggtcggcaaggatcgcgatctgacgatcgtcgtcgccacgtccggcgatacgggtgccgccgttgcggcggccttccatcgccagccgggcgtgcgcgtggtggtgctgtatccggagggccgcgtgtctccgcgccaggcgcatcagctcggttgtttcggcgacaacatccaggccctgcgcgtgacgggcgtattcgacgattgccaggcgatggtcaagcaggcgctggccgaccgcgaactgcaggcgcaggtgccgttgagctcggccaacagcatcagcctgggccgactgctgccgcagatgagctactacgcgcatgcagcgttgacccactacgccgcgcatcgtcgccggctcaacctggtggtgccgaccggcaatctgggcaacgcgatggcggccgtgctggcgcgcgcgctgggcgtgccgatcggccagatcgtgctggccaccaatgccaatgccgtgctgccggcgtacttcaatggtggcgactaccagccgcaggccagtgtggcgacggtggccaatgcaatggacgtgggtgcgccgagcaacttcgagcgactgcgctggctctaccacggcgacgacgcagagctgcgtgcagctttccgcgcgttcgcggtggatgacgtgaccatccgcgcgacgattgccgcagcgcatgccagccgcggcgagctgttctgcccgcacacggcgacggcggtgaaggtgctgcaggatctgcgcgcgcgcggtgccaagggcgactgggcggtggtagctacggcgcatccagccaagttcgaggctgtggtcgagccgctgatcggcgaaacggtggcggtgccgcctgcgctggatgcgttgctgcagcgaccggcgcacgccgaaccattggcggcggattacgcggcgttgcgcgaggtgttgctgcgttga

SEQ ID NO: 495398 - DNA, 915 bp, Stenotrophomonas maltophilia
gtgatcgcacgtgcgttcgcgcctgcctcggtggccaacgtggcagtgggcttcgacattctcggccatgccattgccggtatcggcgataccgtgagcgtgcgccgcatcgacgagccggcggtgcggatcgatgcgatccgtggcagtgctgtcgcgctgccactggacgccgccggcaacaccgccggggctgcgctgatgtcgctgcgcgaaggcctgggcctggatttcggtttcgcggtcgagatcgacaagggcatcccgttcggttccggcatgggcggttcggcagcgtcgagtgtcgcggcgctggtcgccgccaatgcgctgctgcaggccccgttgccgcgcgaggcgctgtacccctacgcgctggacggtgaggcggtggccagtggtggccgtcacggtgacaacgtcggcccgctgctgctgggtggcctggcgctgtgtacggccgatcgcctgttgccggtcccggtgcctgccagctggcacagcctgctggtgcatccgcacgcggtgctggaaacgcgccgtgcccgccaggccctgcagggcagctatgcgctgggcgagttcgtggcccagagcgcgaacctcgcgctggtgctcagtggttgtcatcgcagtgatgcgacgctggtacgcgcggggctgcgcgacgtgctggtcgaaccgcgacgggccggattgattgccggcttcgaggccgcccgtgatgcagcgctgtcggcccatgcaatgggcgcgggcatctccggtgccggacccagtgtgttcgcctggttcgaggatgccgaccaggcccgtgccgccgtggcgccggtgcaggcagcgttcgctgcggccggcttcgacagtgacgcctgggtatcgccgctggatgcgccgggagcccggctgtgctga

SEQ ID NO: 495399 - DNA, 2505 bp, Stenotrophomonas maltophilia
atgtcttcccacgcccccgcccatcccgttgccccggccgatctggctgcaccgtccactgtcgtgcacaagttcggcggcacctcggtggccgatgccgaacgctatcgccatgttgccggcctgctgctggcccgtcctgagtcgctgcaggtcactgtcgtctcggcgatgaagggggtcaccgacgcgctgatcgatctggcgcagctggcggcaaagggtgaccagggttggcgcgaggcctggcatgccctgcgcgcgcgccaccgtggcgccgccgtggcgctgctgggcgagcaggtcggcgagacggtcgaatggatcgacgcccgcttcgatcagctggccgaagtgctggcggcgctggcggtgatcggcgagctgccgcgcgaggtgctggaccgcgtgcagggcctgggcgaagtgttctccgcgcagctgcttggcacccacctgcgcgccttgggcgaagactgtgcggtgctcgatgcgcgcgatgtgctggtggtcgggcatggcgagctgggcgtcgatgtcgactgggaagccagcgccgaccgcctcgcgcaatggcgccttcaacatcctcagccgcgcctggtcgccaccggtttcgtcgcgcgtgaccgtgatgaccgcatcaccaccctgggccgcaacggcagtgactactccggcgcgatcttcgccgcgctgttcaatgccgatgaactgcacatctggaccgacgtcgacggcgtgctgtcagccgacccgcggctggtacccgaagccgtgcagctcgaatcgctcagctacgacgaggcctgcgaactggcctacttcggcgccaaagtggtgcacccgcagacgatgtcgccggcgatccgcctgggcctgccgatcttcatccgcaatacgttccaaccggcgcatccgggtacgcgcatcagtgccgagcgctcgccgcgtgggccggtaaagggcctgaccctgagcccgggcctggccctgttgaacctggaaggcaccggcctgatcggcgtgccaggcactgcagagcgcgtattcgctgccctgcgccaggcgcaggtgtcggtggtgatgatctcgcagggttcgtcggaacattcgatctgctgcgtggtgcgcgccgccgaagctgcacgtggccgcgaggcgctgctgcatgcgtttgcgcatgagctgtcggtgggccaggtgcagcgcgtgcaggtcagcgagggcgtcagcgttctggcggcagtgggcgacggcatggccggccaacctggcgtggcggcgcgcctgttcgaggcgctgggccgcgcgcaggtgaacatcctggcaatcgcgcagggttcgtccgagcgcaacatttcggtggcggtggacagtgccgatgccacccgcgccctgcgcgccgcgcatgccggcttctggctgtcgccgcagaccttcgcggtgggcgtgatcgggcctggcaacgtcggtgccgcgctgctggaccagctgctggccgcgcgcccgcagttgctggccaaggccaatgtcgacctgcgcctgcgcgcactggcctcgcgttcgcgcatgcggctggatgcggatgggctgcatgccgactggcgcgaagcccttcagcaggcgggtgagcccagcgatctggatcgcttcaccgaacacctgctggccgcgcacctgccgcatgcggtggtgatcgactgcagtggcagtgccgaggtggccgagcgctatgagggctggctggcagccggcatccacgtggtcaccccgaacaaacaggccggcgccgggccgctgccgcgctaccagcgcatccgcgccgccgcggcggccagtggcgcgcgtttccgctacgaggccacggtgggcgcgggcctgccggtgatcaccacgctgcgtgacctggtcgataccggtgacgaggtgctggccgtcgaaggcatcttctccggcacgctggcctggctgttcaaccgcttcgatggcagccagccattctcgcagctggtcgcgcaggcgcggtcgatgggctacaccgagccggacccgcgtgacgatctttcgggcgtggacgtggcgcgcaagctggtgatcctggcccgcgaagccggccacgcgctcagtcttgagcaggtggaagtggaaagcctggtgccggcgctgctgcgcgagggcagcgtggatgacttcatggcgcggctgggcgagtccgacgccagcctgctgcaacgcctgcaggatgcgcgggcgcgtggcgcggtgctgcgctatgtggcacagctgggtgccgacggcgcctcggtggggctgcaggaactgccggccgatcatgccttcgccaacctgcggctgaccgacaacgtggtgcagttccgcacccgtcgctactgcgacaacccgttggtggtgcaggggccgggtgcgggtccggaggtgacggcagcgggtgtgttcgcggacctgctgcgggtcgccgccggtgaaggagcgcggctgtga

SEQ ID NO: 495400 - DNA, 951 bp, Stenotrophomonas maltophilia
atgcgcaacaacccgatggccctgggcatcgccaatggcgttgccgctggcgcgctgtggggcgtggtctttctcgcgcccgccgtgctgcagtcgttcaatgccctgcaactgtccgccggtcgctacctggtctatggcctgattgccatcgctctgctgctgccgcgctggaagcggctggcaccgcggctgggccgcgccgaatggttcgggctgctgtggctgagcctggccggcaacctggtgtacttcctgctgctggccacggcggtgcagtgggccggtggcgcggcggcgtcattgattgtcggcctgattccggtggtggtcactgtggttggcgtgcgcgagcagggcgcggtgccgttgaagcagctgctgccggcgctgggcctgtgcgtgctcggcgtggcgctggtgggctgggaagcattgatgtccgaacacctcgcaacaccgtggcggcagcgcctgattggcctgctctgtgcgttcggcgcgctgttctcgtgggcgctgtactcgatcggcaacagtcgttggctggcgcgccggccggacctgtccagccacgactggtcgttgctgaccggcgtcaccactggcggcctggccctgctgctggtgccgatggccttcatcggccacagcggtacccacaccgcggcgcagtggagtggcttctgggcgatcagcgccggcgtggcagtggtggcctcgatcctcggcaacgcgttctggaaccgtgccagccgcctgctgccattgaccctgaccgggcagatgatcgtgttcgagacgctgttcgcgctggcgtatgccttcgcctggcagcagcgctggccctcgctgctggaggcgctggcgatcgtgttcctggtggccggcgtgatgctgtgcgcgcatgcccatcgctcgccacgggcgatcgccgaacatgcaggctga

SEQ ID NO: 495401 - DNA, 696 bp, Stenotrophomonas maltophilia
atgggcgcgatcttccacctgcggcactacggccaggccaccggcctggaccgtcatgactacgcgcagtgggtgctgccgctgcagggcgaactgcagttcgagatgcaaggccgcggtggtcgcctggacctgctgcagggggccttcgtcgcggctggcgaagcacacgaccagatggccgatggcccgaatgctttcgtgatcgtcgactgccccccgggtgtgctcgatgacggtacccaggaacacctgtgccgccagcgctggctgcatctgccactggcgctgcgacagcgcctggcgcaggtgtgtgagggccaggcactgccggccctgttgccgcagctgctccaggtgttcgcaccggcgggcagtggtgcgcgcctgcagggcctgtgcgcggcggtgcaggttgatccgggccaggcgtggccggtagcacgcatgtccgccttcgtcggcgtcagcgaaagccggttgcatgcgctgttccagccggagttcgggctgagcccgcaggcctggctcagtgcaagccggttgcgttgggccaagcaccagctgcgtaccagtgcggcgccgatcagcgatatcgcgctggcggcaggctattccgagcagagtgcactgacccgtgcgctgcgtcgtgagtgcgggcagacgccggccgcctggcgcaggggcgccatctga

SEQ ID NO: 495402 - DNA, 807 bp, Stenotrophomonas maltophilia
atgatccgattgcttccgctggcactggccagcgccttacccctggccgccctggcccaggcgccatccgcgccatcggccgccgagcgcatcgcacctgcaccgcactgcctggacgcacgtgacgtacgccaggtcgagcaggagacaccgaccgccatcgcggtccgtgatggcaggggccaggccttccgcatcgacttcagcgcagcctgcccgggtgtcaacgaagccagcgcactgcggctggaggcgccttcgggctgggcctgcggccgccccagtgaacaggtgatggtggatggccgccgctgcggcgtcggcagtgtcacccccatcgacaaccgggagttcgccagcaccgctcgccagagcagccgcctgtacgcggccaccctgccgccggtgaacgtgaccgccacaggcaagcccagccgtggcggcagcagcccgcgccataccttccaggcctcgccagcgttctgcttcgccacccgccatgtgcgcagctggaacgaggatccgcaaggcgtggtggtggagaccaatccgcgccgcaatggcggcaatcgctactaccgcgtcgaactggccggcagctgctcgatcctggccggggcgacctcggtggaattccagtccggtttccagaacggcctgatctgtggcaatccgggcgatcgcatcgtggagacgccgtccggaatccccggcgacatgcgcgccagcacgccgcgcttcgcccgcccgggctgcagcgtgctggcggtctatccgaaggacgcgccggaccaggcctcgcgctag

SEQ ID NO: 495403 - DNA, 1053 bp, Stenotrophomonas maltophilia
atggtacggatgaagtggacgggcagggcaatgctggcggtcgcactggccgctgcggtggcaccggcgctggcctgcacgcgcgcggtgtacctgggtgacaacggtgatgtgatcaccgcacgctcgatggactggaaggtcgacgtggccaccaatctctacgtgctaccgcgcggcatcgcgcgcaccggccaggccggaccgaagtcgctggcctggacagcgcgctatggttcggtggtggccaccggctacgacgtgtcgaccaccgatggcatgaacgagaagggcctggtggccaacctgctgtggctggtcgaatcggagtatccgcagcagcgcggcaacaagccgggactggcgatttcgctgtgggcgcagtatgtgctggacaatttcgcgaccgtggatgaggcagtggcggcgctgaagcgtgagccgtactcgatcgtcaccgacaaggtgccgggcgaggaccgccaggcaacgctgcatctgtcgctgtccgacgcgagcggcgacagtgccatcgtcgagtacatcggggggcgccaggtgatccaccatgaccggcgctaccaggtgatgaccaactcgccgatcttcgagcagcagcttgcactcaacagctactggcagcagatcggtggcacggtgatgctgccaggtaccaaccgctcgtccgaccgcttcgcgcgtgcgtcgttctacatcaatgccattcccaaggccgaggacccggtggaagcgctggccagcgtgttcagcgtgatccgcaatgcgtcggtgccgtatggcatcaccacgccgggcgagccgaacatctcatcgacgcgctggcgcacggtggccgaccacaagcggcggttgtacttcttcgaatcggcgctgacccccaacaccttctggatcgatctgaacaaggtcgatttcggcggccaagtgctcaagctcgaccttggcaaggaccagcgcaacacgttcgccggcgatgcattgggtcacttcgtacccagtgcaccgttcgccttcctcggcgtggacggctag

SEQ ID NO: 495404 - DNA, 414 bp, Stenotrophomonas maltophilia
atgagccgcgcgacaggggccgcggcagcggcgggtgcgctgttcggtgcggggctggcgctttcggggatgaccgacgcgcgccgtgtgctcggcttcctcgacattgcgggtgatttcgatcccaccctggtgtgggtgctgggctcggcgctgctggtcagtgcggtcggccagcgctgggtgctgcgccgcgcgcagccgtggttcgcggtgcgcttccagctgcccagtgcgcgtgatgtcgatgcgcgcctgctgctgggcgccgcactgttcggtatcggctggggatgggctggctattgcccgggaccggccatcgccgggctggcagtcgcatcgcgtgaagcgctgtggttcgtgcctgcgatgcttgcaggtttctggctgcacgatcgggtcgtacgctga

SEQ ID NO: 495405 - DNA, 438 bp, Stenotrophomonas maltophilia
atgaacctgccgtggactgcggtggccggcggtgggttgatcggcgccgccgcagtgctgttgctcgccaccctcgggcgtgtggccggtatcagcgggatcgccgcaggcagcctgcgcgcagcggaaggcgagcgcggatggcgctgggccttcctgtctggcctgctcgcggcggccgggctggtgctgtggtggcagtcgctgcccgaagcgttgccgcgggtacagttgcgcgatgcctcgcctgcctggcagttgatcggcgccggcctgctggtgggcttcggcacccgcttgggcagtggctgtaccagtggtcacggcgtctgtggcatggctcgcggctcgaagcgctcgctgctggcggtgctggtgttcatggcctgcgcgatgctgacgacgttcctcatccgccacggcggaggcctggcatga

SEQ ID NO: 495406 - DNA, 324 bp, Stenotrophomonas maltophilia
atgcccagcaccccgctcgacagtgccgcgatggccaagcacgccgcgcaggccgctgccctgctcaagcgcctggcccatcctgcccgcttgcgcgtgctgtgccgcctggtcgaaggcgaagcgccggtaccggagctgcaggcgctgaccggattgagtgcgtccgcgctgtcgcagcacctggctgtgctgcgcgatatggacatcgtggcgacccggcgcgaagcacaggccatccactaccgcatgcaggaagggcccgcattgggcgtgctgcaggcgctgcatgccgcctattgcggcggcggcgcctcgggctga

SEQ ID NO: 495407 - DNA, 429 bp, Stenotrophomonas maltophilia
atgccactgcgtgcgatcgcctatgtcagccgggcgctgccggatctctccgctcgacggctgcaggcgctggtcgacgatgcggcccgcttcaacaagatggccggcgtgaccggcgtgctgctgcacgacggcgggcgtttcctgcagtacatcgaagggccgccggatggcatcggttcggtctacgaacgcatcctgcaggccggcagccatatcgacatcattgaactggcgcgcggccgcttgggccagcgccagtttccgtactggtcgatgcgcgcgctgccggtggaggaggcgctgttgcgccagctgtcatcctgtgactggtcgggctttacccgtacgctgcagggtgatcgctccgcgccgacgccggtggacctgctcgacaacgttgtgcagccagcactgcacgccggctga

SEQ ID NO: 495408 - DNA, 1134 bp, Stenotrophomonas maltophilia
atgaacctgttgccaccggaccctgcgcagtcgcagaccccggtcaacctgctgatcgtcgatgacgtgccgcagaacctggtagccatgcaggcgctgctgcagcgcgagggcgtgaacctgctgcttgcgggctcgggtgcgcaggcgctggagctgctgctggagcacgaggtggcgctggcattgctggatgtgcacatgccggagatcgatggtttcaccctggccgagctgatgcgcggttcgcaccgcagccgcgatgtgccgatcatcttcctgaccgcctcgccggatgacccggtgcgtgccttcaagggctacgaaaccggtgcggtcgatttcctgcacaagccggtcgcaccgcaggtgatcctgagcaaggtcaacgtcttcatcgagctctaccagcagcgccagctgctgaaggcgcgcaacgaggcgctggaacgttcgctcaagctcaacgagacgatggcggccgtgctcacccatgacctgcgcacgccgctgtcggcgatcctgctgtgtgccgacaagctggcgctggagcttccagaggacaatgccggtgcgcagcagaccctgaagcacctggaagccagcaccctgcgcatggcgcggatggtcgagcagctgctggacttttcgcggatccgcagcggcggcctgcgcctgcaggcaagtgcctgcgatcttgcggaagtgacgcgtgccgtggtggccgaagcgggcagcgcccacggccacgcacgggtgcatctcgacatgcagggcgatacccgcctgcagggtgatctggatcggcttggccaggtcgccgcgaacctggtcggcaacgcgcttacccatggcagcgaggcgagggtggaggtggacggccgcgatccgcgcagcgtgctgctgcgggtaagcaacgccgggcggatcgacgacgcgctgctgccgcgattgttcgagccgttcaaggccagtttccaccccagcaatggcctggggctgggcctgtacatcgttgatcagttcgtccgcgcgcacggcggccacatcggcgcgcgcaacgaggcggggcaggtggtgttcgaggcgacgctgccacggcgctctgaaagcccggcaacggcggccagctga

SEQ ID NO: 495409 - DNA, 576 bp, Stenotrophomonas maltophilia
atgagcctgccgatacgaccggccgtgctggtgatcggggcctctgcgggtggggtcgcagcgctgcagacggtgcttggcgcgctgcctgcggcactgccggcgccggtgctggcagtgctgcacctgccacgcgatcgcagcagccgcatcgccgaagtgctggcgccgtactgcgcgctgccggtgcgcgaggccgaagacaagcagccgctgcagcctgccacggtgacctttgcgccaccggactatcacctgctggtggaagacgccggttcgctggcgctgtcggtggacgcaccggtgctgttttctcgcccggccatcgatccgctgttcgagtcggcggcggcggtgttcggcgcgcaggtgctggccctgctgctgaccggtgccagcagtgatggcagcgaaggcgtggccgccgtgcgcgccgctggtggccgcgcctggctgcaatgtcccgaggaggccgaggcatcgatgatgccggcctccgccctgcagcacgctggcgccgatgccgtgctgccccttgaactgatgtgccgtcgcctgaaggagttgtttgcatga

SEQ ID NO: 495410 - DNA, 825 bp, Stenotrophomonas maltophilia
atgaacgagcaggcgctgttcgacctggaactgaaggtgctgctggaagcgctgtaccagcgctaccactacgacttccgcagctacgcggtatcgtcgctgcggcggcgcatccgccaggccatgcagcgctacgagtgcgagcggctggccgacctgcagcaccgcctgctgcacgagccggacctgttcgcgcaggcgatgcagttcttcacagtgcaggtgtcggagatgttccgtgacccggcctatttccgtgagctgcgcgagcaggtggtgccggtgctgcgcacctatccctcggtgaagctgtgggtggctggctgcagtacgggcgaggaagtgtggtcgctggcgatcctgctgcacgaggagggcctgctcgagcgcagtatcgtctatgccaccgacatcaatccggcagcgctggccaccgccgaagccggtgcctatggcatcgaccgcatggcccagttcagccgcaactacctggcggccggcggcaccgcttcgctctccgactactacgccacggcctacgatggcgcggtgttcaaccgccagctgcgccgcaacgtggtgttcgccgaccacagcctggccaccgacaccgtattctccgaagtgcacctggtgtcgtgccgcaacgtgctgatctatttcaaccgcgacctgcaggatcgcgcggtgggcctgttccgtgatgcgctggtgcatcgcggcttccttggcctgggcagcaaggagtcgctgcagttcgggcgctaccacggtgcgttcgaggtctgctcgcgcgagcatcgcctgtaccggaaagtcgcctga

SEQ ID NO: 495411 - DNA, 3114 bp, Stenotrophomonas maltophilia
atgcgtcctggtgcgactacgcgtgaccgctggatctggatgacctctgccgtattgctggcggcgaccatcgcgctggaactggtggtgccgctgggatacgcggtctggctggcctatttcctggccgtgggcgtcacggtgttccagcgcagtgcgcgcgcgccgttcgtggtcgcgatgatcgcctgtgtcctgctggtgatcggcttcaacgtggcgcccgccagcaacaactcgtcgttctcgttcgtcaaccgcaccatcggtggctgcgccttcctgatgatcgcgctgatcgtctcgcgcgccatccaggcccgccgccaggccatgcgcgcgctctggctgcaggaggccgagaacacggtggcgtcgagcctgcgcggcgacctggggccggagcagatcgccgaggcggctgcgacgagcctggccgggcagctggacgcggaggtcggtgcggtctatcggctggaaggcggacggctgcagctgaccggtggcatggcgctgccttcgggagcgccggcctcgctggccctgcacgaagggctggccgggcaggtcgctcgtgatgaacggatccgccacctgcatggcgacgatgccgccgtgcttgaactgcagaccagcctgggccggctgccggtgcgcgagcgcatcctggcgccgctcagcagcgacggtgccgtggtcggcatcatcgaactgggccgcgcccgggtcggtgaacagcgtgatctggatcgcgagctgctggagcgctgtgccgagaccatcggcttggcgctgcgcgcatcgctgttgcgtgcgcaactggtggtgctgctggaagagtcgcagcgccagggcgaggagctgcaggcccagcaggaagagctgcgcgtggccaacgaggaactggaagagcagagccgcagcctgctgcagtcgcagagccacctggaagaacagcaggccgagctggaacagagcaacgtgcagctggaagagcgcacccacgagctggaggcgcagaagcaggcgctgctggtcgcgcagagccagctggtgcgcaacagcaacgaactggccgcgacgtcgcgctacaagtccgagttcctggccaacatgtcgcacgaactgcgcacgccgctgaacagctcgctgatcctggccaagctgctggccgacaacaaggacggcacgctcaccgaagaacaggtgaagtacgcccgtgcgatcctctcgtccaacaacgatctgttggcactgatcaacgacatcctcgacctgtcgcgcatcgaggccggccatgtcgaactgtccgatgaagtggtggtggtcgacagcgcgctgcagcgcctgcgcgagaccttcgagccgatggcgcggcagaagggcctggccctgcagatcgaagccgatgcgctggcaccgagccagctggtggtcgacagccagcggctgcagcagatcctgaagaacctgctggccaacgcggtgaagttcaccgagcacggaaaggtcagcctgcacgtgcgtgcggccggcaatggccgcatccggttcgaggtctgcgacaccggcatcggcatcgcccgcgagcagctggacgtcatctttgaagccttccgccaggccgacggcagcacccgccgtcgctacggcggtaccggcctgggcctgtcgatctcgcgcgatctggccgagcgcatgggcggccagatccaggtcgacagcgagcccgggcgcggcagctgcttcatcctggagctgccattgcagggcgcccccgcggcgagcgcagccgaggctgccgaggcccccgtggcagtgccggcgccggcacggacaccggccgtgctgccgcccgcgccggtgcgcgctgccactgcgtcggcgccggccactgcgtcggccggcgtggccgacgaccgcggccgccgccagcgcgccgggcgcctgatcctggcggtcgaggacgatgccacgttcgccgaggcactggtggccctggcccatgaactggacttcgactgcgtggtggcgggtacggcggaagaagcgctgacacttgccagtgagctgcgtccgaacggcatcctgcttgatatcggcctgccggacgtgtcgggcctgagcgtgctggagcgcctgaagcgcaaccccgaaacccggcacatcccggtgcatgtggtctcggcaacggaccgcagccaggtggcgcgcgagctgggcgcgatcggcttcgcgatcaagccgaccacgcgcgagcggctggtgacggccatcgagcagctggaacagaccagccagcgcgacgtgcggcgcctgctgatcgtcgaggacgacagcgagctgcgcagcaacctggaactgctgctgggccgcgaccagctgcagatcgtcgcggtgggcaccctggccggtgcactggaacagctcagcacggtcacgttcgactgcatggtgatggacctgtcgctgcccgacggcagcggctacgacctgcttgaacacatggccggcaacgatgaggtcggtttcccgccggtgatcgtctataccggccgcgcgctcagccgcgaggaagagcagcgcctgcgccgctattccaagagcatcatcatcaagggtgcgcgttcgccggaacgcctgctggatgaagtgaccctgttcctgcacagcgtcgaggccagcctgccgaccgaccagcagcgcctgctgcgcgaagcgcgccgtcgcgacaccgtgctcgatggccgtaccgtgctgctggccgaagacgatgtccgcaacatcttcgcgctgtccagcgtgctcgaaccgctcggcgtcacgctggagatcgcgcgcaatggccaggaagcggtggatcgcctggccgagcgcgaggtcgatctggtgctgatggacatcatgatgccggagaaggatgggctggccgcgatgcgcgagatccgcgcgcagcgccacctgcaggacctgccgatcatcgcgctgactgccaaggccatgccggacgaccgtgagcgatgcctgcaggccggtgccaacgattacatcgccaagcccatcgatgtcgacaagctggtctcgctgtgccgtgtctggtgctcgcggcaatga

SEQ ID NO: 495412 - DNA, 1143 bp, Stenotrophomonas maltophilia
atgtccgtgctgacggacccttcccgacaactgcgattgctgatcgacagcgtgcgcgaccatgcgctgtacctgcttgatcctgaaggcatcgtctgcagctggaacccgggcgccgagcgcatcaagggctattcagccgatgaagtggtgggtacgcacttcggtcgtttctacctggccaccgagcgcgaggccggcgaaccgcagcgcctgctccgcctcgcggcgcagcagggccatgttgccagcgagggctggcgggtacgccgcgatggctcctcgttccgcgccagcgtggtcatcgagccggtcgtcgaagcgggcgaactgcttggcttcgtcaagatcacccgcgacatcaccgagcaatggcaggcacagcgactgctgcgcgatgcccagcgtgcgctgcgcaacacccagcagttcgagacggtcggccggctcagccgcggcctgtcgcacgagttcaacaacctgctgaccaccatcggcaacgcactggacctgctgtcgctacgcgtccgcggtgacgatgcacgcgccgccgagctgctggacgctgcgcaggcggccaccgaccgcggcgccctgctgacccgccagctgctggccttcagcacgggccagaccttgatccgcgaaccgctggacatcaacacgctggtacagcaatggctgccgggcctgcagcgcgcctgcccgcccacggtgacgctggacgcctgcctcacgccgggcctgccgcaggtgtgcaccgacgcgatgcagctgcaggctgccctggccaacctggtggcaaatgccgtggaggccaccatcgatggcgggcgcatcctgatcggcaccgcgctggaacatcggctcgacccggatgcggacactacgctgcaacgcggctatgtcaccctcagcgtctgtgacgaaggccatggcatggcggccgacatcgccgagcgcgccagcgagcccttcttcaccaccaaggacatcggcaagggcagcggcctgggcctgagccaggtgttcggattcactacccagagcggcggcttcgtcgatgtgtccaccacgcccggtgtcggcacgacggtaagcctgctgttacccgcatcagaggaagcaacccatgaccgatga

SEQ ID NO: 495413 - DNA, 360 bp, Stenotrophomonas maltophilia
atgaccgatgaaccgatccgcgtactgatggtggaggaccagaacgatctgcgcgagatgatcggcctggccctgcgcgatttcggcatcgaggtcgccaccaccgccgattgccacgaggcggcggagctgctcaagggcgaggcgcgttttgacgtggtgttcagcgatgtcagcatgcccaacggcatgtccggcatcgaactgagcgagcacgtcgcccgcgaacagccgcaggcacgcatgatcctgtcctccggctacgcgcgctcgcagctgccgccgctgccggagcaggtggagttcctgcccaagccctatcgcctgcgccagctggttgaactgctcaagcaggactga

SEQ ID NO: 495414 - DNA, 309 bp, Stenotrophomonas maltophilia
atggaccaccgcctgcagcccgtgcaaccccaggactacgcgagcatcgccgggtggctggattcggccgcagccacgctgcgctgggccgggccgcgcgtgccctatccactgccacccgatcggttcgagcacgtattgcagctgcgcgaacgcccggggtggctgctgctggacgcaagcgaccagcgcgtgggtttcggccaggcctggcccacgcagccgggcaccgtccatctgggccgcctgctggttgcgccgcaggcgcgcggggccgcggtctcgggcgtgggttggtgcaggcgctga

SEQ ID NO: 495415 - DNA, 801 bp, Stenotrophomonas maltophilia
atgaaaaaagtctatctggcattgcaggattctgtctcgcgttcatggtttccggttgcatgtgttgatcacattaggccgccgaacctgagtgaagatatctatttgctgcgttacaccaagggtgtaaatagatttgaccattttagtggttttggtcgcatgggcgatcttaaagctgcctacttctcggtcggactgtttccgctgctaaagaatcgagttatctccagaaacagggctgatttttcatcctttgctcggtggttagggaagaaggagtctgaactcaccttcttcgatgagcttgccgttacgggtggtcagcggggtacggattcgattgagctaattcctgttccagagcgctcgtctgacgggatgtatcgggtatctttttttgtgcatggtgttcgttacctttctcaaagggagcaattcgaattttctcacttgcaagacggggatgagctggttcttgttcccgagttcaataacgagtcggatcgccatgctcttttgcttaagaggcacggatcggcccaccatgttggctatgttcctcgctatttctccaaggactttagctttctgatgaagaaggctagccaagatgttagcgtcactgttcaaagggttaatcccgatgcgccgttcgcgtttcgtgttctgtgtcaatttgaaacgcgttggcccgatagttttgatgcatgcagaggtggcgactttgaattgcttgttgatttgcctgatcaggtccaccccgtccctcaggacgctaattcaaaatttgagatttga

SEQ ID NO: 495416 - DNA, 321 bp, Stenotrophomonas maltophilia
atggatgctcgccgtgagatcaagcttgcccataaggacgaccgccacaatgttgtgggctatgcctccaaagcactcagtcagctgttcgataggaaaacgggggaacggctaacaacagtgagcgcgttcctggatttcgctggctatagtagggaagatgctctttactggttacggcaacttcacaggttagatgaaaaatttttccgtcagctttttttgctcattcctgactcgcatatcacgaatataggtcgcgagtttgcagttcagctcttgatggaaaataggaagaggttgctggcgttgacgctatga

SEQ ID NO: 495417 - DNA, 1533 bp, Stenotrophomonas maltophilia
atgtcttccgagctgctcaagtcccttggcctggacgcgatcaacgctggcacgtacctgggcaacggggagtggtcgagcgcgaccagcggtgagctgatcaccccggtcaacccgaccaccggcgagccgatcgcgcaggtccgcgcgaccaccgaggccgagtacgagaccgtcgttgcccgcgcccaggaagccttcaaggtctggcgcaccacgccggccccgcgccgcggtgaagccgtgcgcctgtgcggtgaagcactgcgcaggcacaaggacgccctgggttcgctggttgcgctggaaatgggcaagagcaagccggaaggcgatggcgaagtgcaggagatgatcgacatcgccgatttcgccgtcggccagagccgcatgctgtacggctacaccatgcattccgagcgccccggccaccgcatgtacgagcagtaccacccgctgggcctggtcggcatcatctcagccttcaacttcccggtcgcggtgtggagctggaactcgttcctggccgccatctgtggcgacgtgtgcatctggaagccgtccaacaagacgccgctgaccgccatcgcctcgctgaagatctgcaacgacgccctgcgcgaagccggcttcccggacatcttcttcctgatcaacgatgccggcaccgcgctgtcggaaaagatggtcgatgaccgccgtgtgccgctgatcagcttcaccggctcgacccaggtcggccgcaccgtcaacgagaaggtcgcgcgccgcctcggccgctgcctgctggaactcggcggcaacaacgccatcatcctggacgaaaccgccgacctgaagctggccgtgccgggcatcgtgttcggcgccgtcggcaccgccggccagcgctgcaccaccacccgccgcctgatcgtgcatcgttcgatctacgccgatgtgctggccaccctggtcaaggcctacaagcaggtggaaggcaagatcggcgacccgaccgatgcggccaacctgatgggcccgctgaacagcgaaggcgccgtgcagcagttcctcgatgcgatcgcccaggccaaggcggccggcggcaccatcgagaccggtggcagccgcatcgaccgcccgggcaacttcgtgttgccggccatcgtctccggcctgaagaacagcgacgccgtggtccagcacgagaccttcgcgccgatcctgtacgtgatgccgtacgacaccctcgatgaagccatcgacatgcagaacggcgtgccgcagggcctgtcgtcctcgatcttcacccagaacctgaagactgccgagaagttcctgtcggccgccggcagcgactgcggcatcgccaacatcaacatcggcacgtccggtgcggagatcggcggcgccttcggtggcgagaaggacaccggcggtggccgcgagtccggttcggatgcgtggaaggtctacatgcgccgccagaccaacaccatcaactattcggattcgctgccgctggcccagggcatcaagttcgacctgtga

SEQ ID NO: 495418 - DNA, 840 bp, Stenotrophomonas maltophilia
atggcgaacgacgaggacacgtccgtgggtcagagcccctccggggatctggccccagcgaggggtcggatccccgcaggggctccgaccctcgatttcagcggccgccgcgtgctcatcgccggcggcagcaagggcattggccgtgaaatggcgctggcctttgccggcgccggcgcacaggtctcggcctgcgcccgcggccaggccggcctggatgccctgcgtgccgatgcacgggcgcagggcttcgaactgcacgcgttttccaccgatctggccgatcccggccagatccaggcctggctgcaggccgctgccgatgccctcggcggtatcgatgtactggtcaacaatgccaccggctacggcatggccgatgacgaggacggctgggccgccagcctgcagatcgacctgatggcggccgtgcgtgcctcgcgcctggcactgccatggctgcgtgcctccagcgacgcctgcatcctcaatctgtcgtcgattgccgcgcagcagccgcgccccggtggcgcgccgtatgctgcggccaaagcggcgctttcgcactacaccacgtcacaggcgctggcgctggccaaggaccggatccgggtcaatgccatcgccccgggctcgatcgagttcgatgacggcctctgggaccgtcgtcgcgtcgaggaccccgcgctgtaccacggcaccctggcgaagattccgttcggccgcttcggccacccgcgcgagatcgccgacgccgcgctgttcctgtgctcgccgctggcgcgctgggtcaccggtagcgtgctcaatgtggatggcggccaagtcttgatgggctga

SEQ ID NO: 495419 - DNA, 285 bp, Stenotrophomonas maltophilia
atgagcgtggcaccccgacagacaagcgccctggccgtggtcagcctggtcatgggcatcgccagctggaccgtcctgcccttcgtggccagcatcgtcgccatcatcaccggccacatggcccgcgccgaaatccgccgccgcccgcacgaactggaaggcgatggcctggccgtcaccggcctggtgctgggctgggtcatggtcggcgcggcacttgccgccatcgtggtcttcatcctgttcttcggcggcctggcgtggctggcggcggtgtcgaactga

SEQ ID NO: 495420 - DNA, 771 bp, Stenotrophomonas maltophilia
atgaccgcctccgacagcactgaacgcttcagcagccgcgtcgccgactacgtccgctaccggcccgactacccacccgcgctgctggagtggctgcatggcccgatgggtgtcagccagcaggcgcgtgtggctgacatcggcgccggtaccggcatttccagccgcctgttcctggccagcggccatcctgttgtcgcggttgagcccaatgcggccatgcggggcgcggccgaagaatggctggcaccgcagtacccgcagttccgtgcggtggatggccgcgccgaggccaccgcgctggacgatgccagcatcgacctggtcagcgtcgcgcaggccttccattggttcgacaccgtggcggtacgcgccgagtggcagcgcatcctgcgccccggcggccaggccctcatctactggaattctcgcctgctcgatgccagcccgttcctggtcggctacgaacagctgctgctggactacggcaccgactataccgccgtggccgagcgctaccaggacgacgccaccatgcaggcctggttcggcgctggcctgcgcggcagggtggagctgccgaacgtgcagcacctggacttcgacgccctgcgcgggcgcctgctgtcctcctcctacgcccctcaacccggtcatccgcgccacgcaccgatgatcgacgctctgcagcacctgttcgccgcccacgcggtcgacggccaggttgcctttgaatatcgaacccgagccttcctcggcacgctggactga

SEQ ID NO: 495421 - DNA, 1056 bp, Stenotrophomonas maltophilia
atgtattcgcttgcccgccccttcctgttctcgctcgacgccgagcgcgcccacggccttggcctgtccgcactggacctggcctatcgcaccggcaccacgccgctgctggccgcacgcatcgcgccgatgcccagcacggtgttcgggctgacgttccccaacccggtcggcctggccgccggcctggacaagaacggggagcacatcgatgcattgttcgcgctcggcttcggcttcgtcgaaatcggcacgatcaccccgcgcccgcaggccggcaatccgcagccgcgcctgttccgcctgccggaacacaacgcgatcatcaaccgcatgggcttcaacaatgcgggcgtggacgcgctggtgcgcaacgtcgagcgcgcgcgcaaccgccgcggcctgctcggcatcaacatcggcaagaacaaggacactccgaacgaacaggccgtggacgattacatcgcctgcctggacaaggtgtacccgctggccgactacatcactgtcaacatttcctcgcccaacaccgccggcctgcgtgaactgcaggaagaaaccgcgctgcgccagctggtcagccaactgcgcgaccgccaggaagatctcgcggcccagcacggccgccgcgtgccgatgctggtgaaggtggcgccggacctcagcgagcgcgacatcgatgccgccgcccgcgtgctgggcgagctgcaggtggacggcgtgatcgccaccaacaccaccatcgaccacagcaaggtggccggcgatccgctggccaacgaggccggtggcctgtccggtgcgccggtgctggcgcagtccacgctggtgctgcgccgcctgcgctcgcgcctgcccgagtcggtgcccttggtcggcgtcggcggcatcctgtccggtgccgacgcggtggccaagatggcggccggtgccgcgctggtgcagtgctacagcggcctgatcttccgtggaccggcgctggtttccgaatgcgtggaagcgatccgtcgccgccgcgaagcgcccagccgcggcgcggtggccccactgtga

SEQ ID NO: 495422 - DNA, 1062 bp, Stenotrophomonas maltophilia
atggacaccatcgacggcaacgccccgctgcgctggacactcacccgcaatgcgccgctgcaggcactgaacaccttccacgtgcaggccaatgcggaacagctgctcgaactgcacgatgccgcgctgctgccggaggtgctggcactgcccgaggtggccaacggcccgctgctggtgctgggcgccggcagcaacgtgctgatcgccgaggatctgcccggtaccgtgctggtgttcggcaaccgcgacatcagtttccttgaacaccgcgccgaccatgccgtgatccgcgccggcgccggcgtgccctggcatggcctggtgatgtggtcgctgcaggaaggcctgtcgggcctggaaaacctggcgctgattcccggcaccgccggtgccgcaccgatccagaacatcggcgcctatggcgcgcaggtcggcgagttcatccaggcggtcgaagcctgggactgccaggagcaggcctgggtgcgcctggataacgatcagtgcggtttcgcctaccgcgacagcgtgttcaagcaacagcccgatcgctacctgatcaccgccatcgaactgaaactgccactgctgcacgatctgcgcatggactacgccggcatccgcgaggaacttcaggcacagggcgtggagctgccgggcgcggtggacgttgccaatgcggtgatcgcgatccgccgccgcaagctgcccgacccggaggtactcggcaatgccggcagcttcttcaagaacccggtgctgccgctggagcaggtcgacgtgctgctgcagcacttccccgacctgccggtgttcccggccgagcaggacgacaagcgcaaggtctcggcggcctggatgatcgaatcctgcggctggaagggcttccgcgacggcgatgccggcgtggcccccagccacgcgctggtgctggtcaaccacggcaatgccagcggcgctgaactgctggcgctggcgcgccgcatctcggcctcggtgctggaaaaattcggcgtgccgatcgaaccggagccccgcctgctcggcgcacagtggtga

SEQ ID NO: 495423 - DNA, 888 bp, Stenotrophomonas maltophilia
atgcgggcggcgctgctgatgctcggcagcacgatggcgttcggcctgatggcggtggcgatccgctatgccacgcgctacgtgcccacccaggaagtggcgttcttccgcaacgccttcggcctgctggcgctgctgccgatgctgctgcggcccggccgtgcgcccttgaagacgcagcagctgccacgctatttcgtgcgcagtgcaatcggcctgggctcgatgctgtgcgcattctgggcgctgggtcacctgccgttggcgcaggcggtttcgctctcctattccacgccgctgttcgtcaccattgccgccgtgctgtggctgggtgaaaccgtgcgcgtgcgccgctgggccgcggtcgtggtcggcttcatcggcgtgctggtgatcgtgcgtcccggcaccgccggcttcaccgccggcagcctggtcgcggtgggtgcggcggtactcagctcgctggtggcgatccagatcaagcagctgacccgcgtcgacagtgccgataccgtggtgctctatacctacgtgttctgggtgccgctgtcgctggtgccggcgctgttcgtctgggcctggccaaccgggtcggcctggctgtggctgctggccaccggcgtgctcggcaccgtcggccagctgttgtggacccgcgcgctacggctgggcgaagtctccgccctgaccccgatcagcttcctgcagctgccactggtaacgctgttcggctggctgctgttcaacgaaacggtggaccgctggacgatcatcggtgccggcatcatcctcgccgccaacgcctacatcgcccaccgcgaagccgtgctgtcacgccgcgctgcaagcgcggcggcctctgcagcggccaagcccgcagagtag

SEQ ID NO: 495424 - DNA, 1005 bp, Stenotrophomonas maltophilia
atgtcattcgcttcggcgcagcatctcggcgaagtccttcagcagtcctatggcatcaccgccaatgccgtggtgccacgcccggttggcgccgatgccaacgccagtgtgtatcgcatcgatgcacggcgcgggcaatggtggttgaagtgccgcagttaccaggttgcccctgccgtctgggacaccctgcattggctgcgcggcacgctgggcatcgaggaaatcgtcgcgccctggccggccctgaccggtggagcgtcagtgcagcgctggggcctgcagttcaccctgttcccgtatgtggaaggccagtccggcttcgaggcggcgttgagccgcacgcagtggcaacgattgggcgaggtgctgcggcgcctgcacgaggcgtgcccgccaccggcgctgcaggaggcgctgccgagcctgcggatggaaaccgcggcgcttgatacggtcgggcaatggctggccggcgagggcctggcggccgccagggatgggctgggccgcgccttcgtatccgtctgggaccagcagcatgcgcgcatcgcggcgctgcatgcgcaggcactgcagctgcacgcggcgttgcaggatgtcccggtgcggctgcacctgtgccacaccgacctgcatgccggcaatctgctgatgggcaatgacggcagcctgcacctgatcgattgggatggcctgtcgctggccccgcgcgagcgcgacctgatgttcatcggtggcgcggtcggtgggcgctgggggcgcgagaacccgttgggattcgaggaaggctatggcagtgaccgcggcgatccacgctggatcgcctggtaccggcactggcgcatcctgcaggacctgatcgagttccagcaggtcctgctgggcagtgatggagaggaccgttcgccgcagctgcgccggcagtcgctgcatttcctcagcgaacagttcgcaccgggcaatgtattcgacgcggcagagcgggtgtatcgcgcgctgtag

SEQ ID NO: 495425 - DNA, 1035 bp, Stenotrophomonas maltophilia
atgagcgccgtcgaccggcgactgcacggcgttgatctggcgcgttacctggccttggccggcatggtgctggtcaacttccgcctggcgatggccgtgccggcagagggcgccggatggttggcaggcgtcttccactttctggaaggcaaggcttcggcgacgttcgttacgctggccgggttgggcctggtactgggcacgcatcggcagggttggtggccggccagtgtgcagacctggcggcgcgcactgttcctgctggtgctgggcctgctcaacctgacgctgttcccggccgatatcctgcattactacgcggtgtatttcgcgctggccgtgctgtggctgcgggcctcgccgcgggtgttgctggccagcatcgtggggatcgcggcctgttcgttctgggcgttgctgcactgggactacagccagggatggaactggcagacgctggaatacgccggtctgtggcaatggccgggcgcggcccgcaacctgctgttcaacgggttccatccgctgctgccgtggctgtgcttcttcctgctgggcatgctgctggcgcggctgcaactgtcgcaaccgcgggtccagcgcgcgctgctggtgctgggcctgatgctgatcgtggctggacatggcgtgcagcagcttgcgcaggggacgtcctggcaggcgtggctgggaacgcagccgatgccaccgggaccggcctacgtactcacaggcgcgggcgcggcctgcagtgtcattgccgcctgcctgtggctgacgcgtgtacgaccgggtgactggctggaaccgttcaccgcggccgggcgcatgaccctgaccctgtacgtcggccatatcctgctgggcatgggcacgctggaaggcctgggcctgcttgatggcagcgcgtcgctcgcgtcggtgctgctgtgggcattgttgttcctgatgctggccacgagcgcagcgtggctgtggtcctggcggttcgcgcggggcccattggaagcggtgatgcgacgcgtcgccggctag

SEQ ID NO: 495426 - DNA, 639 bp, Stenotrophomonas maltophilia
atgcgtgcgcccttaaaaagggacgaacgttcgttcactatttatggcatgaaccgaaccgaccgcaacgagcaacgcatcgcgcagatcctgcaggccgccctgcagtgtttcctcgtgaagggcttccaccagaccagcatgcgtgacatcgcgcaggcggccggcgtcagcctcggcaatctctacaaccacttcccgggcaaggaggcgatcatccttgcggtggccgtggccgaaggcgaggaactggcaccgttgctgcagcgactggccgcgtccgatggcgagcgcgcacgggtgctggttttccttcaggacttccacgcactgtgccggcaaccggagtgggcaacgctcgccgtcgaagtgctggccgagagcgcacgcaatccggccgtggccgaggcatttgcggccaatcgcaggcaattgcaggcgacgctggccgaagccctgcagcaggtggcacggcgcgaacgtcggcgccccgtgctggccccggcactgcaggcacaggtgctgctggatgccatcgaaagcgatgccctgcgccgagggctgggcgaagccgggggcaccgatgaggcatcgctggatctcggcctgcttgcgctgctgctgggcgcacgcgcatga

SEQ ID NO: 495427 - DNA, 804 bp, Stenotrophomonas maltophilia
atggaagcacccgatcccttcactgatggcatgccgctgccgtgggcgtggcgggaaacattggccgatgcgcgcatcgagcgacagtcgatcggcgtatcgcgcgcagacgtcgcccgtgtgcatcgcccgggacaggctgacgccttcctgaaatcggaagtgatcgatgccttcagtgagctgggcgatgagatcgcgcgcctgcgctggctgcaggcgcagggccagccggcaccaacggtaattgccaccgccgaagaagcgggccggcgctggttgctgatgagcgcgctgcccggccgcgacctggcctcgtcgcctgagcttccgccccagcgcctggtggaactgctggccgatgcgctgcggggcctgcatgccataccagtggcggcctgtccgttcgaccagcggctggcctcgcgcctgcaggccgcgcaggcacgggtcgcggcgggcctggtcgacgccgatgacttcgatgacgagcgcctggggcagagcgcacagcaggtgttcgccgaactgcgcgctacccggcccaatcacgaggatctggtggtcagccacggcgacgcctgcctgccgaacctgctggcagccgaagcccgtttcagcggtttcatcgactgtggccggctgggtgtggccgatcgctaccaggatctggcgctcgccgcgcgcagcctggtccacaacttcggcgacacgcgctgggtcgcgccgctgttccggcgctatggcgttgtgcccgacgaacggcggctggcgttctaccgtcttctcgacgagttcttctga

SEQ ID NO: 495428 - DNA, 507 bp, Stenotrophomonas maltophilia
atgagtggctgggcgacgacattggtgatcgatgcggtagtgatcggcgtcggcgcgaccgcgctgacggatctgtgggcgttgctgcagcgcaggctgctcggcattccgtcgctggattttgcgatggtcggccgctggctcggccacctgcggcgtgggcgcttccgccatgagggcattggtcgttcgctgccggtggccggcgagcgcgcgctgggctggaccgcgcattacgtgatcggtgtggtcttcgccgtgttgttgctggccgtggtcgggaacggttgggtgcaggcaccgaccctgtggccggcgctggccttcggcgttctcagcgttgccgcgccgttcttcatcctgcagccgggcatgggcgccggcattgccgcttcgaagaccccggcgcctggcaaggcgcggctgcgcagcctggtggcacacagcgtgttcggcgcaggcatgtacctttccgcgctgctgttggccggggtccgtgcaggatga

SEQ ID NO: 495429 - DNA, 675 bp, Stenotrophomonas maltophilia
gtgcccggcatgaacgctgcaaccgagctgccgccgtccccgctggaagcgctggccgagatcgcccgcaccctgggccacccgcaccgcctggccttgctggagcacatcgcccagggcgagcgtgcggtcgagcgcctggccgaactgagcggcctgtcggtggccaatacctcccagcacctgcagcagctgcgtcgtgccggcctggtgcagacccgccgtgacggcaagcgcatcctctaccgcagcgctgacggcccactggccaacctgctggccgcgctgcgcgactatgccgaccaccagcgcagcgaaatgcagggcgtcctcaccgacagcctgcagcgccgcgatgcactggaagggctgaccgtcgagcagctgctggagcaacgcgacagcgtggtactgctggacgtgcggccgcgcgaggaattcgatctgggccacctgcccggcgcgctgaacattcccgctacggaactgcacgcgcggatggacgaactgccgcgcgccgtccacattgtcgcgtactgccgcgggccctactgcgtgctgtccaacgatgcagtgatgatgctgcgcgaagccggcctcagcgcgcagcgactggccgccggctatcccgaatggaaggccgcaggcctgcaggttgaactgccccgacactga

SEQ ID NO: 495430 - DNA, 729 bp, Stenotrophomonas maltophilia
atggatgatgcgatttccccgttgatcgatgctgcctggcagcgcgtgttcgccggccagcgcacgttgcagcaggggccgcagctgcacctggcgtgcagcgatgatgtcgatgagggtgaggacggcatgctgttacagccggtcgcgggccccgcccgagcgctgttgcgtcctgccctggccgctcgcctgcaactgcgtgcgcaaccgcactggacactggcgcagctgcaacagcgcttgcagcagctcggccagcatacgcacggcgcggatcgtgtcttctacttccccaccgcaacactcgccgccctcgccgaacaccctgccccaccacatatccgccgcctcggcgcgaccgacgcggcagcgttcaacgcgttccaggccaccgccagcgaggacgatctcgatgccgcatgggtcgagctggatcactggcaggtgttcggtgccttcgacggcgagcgcctggtcgctgcgggaagcatgtacccctggagcctggatccagccttcgccgatatgggcgtactgaccctgcccgaggcccgcggtcgcggtcacgcgcgacagctggtacacgccatggccgtgtccgcgcgggcgtccgggctgcagccgcaataccgttgccagctcgacaacaccgcctcgatcatcaccgccggacgcagcggcctgcgcgcgttcgccgattgggacaccattctggcggccgactga

SEQ ID NO: 495431 - DNA, 717 bp, Stenotrophomonas maltophilia
atgaaattgatggtcatcggcgccagcaggggcctcggtcgagcgttcgtcgaaggcctgtgcagtgcgggcgacaccgtcatcggcgtttcgcgcagccgcccgcacgacctcgaatgccccgagggcgtcaccctgcagtggatcgaagcggatctgtcccagcccacccttgctgccaatcacatcgcagcgcaggcgccggccgatctggatgtgctcatccacaacctgggcatctgggaagagacggccttcagcgacgagtacgccttcctcgacgaaagcgatgccgcgcttacccagctggtcgacgtcaacatcactgccaccctggtgctgctgcggcgcctgctgccgagggtactgggcgcagtacgtccacagctggtgctgaccggctcgacctcggcgctgccgcgcagcggccgcccggaagtggcgttcggcgcatccaagttcgcgctcaacggcatcgccgatgcgctgcgcgaaggcttccgggatcggcgcctggcggtaaccagcctgcagctgggctacctcaacaccgacgatgcactgtcagtgccggtagcggacgccgcagcgcgcggcgacggcgaactggtgccggtccatgatgtcgtggcgatggtacgcaccctgctgcagctgtcaccgtcctccttcgtgcgcgaactggtgctgcccgccatcgccgacccgcgctactga

SEQ ID NO: 495432 - DNA, 1947 bp, Stenotrophomonas maltophilia
atggatgcgctttcacgggtctcggcccaggtcctggacagcgccctgcccagcctgccgctgtacctgctgcaggccacggcggtgatcggcatgatcggcgtgctgctgatcgccacccgtcgcgccgggcacgccattgaaggacggcgcctgtatgtcggcgtagcgctgggcctgatctacctgttcaattcctggttcgtggcccgttacacccagggtgtggtcaagctgcacctcggcttcgacatcctgctggtcagtggcctgctcggtggctggcgcggcggcttggcctgcctggccgccggcctgctcgcccgctaccagttcgtcggcacccagttcttcctgcctgccagcctcgaggccgtgttgcagatggtggccggcgtctggctgcgcaggcgcctgcacccgcgcatgctcaacgaactctcgccacgcatgatcctgcaggcgtggtccgtgcgtatcgggatgaccgctctgggcctggcgctgggtgtggcgatcattggggccgatcaactaccggtggccgaactggcgatccagcgtgtgctggcactgccggtctcgctgctggtactcggcgcagtgttcgcgctggtctacaacgatgcccagatcgatgcgcagcgccagcgcgaacaggcgtggctgcgcatcgatccgatcagcggcctgcccaacatgcgtgcgctcggtgaacgcctgcagcggtactggcgcgacaacgacggcatcggcaaggcctgcctgatcgtggccgagatgggcaacctgcgcgatctgcgcctgcgctacgggccattgcaggacaacggcctgtggcagcgcgatacaccggccgacgtccaccggttgctgccatcgctggcggtggacgacgtggaggtctaccagttcggtgatgccgcgctggcgatcctggtgcgcggcatgaccttgtccgaactgcgcatacaaccgcagatcaccgagctggccagcaacctggccgatcgggtcggccgcgattggcctggcttccggccgctgttccgctgtgcggtggttgaattgaagccccccgttgatgtcgacgaaggacatcttccgttccgcgcgatcaccgtggcactgagcgcgatcgaatccggcgtcgtgttcttcgacgacccgatccagcgcgacggcgagatcgacgccctgatcgaagtcgccctcgaacgctggctgcagcagggcgacgcaccgctgtgctaccagcccaagcatcgcctgcaggaccgccagctggtgggcgccgaagcgctgctgcgcatgcgcgatggcgaaggccggccgatcgcaccgatgcgggtgatctcgctgctgcgccggcagggccggctggcagacctggaatgggccacgctgcagtcggcggtgcacttcctgcagcactgccggcaggacggcgcggcgctgaccatcgcagtcaatgtgtcagccgaatccctgcgcctgcccgacttcggcctgcgcctgcaggaactgctgcagctgcacgacatccccggcgcgatgctgcggctggaaatcgtcgaatggaccgaaatcgtcgagcgtgacctggtcgatgccaacatcgcacagctgctggcggccggagtcaccctgtcgctggatgatttcggcgcgggctattcgaccctgatcctgctctcgcagctggccatcgccgaggtcaagattgagcaggcgctgatcgccacgctgtccgacgccaagtcgcagtcgatcgtgcgcttcatcgtcgaagtcgcgcaccgctgcggtgccatcgtggtggccgaaggtaccgaaaccctggcgcaggaacagcaactgcgtgcactgggcgtggatgtcggccagggctatctgtactcggcggcgctgccggccgacgagttccgccgcttcgccgccagctag

SEQ ID NO: 495433 - DNA, 612 bp, Stenotrophomonas maltophilia
atgccccgtgccccacaacgcctgaccgaccgcaaacgcgaggccatcgtgcgcgcggcggtggaggagttccgtgcatcgggttacgaggcgaccagcatggaccgcatcgccgaggtggccggggtctccaagcgcaccgtctacaaccacttcccgagcaaggaagcgctgttttctatgatccttgaggagctgtgggaacgcagcgtggccagcgacgcactgccgtatcgcgcggaccagccgttgcaggcgcagctgctgcagttgctgggccagaagctggaactgctcagcgatgccaacttcatcgacctggcacgggtggcgatggccgaggtcatccactcaccggagcgggcgcaggccatcgtctgccgcatgggcgagaaggaaagtggcgagagtgcgtggatccgcgcagcgatcgccgatggccggttgcgagaggttgatccggaattcgccggccaccagctgcatgggctggtgaagagcttcgcgttctggccgcaggtgacgatggggcagccaccgttgaccgcgcaggaacgtgcacgcgtggccgaatcggcggtggcgatgttcctgggtttctacgcggtctag

SEQ ID NO: 495434 - DNA, 1077 bp, Stenotrophomonas maltophilia
atgaagcgcctgctccttgtcctcctgcttggaatcctcgccgtgaccgcctacaccttctgcaagtcctggtccctccccgacttccccgattcgccgcagtaccgcgacggcaagttccgcaatgccctgccccgtccggcgatgggcctgcgcgacggtgcggagatctggtggacgttcctgttcaacaagcccaaggggaccgtgcccgcccacccgattccggtgcagccgctggaccgcgcctccctggatgctgcgccggatcgcagactgttccggcttgggcactccacgatcctgctgaagctgcgtggccagtactggctgaccgacccggtgttctccgagcgcgcctcaccggtgcagtggatggggccggcgcgcttccacgcaccgccgatcagcatcgacgaactgccgcccatcgccggcgtgatcctctcgcacaaccactatgaccatctcgaccatgccgcggtaatgcagcttgccggcaagaccgcgcgcttcatcgcaccgctcggcgtcggcgaccagctgattgcatggggtgtggacgccagcaaggtggaacagctggactggtggcagtcgactgaagccagtggcctgcgcttgaccgcgaccccgggccagcacttctccggccgcgggctgggtgacagcgaccgcagcctgtgggcgtcatgggtgatccaggacggcgacttccgcatcttcttcagcggcgacaccggctacttcgatggcttcaagaccatcggcgagaagtacggaccgttcgacctgaccatgatcgagaccggtgcctatgatccgcgctgggcgttcgtgcacatgcagccggagcagacgctgcaggcgcacctggacctgcgcggcaagtggctgctgccgatccataacggcaccttcgacttggctctgcacgcatggcagcagccgttcgagcgcatcacggcattggcggccgcaaagaatgtgccggtggccacgccgatgatgggcgaagcactggacatgcaggcaccgcaggcgggtacgcgatggtgggagacggtggagctttag

SEQ ID NO: 495435 - DNA, 3120 bp, Stenotrophomonas maltophilia
atgacgttgcgcgccgaacgctccaaggtctcccgctcagctatcccatggcgatctgccgccgccctgctgttggccgccctggcctccagcgcacaggcacagacgctgccaccgcgcagccaatggcaggccagcagttcctcgcagcaggtgccggcaatggcgatcggccacctgatcgacggcgacccgaagaccgtcaccggcggcgccttcagtccgggccactggttccagatcgatctgggcgcgcccaccctgctggccggtgcgcgccttacctgggatgtctccaacccggaaggctattcgctgcagacctcgctggacggcacgcagtggcagaccgcgtacacgatggccgattcgctgggcgacgtggaaacgctgtacttcgcgccgcggaaggcacgctacctgcggctggccagcccgcagcgcacctccgattggggcgtgtcgatcttcgagatggagccactggacagcacgctcagcgcacgcatcagcggtgtggatgcaacgcaggcagcggcgctgtggcaaggcggcagtgcggtcgctctgccggccgggagaggtggcagccacacgctcgaactcaccctgccacgtgcgcagtccacggccggcctgttggtggaatgggcggatggcgcacgcggtgcggcccgcctgcaggcacaggacgcccaaggccgctggcaggaactggcccacgatgcgcaggcggcagatcacaagcagagctggctcgcggccaataccgcgcaatccgtgcgtgcattccgcctgagcgtggatggtcctgcaccaacggtggcacgcctgcgcctgctcggcccgaaagccgtgatgacgccgatgaagcgctaccagatcgctgccagcggcgcgcagcgcgcgttgttcccggcgtcgttgcagatgcagcagacctattggaccgcagtgggcgtgcatgcgggccggcagaagtcgatcttcgacgaatacggcaatctggaagccttcaagggcgcgccgttggtgcagccgatctggcgaagtgctgacggccgcgccgctggcgcggcaggacagcggatacagcacgcgctgcgggatggctggaagccgatgccctccgctacgtggtcaccgcagcccgggctggagttgcgcagcgaggtattcgccatcgagcgcaacggccagccggtaacgttcctgcgccatcgcctgcacaacaccggaaaaacccggatcgacggcacgctcagtctggtcgtgcgcccgatgcagatgaacccgccatggcagaacggcgggctgtcgccgatccgcgatgtggccatcgacaggcaatccgtgcgcatcaatgggcgcacgctgctgcactcgctcacgcctgtggctgcgtccggcgcggcgccgttcggcagggatggcgcaacggaaatcaccgcggacatcgctgccggccaactgccttccgcgcaacaggcgcatgatgaccagggtcttgcctcggctgcgttggactaccgcgtctcgttggcgccgggaaccagcgatgccatcgtggtcgcgttcccgttgggcaccaccgccgccgatgcccatggcgtgctgcccgaagcgcctgcgctggatctggccacgcttccccgcgatgccaatgcggcgttcgattcactggccacgcaggcgtccgcggactggcaggcacggctgggccaggtcggcctgcgcctgcccgacccatcactggtggacatgctgcgcgcgcaggccgcctacatgctgatcaaccagaccggcccggcgatgcagcccggcccgcgcaactacaaccgctccttcatccgcgacggcatggccacctcggccgtgctgctgcgcatgggcgaggccaaggtcgcgcgcgactacctggcctggtacagcgaacacggcgtacatgccaacggcctggtctcgccgatcctcaatgacgatggcagcgtcaacaccggcttcggttcggacatcgagtacgacagccagggccagtacgtggcgctggtcgccgacgttgcacggctggatggcggacccgagtcggtgcgtgactacctgccgaaggtgaaggccgcgctgcacttcctgcaggaactgcgcgagcgcacgctggtgcccggttacaaggctgaccagcctgccccggaacgctttgcgggcatccttgcaccatcgatcagccatgagggctatccatcacccacccacagctattgggatgactactggggcctgaaggggtggcacgacggcgcgtggctggccgaggcgctgggcgaccacgaaaccgcccgttgggcgcgcgagcagtacaaagcgctgtacgacgcattgcgtgcctcgatccgcgcaacgatggcgtggaagggcatcgacttcattccgtcatcggccgatcttggcgatggtgaccccacgggcgtgtcgatcgccctggacccgaccggcgcgcagagcgtgttgccggcagatgcgttgcggaccaccttcgcccgctacctggaagacgtgcgcaagcgcagccagcccggtgcgctgtatgcctacacgccgtacgagatccgcaacgtgctgagctatgtgcacctgggccagccagacgtggctgacgagctgctgcagggcctgcttcatgaccggcgcccgcttgaatggcaggtgctggccgaagtagtgcattcacggctgcgcttcccacgctacctcggcgacatgccgcatacctggatcggcgccgaatacggccgcaccctgttcggcatgctgatgcgcgaagacgatgatgcgctctcgctgctgccgggcacaccgccctcgtgggtggcggggaatggattggcggtggaacgcctgccgacggcgtatggcacgttgcagatgcaggcgcggcagcgcgacggggtgctgacggtggggcttggcaaagggctgcgcggcggaacggcggtgaaagtctggtggccggcgcgcacgatgccgaagacggtgcgtgtggacggacgcagcgtttccgacttcgacgccgagggcgtgcgcctggcgaaaccgttcagaacgctggaggcgcgttggtaa

SEQ ID NO: 495436 - DNA, 978 bp, Stenotrophomonas maltophilia
atgagccctgcagcaccgcgtcgtccctcgcgcagcaccctgttgatcgtgggcgtgctggtcatcggcatcaccggcatcgtctattcgcgcgtgcggcaggcaccggatgccggcaccgtggccgcgaccagcctggccggtgcgaacacggtggtgttgaaaggcacgttcgatccaaaggcgcaggcattgatccccacggggtatcgcttcgtcacgcccgggtcgttcaccgtggccacccatccagggcagctgccgctggccgattacggggccgacagcaaggacgttgtgggcatcgagcccgacatcgcgcgcctgatcgccgatgcgctgggcctgaagctggtgatcgtgccggtggcctgggccgactggccactggggctggagtcgggcaagtacgatgcggtgctgtcgaacgtgacggttaccgaggaacgcaagaagaagttcgatttctccagctatcgttacgacctgctgggcatctacacgcgcagcgacgggcccatccagaaaatcgaaaagcccgccgatgtggcagggctgaaggtggtggtcggtgccagcaccaaccaggaccagatcctgcgccagtgggaccagcagaacatcgcagcgggattgaagcccgtggaataccagtacttcgatgacgccgtggtcgggcggctggcggtgatcaccggccgcgccgatgtgtcgttcgagcccaacgccaccggcgcctattccgcacgcgacggtaaggtgcggcgcgtcggcctgttccccggtggctggccgaacgctgcggcgatctcggtgaccacgcgcaagggcagcggcctggctgatgcagtgacgcaggcgctgaacacccagatcgccagtggcacctacgcgcaggcgctgaaacggtggaacgtggccgaggaagccgtgccgcagtcgcagaccaacccgccgggattgccgacgttgcaatga

SEQ ID NO: 495437 - DNA, 1746 bp, Stenotrophomonas maltophilia
atgagcacgccttcgactgcgctggatggcattgccgcaccccccgcgccagcaccggcgctgaagatcgtgccggcccggcatccgctgcaggtcttcggcacggtgctggcactggcgctgatcctgatcgggctgcaatccgtgctgggcaatccgcgctggggctggggcacgttcgccgagtggttcttcgcacggcctgtactggaaggcctgggtcgcacgctgctgctgaccgcgctcggtaccggcctcggcttcgcactgggtaccttgctggcgctggcccgcgtgtccggctcgccgctgctgtcggcggtgtcgtggggctatgtatggctgttccgttcgatcccgctgctggtgctgttgctgctgctgaacaacctgggctacctgtacagcaccatcgaactgggcgtgccgttcaccggcatcagcctgttctcgtacccgaccacgcagctgatcggcgtgttcaccgccgcagtgctgggcctcaccttgaatcaggccgcgttctcggccgaagtgatccgtggtggcatcctctcggtcgaccatggccagtacgaggcggcagcggcacttggcctgccgcgtggccgccaggtgcgccgcatcatcctgccgcaggcgatgcgttcgatcctgccggccgcgttcaacgatgtgatcggcctggccaagagcacctcggtggtctacgtactggcgctgccggagctgttctacaccgtgcaggtgatctaccgccgcaatctggaagtggtgccgctgctgatggtggccacggtctggtacctggtcatccttaccgtgctgtcgctgttgcagcggcgcgtggagcaacgcttcgcgcgcggccagctgcagcgcgagcgctcggtgtcgcgggtgtcatcgcccccgcgtgtgcagagcgaagccgcaccgcgcgtagcaagccgcccgcgtatcgccccccaggttgaagcgggcgagggcgcggcggtgtcgctgcatggcgtaggcaaggtgtttggcgaccagccggtgctggaagacgtgaacctggacctgcgcgccggcagcgtgaccgtgctgatcggcccttcgggcgccggcaagtccacgctgctgcggctgatcaaccacctggaacgcgccgacggcggttacgtgactgtcggcggccagctgatcggctaccgccgcgagggcgacaccctgtacgagctgcccgagcgcgagatccgacgccgccgtgcagaagtgggcatggtgttccagggcttcaacctgttcccgcacctgaccgcgctggagaacatcatcgaggcaccgatcgcggtgcgtggcgtgccgcgcgcgcaggccgagcagcaggcgcgcacgctgctggaacgggtcggcctggccgacaaggccgatgccttcccgcgccagctgtccggtggccagcagcagcgcatcgcgattgcccgcgcgctggccctgcagccgaaggtgctgttgttcgatgaaccgacctcggcgctggacccggagctggtagccgaggtgctgagcgtgatcgaggagctggcccgctccggcaccacgctggtgatcgtcacccatgagctgagcttcgcccgccgcgtagccgatcacgtggtgatgatggaccagggccgggtgatcgagcagggcacgcccgaggtgctgttcgaacgcccgcgccagcagcgcaccgccgatttcctggccaagaccctgtaa

SEQ ID NO: 495438 - DNA, 552 bp, Stenotrophomonas maltophilia
atgagcaacaacgaacgcttcctctatacctcggtggatgatccattggcgcggccgcttttcgatggcctggagcaggagtacgacagccgctatgccgacgtgcgccgacgcatcggcggcagcgcccgcgaggagctgcaacgctatccggcgcaggccttcgcggcgccggtaggcgcgttcgtgctgctgctgcgcgatggtgtggcgatctccggcggcgccttcatgccgcaccgcgatccggacaccgccgaattcaaacgcatctggacgctgcccgggctgcgccggcagggcatcgcgcgtcgcgtgcttcaggaactggaagaccaggcggcgcggcaagggtaccggcgggtgttcctgaccaccggcttccgccagcctgaagccgtcggcctgtacctcagccacggctataccgcgctgttcgacctgcaggccgacccggaaaccatcgcgcatctgccgttcgagaagcatctacgtgcgccggcgccagtgctttcgccgtcgcagaccgtgttgcacggagcccacgcatga

SEQ ID NO: 495439 - DNA, 1221 bp, Stenotrophomonas maltophilia
atgagcggagaaactgcggcagcaccgggccatgtccggcgggattcccaaacgacgggcgtattgcccgagatcgcggcacgcgccgaggccaccatcgcgatccgccatgacctgcaccgccacccggagctggccttcgaggagcaccgcaccagcgcccgtgtggccgagttgctgcagcagtggggctatgaggtgaccaccggtctcggcggcaccggcgtggtcggcacgttgcagcgtgggcagggcggccgtcggctggggctgcgtgcggacatcgatgccttgccgatccacgaagactcggggctggcctacgccagccagaccgacggcctgatgcatgcctgcggccatgatggtcacaccgccatcctgctgtccgccgcgcattacctggcccatcacggcactatcgacggcaccttgcagctggtgttccagccagccgaggaaaccggctcgggtgcatcgaagatgattgccgacggcctgttcgagcgcttcccggtggatgcgatctatgggctgcacaactggcccggcgtaccggtcggccacttcggcttcgtcgacgggccggcgatggcgtcggtcgactgggcgcggctgaaggtgatcggcaagggcggccacggtgccgagccgcagggcagcgtggacccgatcctggtcgccgcgcacatcatcactgcattgcagagtgtggtgtcgcgcaatgtcgacccgcggcagatgggcgtggtcaccgtcggttcgatccacggtggacaggccgccaatgtgattccggacgtggtcgagctgaagctgaccgtgcgcgcctacctgcccgaggtgcgcgacacgctgcgccgccgggtgaccgggattgccgagcagaccgctgccgctttcggggcacgcgccgaaatcgagttcccgcgtggcttccccagcgtgatcaaccacccgcagcagactgcctacatccgcgacgtggccatacagggcttcggccacgaacaggtggtgccggagttcgcgccgcgcaccgccagcgaggacttcgctttcctgttgcaggcacggcccgggagtttcgtgttcgtcggcaacggcgacagcgcaccgttgcacagcccgcgctatgtgttcaacgacgccgccattgcacccgctgccagcctgtgggcgcggctggccgaagactatctggtgaaggacgtggcatga

SEQ ID NO: 495440 - DNA, 1344 bp, Stenotrophomonas maltophilia
atgagcacgaccccgcgccacattccgttcggcatcatgctgcagggccccggcagccacatgcatgcctggaagcacccgtccaacccggccgatgccagcgtcaacctgcagttctacatcgacatcgcgcgcaccgccgaagacaacggcatcgccttcggcttcgtggccgacggcctgtacatcaacgagaagtcgatcccgcatttcctcaaccgtttcgagccgatctcgctgctgtcggcgctggccacggccacgaagaagatcggcctggccggtacgctgtcgacgtcctacagcgatccgttcaccgtcgcccgtcaattcgcctcgctggatctgctcagcggcggccgcgccggctggaacgtggtgacgtcgccattggagggctcgggtcgcaattatggccggccacaccccgagcatgccctgcgctaccagatcgccgacgagtacctggaggtggtgcaggggctgtgggattcctgggatgacgatgccttcgtgcgcgagcgcgacagcggtacgttcttcgcgccggaaaagttccgccgcctcgaccacaagggccgcttcttccaggtggaaggcccgctcaacatccagcgttcgccacagggccagccggtgatcttccaggccggttcgtccgacgatggcatcgcgctggccggcaagtacgccgatgcggtgttcacccattcgccgtcgctggaagaaacccgcgcgttcacccagaaggtgaagaactcggcgatcgcgcatggccgcagcggcaacgacgtgaagatcttcccgggcatcggccccatcgtcggccgtactgtcgaagaggccgaagccaagtaccaggcgatcgccgcactggccacgctggaggatgcactggcctacctgggacgcttcttcgaccaccacgatttcagccagtacgatccggatgctcccttcccggacctgggtgagatcggcagcaactcgttccgttccaccaccgaccgcatcaagcaggatgcgcgggagaaggggctgagcctgcgccaggtggcattggaagccgtgagcccacgaccgaacttcatcggtacgccggagcgcgtggccgatgagctgatccgctggttcgatgccggtgccagcgacggcttcatcctcggttttgcggcgcagcgcgaaggcctggacgatttcgtgacccaggtgctgccgatcctgcaggcgcgcggctaccaccagcgcgagctggaggggcagaccctgcgcgaacatctgggcctgccgtacaaggccagccgtcattcgaccgatgccgagccggcgcggaaggcggggtag

SEQ ID NO: 495441 - DNA, 978 bp, Stenotrophomonas maltophilia
gtgagctatcagatcagcgtgctggacaagagcccggtagccgagggcgcttcgccggagcaggcgctgcgcaacagcctgcagctggcgcagcgcgccgaacagctgggctatcaccgctactggtttgccgagcaccatgccgcaccgacgttggccagccctgcaccggaagtgctggcggcctgggtgctggcgcagacccggcgcatccgcatcggcagtggcggggtgatgctgcgccactacgcgccgtacaaggtggcggagaacttcaacctgctggcggcgctggcgccggggcgcgtggatctgggcgtgggcaaggcccccggcggcctgccggcctcgaccgccgcgctggcagccgggcgtccgcctttcgccgacttcgaccagcaactgcgcgacctggagggttatctggccggcgccgaaagcgaggcgctggcgcggccggttccgcagcaggcgccggagcgtttcctgctcggcgcaagtccacagagcgcaaagcaggcggccgaactgggctggcgcttcgtctacgccgcgcacttcgatggtgacccgaagcacatcgaggccgcgttcgacgcctatcgcagcgtcgcctcgcagccaccgctgctggccacggtggccttcgccgcaccgactgctgaaaccgcagcgcgtcacatcggtgcgctgcgggtctacaagctgcacctcggtcccgggcaggcggtgaacctgcccagcgccgaggcggctgccgaatacgcgcgccaggcgggcgtggccgacttccgcatcgaggaaacgcgccccagcgtgctgtccggcgatgcgcagcacgtgcgcggcgaactggatgcgctgcaccggcgtttcggcgtgggcgagttcatcctcgatgcgccggtggccgacctcgacgcacgcctgacatcccttgaactgctgtcgcccgcgccgcgcgcggcggtggcctga

SEQ ID NO: 495442 - DNA, 363 bp, Stenotrophomonas maltophilia
gtgagtctggacgcaaccgataagcccatcctgttcctgctcgaccgtgagttcgaggacggacagattcccggccagcgcttcttctgccggcacagcctgttgctggaaggtgcactgtcgagcatcgaaggcctcgacgcgcagctggacgtacgtcgcatcggcttcgcgcggccgcgccgcgaggtgatcgccgagatcggcgagcaggaccagtcgttgcccaagctggtgctgccgcagggcgtacgcagcgacctggccagtggcgcgcaccaggaccggcagtacatctccggtgccgaaccgatcctggccgcactgaacggattgctcggcattcccgtggcccacccctga

SEQ ID NO: 495443 - DNA, 582 bp, Stenotrophomonas maltophilia
atgtcttctgcattgaaggtggttgcattggtggggtcgccgaccagttcggcgacatcgcgcacgttgctgctggtgcggcatctgctggcgtcgctgcagcaacgcgtgcatgccagcgtggagctggtggagctggcgccgatcgcgcgctcgctgggccagtcgttgtcgcgcgatgaggcggggccggaggtggagcaggcgctgcagagcatcgaggccgcagagctgctggtggtggccgcgccggtctatcgcggctcgtatcccgggttgttcaagcacctggtcgacttcgtcgggctggaggcgctggtggatacgcctgtgctgctggcagcgaccggtggcagcgagcgccatgcgctggtgatcgaccaccagttgcggccgttgttcagtttcctgcaggcgcacacgctgccgatcggggtgtatgccacgcctgccgacttcgatggcgagcagatcaacagtgctgccttgcaggcacgcatcgcgctggcagccgagcgtgcggccggccacctggcgacgcaggcgctggcggtagcggcgccgctgcgacgcatcgcctga

SEQ ID NO: 495444 - DNA, 2577 bp, Stenotrophomonas maltophilia
atgcctgccgcccacgcccctgtcctgagcactctcgctgttctgatcacagccatccttgccgcctcgcccagccatgcggctgaagcagacgcagatcctgctgccaccgccgcgacggccaacgtggccgcgtccacgctggatgcggtggtggtgaccggttcgcgtaccagcacgcgcacggtgaagaacagttccacgcccatcgatgtgatctctgcagaggacctcgccgcgaccgggcagggcaacctgctggaagcgctgcagcgcagcctgccgtcgctgagccagatcggcggctaccagagcgaccaggagagcctgatccgtggctaccagctgcgcaacctgtcaccgggctacacgctggtgctggtgaacggcaagcgccgcaatgccagcgcttacgtgagtggcgcaaacggtggcggctttccgggccatgcctgggccgacctggcgttgattccggtctcggccatcgaccacgtggaagtgttgcgcgatggtgcgtcggccatctatggctcggacgcgatcaccggcgtggtcaacgtgatcctgaaatcgcaggcgcacggtggcgatgtgtcggtggagagcgggcagagcatcgatggtgatggttcgcgtaccagcgtgcgcgccaatgtcggcctgccgtggggccaggatggcttcgtcaacctgtccggcgagaacacgcggcagcaccacgcgatccgcacccgccgctacatcgatggctacctgagctatccggcagtagatgccaacggcaaccgggtcgcactgcgcccgaacaatcgcttgccggcgggtgcatcgccgaacccggccgaggccaaccgcgatgccgaggccaacaccatcctcagttcgccgtcgtacgcgttgatggctttcgcagtgaatgccggccatggcctgggcgagagcgcgcagttctacgccaacgccacggccagtgaccgcaccgcgcaggcgatccagaacttccgcctgccggcgaccatcttcaccacctacaaggcacccggcgtgctgagcgtgtttcccgatggcttcctgccggtgctggagaccaaggaaaagcagtacaccggcactgcgggcgtgaaagggcagatcgcgggctgggattacgacgccagcctgaccggcaaccgcagcacggtgcgcacctatacccgcaattcggtgaactactcgctgccgtatcccggttcgcccactgacttctatgacggcaagctggactaccagcaggggatcgccaacctggacctgcgccgtggcttcgaggtggcggcgttggcctcgccactggaagtgagcgcaggcgccgagtaccagcacgaacagtacgaacgcggggccgggcagtgggagtcgtacaccggcttcggtgcagccgcgttcgtgggctactccaccgccgatgcggtgaaggcgacgcgcaacagcaaggcggtctatgtgggcgcggccagcaacatcacctcgcgctggtatctggatgcagcggcgcgctgggaagatcattccgacttcggcagcgtgtccactggccgcctgaccacgcgcttcgacttcaccgatgcgttgggtgtacgcgcgacggtcagcaacggcttccatgcgcccagcctgggcgcacagttctaccaggccacgggcagctgcccgtgcgggaccacgctggtggcgcaggtgtcttcgccggcggcggttgcgctgggtgccacgccgctgaagcccgagaaagccaccaactacagcctgggcgtgacctgggacccgagcccggcgttccatcttgccgtggatgcgtaccagatcgacatccgtggccagctgggccagtccagccagatcggctacaacgcgcaggatccggcgcgcatcaccgacaacagcggtacggtgctgagcgcggcgcagaagaacatcatcgatgcgctgctgggttccgccggcatcagcatcctgccgggtgatgcgttctacgccagctacttcaccaatgtaggcaatacccgcacgcgcggtgtcgagctgaccctggaagccaaccaggacactgcgtggggcaagctgcgctggagctacgcggccaacgtcggccgtaccaccatccagaaagtgagcgacattccggcggcgctgcaggggctgccgaacatcaacctgctgaccaagagcagcgaatacgcgctgcgcttccgcacgcccagctacacccaggtagccgggctgggctggcagaacgggcgctggcgctcgaacgtcgatttcacctactacggcccgatcaagcgcctgaacaacggcgtggagtacaagcagccgccggtgctggtgaccaacctgtccggcggcgtggagctgggggcgggctggagcgcggcgctggggatcaacaacgtgttcgacaagcgcacgcgcaaggtgccggagtacgcgcgcagtgctaccgatgtggccagcatcgagacgacctgggacaacggcgatgtgctgggcaacgtcggggcgtattggtatgggcggatcagttaccggttctga

SEQ ID NO: 495445 - DNA, 1002 bp, Stenotrophomonas maltophilia
atgcccagcccacccgccgatcccaccgcgccgctcgttgccatcgtcgcctgccacggccaggggctgttcgaattcggctgcgcggtcggcctgttcgcgccggtgcggccggaactcggcgtggcctggtaccgcacccagctgtgcgcaggcgaacccggtgcgctgcgcatgctcggcaatgcgcaggtgcagcttccctacgatctcagcgcggttgatgacgccgacatcatcgtcatccccggttggcgcgaacccagcgagcgcccaccgcaggcactgctcgatgcactgatccgtgcccacgcacgcggcgcgcgcatcgcctcgatctgctccggtgcgttcgtactcgcctgggccgggctgctcgatggccgccaggccaccacccactggcgcctcaccgaagcgctggcacgcgagttcccacgcatcgatgtgcgcgaggatgcgctgtacgtggataccggcagcatcatcacttcggccggctcggccaccggcatggacatgatgctgcacatggtgcgcaaggactacggcgcgcgcgtggccaacctggtggccgaacggctggtcctggcaccatggcgtgatgccgagcgcagccagcgcgtcagccgcgccattccccacggcgagcccacccgcttggcaaagctgatggaatggatgcgccgcaacctgcgcgagccccactcactgggcagcctcgccgagcaggccgcgctcagccaacgcacgctgcagcggcagttcctggacgccaccggcctgtcgccgatcgactggctgatccgcgagcgcgtggctttcgcgcgcgagctgctggaaaccactgaccggccgctgcagtggattgcagaacaggccggctttggttcgcaggaatcgttccgtcggcacttccgcggtcaggtcgacgcgagccctaccgagtaccgcagccagcatcgcggcggtctcggtgccgaccggttggtgggctgttga

SEQ ID NO: 495446 - DNA, 435 bp, Stenotrophomonas maltophilia
atgctccatgcatttgcttactccagccgcatgtcggctgggctgtccaatcaagccctccaccagatcgtctcgcaatctgccacgttcaatcgccgggtggacgttaccggtgcgctgatcgtcgacgggcagcggtttttccagtacatcgaaggcccgcccgacgccctggaagcagtcaagcgccgcatccatgacagccgctcgcatgctgccgtcgtgccggtactggacatgtccatcagcgcgcgtgccgttccgtactgggcaatgacccacatcgagaccgggcagatcgtggtgtccggcctggtgaatgcgcgctgggacgagttcggccattccattccgggcatggaccagctcgtcggcctgctgcgtccgcattttccacgcgtcggcagcgtcggcgcgccacgcgcagccgcctga

SEQ ID NO: 495447 - DNA, 468 bp, Stenotrophomonas maltophilia
atgcccgtacccgcccaccctgcaacggaaacacgcgcatcgcctgccgacctgttcgagatcgtcgtcgtgcgtgcaggcaccgtcctgttcgccatcgacatccaggcggcggtcgaaatccgcggtccggaggcattcggccctgcagaccgcaacggcaggccgaccctggaggtccgtgggcaaccgttacccgtcgtcgacctgcgccgcatgagcgaccaaccggcattcgagggtggcagcccggccatgctgttgatcaacgccggcaccgcaaccctggcgctggccgtggacgaagtgctggagatcgagacgccggacgcgagcgcgaacacccccgagcctgcagcgggccaatcgttctgcttctgcagccggcacattcaactcgatccggcgcgctcggctgcactgatggaaccggcggcactgctgggcgcacttgccgcgccggggtga

SEQ ID NO: 495448 - DNA, 501 bp, Stenotrophomonas maltophilia
atgtcccaccctctgtccacacttggcgtgatccataccgctgtcagcctgatcccggtgttgagtggcctgtatgccttcattcgccatcgcgcaatcgatcccgccacgcgcgcgggcgagctgtacctggtggggttggtgctgtcggtggccacttccttcaccgtgtccagcacgggcgggatcaaccccggccacgcattcggggtgatcgtgctgctggtggcattcggcggcgtgctggccgcgcggctgcgctggctggggcgcgccgcgcgttacctgtcgaccttcgcactgtcgttcagcttcctgctctcgttggtgcccggcgtcaacgaaacgctgacccgcctgccggcagcgcatccgattgcggcggcaccgatggccccggtggtgctgcacacgctgctggcctgcctggtggtgttcgtgatcggctttgccgcgcagtgctggaggctgcgaaaccgtgcttttgcaggacgatcctga

SEQ ID NO: 495449 - DNA, 588 bp, Stenotrophomonas maltophilia
atgaaggaatcgctctcgcccaaggcccaggaaatcctggcccatgcccgtgcgctgctggaagccggtggctacaacggcttcagctacgccgacgtgtcggcgcgggtgaacatcagcaaggccagcatccatcaccacttccccagcaaggcggatctggtgcgcacggtggtcgagctgtaccgggccgaagcgcgcgaaggcctggcgctgctggaccggcagttggccgacccgctgcaggagctcaacgcctatgtggattactggtccagctgcattgcagggggtacgtcctcgttctgcatctgcgcgatgctggccgccgaagcgccgatgattccggcagagatcgctgaggaagtgcgcggccatttcgaggacctgagcggctggctggcagtgacgctggagaagggcgtttcgatgggccagctgcagttgcagggctcggcggccgatgaggccaaggcgttcatgtcatcggtgcacggcgcgatgctggccgcgcgcggtttcggtgatgcggcgaccttcgcggcactggcgcggttggcgatcgcgcgggtgagcgcggcgtcctga

SEQ ID NO: 495450 - DNA, 951 bp, Stenotrophomonas maltophilia
gtgcctgtggtcgattccctgcaacggcaggtgcaggcgcgcatggtcggcctgctgaagacgctggcggtggaggagggctatacgctcacgcgcctgccgggggtgcggttgctgcgatcggaccggccactggcgcgcacgccggtgttgtacgaccccggcatcgtgatcgtctgccagggcgtgaagcgtggctatctgggcgggcaggtctaccagtacgacgcgcagcactacctggcagtgtcggtgccggtgccgttcacgatggaaaccgatgcgtcggcccaggcgccgctgctggcgatctacctgcatctggatctgcagctggcggcggatctgctgatcgaactgggtgaacaggagggcaccccggcgacaccggcgcagggcatgatgtccagcccgatgcaggcgccgatgcaggccacggtgctgcgcctgctggaggcactggctgaaccgttggaggctgccgtgctcggccctgcgttggtgcgtgaggtgtacttccgcgtgctgacgggtgcacagggcggcgcaatgcgcgaggcgctggccctgcgcgggcgcttcggcagcatcggcagagtgctgcggacgatccatgccggatatgccaccgccctggacgtggggcaactggccaccgaagcgggcatgagtgtggcgaccttccacgaccacttccgcgcgattaccggcacgtcgccgatgcagtacgtgaagtcgacccgcctgcaccaggcacggttgctgatgctgcggcaggggatgactgccgaagcggcatcgctggcggtggggtatgccagcccgtcgcagttcagccgtgagttcaagcgcctgttcgcgttgccgccggcggccgaggtcgcgcggatgcggcgcagtttcgcgctgccacctccgccagccgatgcggtgtacgtatcttcgcattga

SEQ ID NO: 495451 - DNA, 840 bp, Stenotrophomonas maltophilia
atgcccccttcccgctttctcctcatcaccggtgtcagcagtggattcggccgcgcccttgcccagcaggccctgctggccggccaccgcgtggtcggcaccgtgcgcaacgaaaccgaccgccaggtactcgaagcgctcgctcccggccgcgcattcggtcgcctgctggacgtaaccgataccgccgccatcaatgcgctcgtcgccgatatcgaaaccaacatcggaagcatcgacgtgctggtcaacaacgctggctacggccacgaaggcatcctcgaagaatccacgctcgccgagctgcggcagcaattcgaggtgaacgtgttcgctccggccgcgctgatcaaggccgtgctgccgcacatgcgcgcccggcgccgcggccatatcctcaacatcacctccatgggcggtttcatcacgatgccgggcatcgcgtggtactgcggcagcaagttcgcgctggagggcatcagtgaagtgcttgacaaggaagtcgcgccgtttggtatccacgtcacggccgtcgcgccgggttccttccgcaccgactgggcaggccgctcgatggtgcgggcaccgcgcagcattgacgactacgacgcattgttcgatcccatccgcagcgcgcgtgaggcgaagagtggccaccagcccggtgatccagtgaaggctgcgcaggccatgctgcaggtcatcgacagcgacgctcctccccgccacttgctgctgggcagtgatgcactgcagctggtgagggcaaagctggcatcgatggccggtagcatcgacgcgtgggaacagctgagccgttcgaccgacggcgtagcgtga

SEQ ID NO: 495452 - DNA, 1770 bp, Stenotrophomonas maltophilia
atgtattacagcagtggcaactacgaagctttcgcgcgcccgcgcaagccggccggtgtggatggcaagcgcgcctggtttgtgggctcgggcctggcctcgctggccggcgccgcattcctggtgcgcgacgggcgcatggccggtgaacgcatcaccatccttgaacagcagcagattcctggcggcgcgctggatggcctgaaggtgccggagaagggcttcgtgatccgcggcggccgcgagatggaagaccacttcgagtgcctgtgggatctgttccgctcaattccgtcgctggagattgaagatgccagcgtgctggacgagttctactggttgaacaaggacgacccgaactattcgctgcagcgtgccaccatcaatcgcggcgaagatgcgcacaccgatggcctgttcacgctgaccgagcaggcccagaaggacatcatcgcgctgttcctggccacccggaaggagatggagaacaagcggatcgacgaggtgctgggccgcgacttcctggacagcaacttctggctgtactggcgcaccatgttcgcgttcgaggagtggcactcagcgctggagatgaagctgtacctgcatcgcttcatccaccacattggcggcctgccggatttctcggcgttgaagttcaccaagtacaaccagtacgaatcgctggtgttgccgctggtgaagtggttgcaggagcagggtgtggtgttccagtacggcaccgaggtgaccgacgtcgacttcgatctgcagccgggccgcaagcaggccacgcgtatccactggatgcgtgatggtgtagccgatggcgtggatctgggcgcggatgatcttgttttcatgacgatcggttcgctgaccgaaaactcggataatggcgatcaccacaccgcggcgcgtttgaacgaaggaccggcgccggcctgggacctgtggcgccgcatcgccgcgaaggatgcggcgttcgggcgcccggacgtgttcggcgcgcatatcccgcagaccaagtgggaatcggcgacagtgacgacgctggatgcgcgcattccggcttacatccagaagatcgccaagcgcgacccgttcagtggcaaggtagtgaccggcggcatcgtcagcgtgcgcgactcgcgctggctgatgagctggacggtgaaccgccagccgcatttcaagaaccagcccaaggaccagatcgtggtctgggtgtactcgctgtttgtggatacgccgggcgactatgtgaaaaagccgatgcaggagtgcaccggcgaggagatcacccgcgagtggctgtaccacctgggcgtgccggtggaagagattgatgcgctggccgcgaccggtgcgaagacggtgccggtgatgatgccgtacatcacggcgttcttcatgccacgccaggccggtgaccgcccggacgtggtgccggacggtgcggtgaacttcgccttcatcggccagtttgccgaatcgaagcagcgcgactgcatcttcaccaccgaatattcggtgcgcacgccgatggaagcggtgtacaccctgctggggatcgagcgcggcgtgccggaggtgttcaattccacgtatgacgtgcgctcgctgctggccgccaccggtcgcctgcgcgatggcaaggaactggatattcccgggcctgcgttcctgcgcaatctgctgatgaacaagctggacaagacccagatcggtggcctgctgcgcgagttcaagctggtgcaggaagactga

SEQ ID NO: 495453 - DNA, 525 bp, Stenotrophomonas maltophilia
atgactgaaaccggaaaggacgccttgaacatccgccgcgccagcgcggccgatgcccccgcagtgttggggctctttgacgaggtgatcgagtggttcgtgtcgatcggcaatgtgcagcaatggggcagcgaaccgtggtcgacgatgccgcgccggattgcccaggtcaccgaggcgtgtgcactgccaggcgcatgggtggcgcagaacgagcagggcgacgtgcgggcgttccttgcactgggcgagtcgatgccctatgtgccggcgcccaccgggccggagctgtatgtgcgggttctggtggcctcgcgtgatgtgggcgtgcgtggcatcggccgccgcctgatggcgtttgccgacgagcaggcgcgcgctgccggtgtcgaccatctgcgtgtggactgctacgccggaggcagcggcgacctggtgcgcttctatgaatcctgcgggtatacgcgcatcgcgccgttcaacgtggacggctggccaggcatgctgctgggaaggacgctctga

SEQ ID NO: 495454 - DNA, 1095 bp, Stenotrophomonas maltophilia
atgcagcaccctccccgtattgccgtcatcggcgcaggccccgctggcctcaccgctgcgctcatcctgcatcggggcggtcaccgcgtgagcgtgtacgagggcgaagcatccgggcagcagcgcacacagggcggcacgctggatctgcacgacgattccgggcaggtggcgctgcagcgcgcgggcctgctggaggccttccgtgcggtggcgcggcatgaggggcaggaggcgcggatgggcgacccgtggtccggggagatcaccaccggcgggttcgggccggaagggagcaaggacaagccggagatcgaccgcggcgacctgcgccagctgctgctggacgcgctgccggcggacacggtgcagtggggccacagcctgaccgcgctggtatctgcacaggcgaacggccacggcctgcgattcgccaacggcgtgcagcgcgaggcggacatcgtgatcggtgccgatggtgcgtggtcgaaagtgcgcgcggccttgagtacgtgccagccgctgcccaccggcattaccttcttcgaaggttggatcgcacagcctgctgcggacatcgcagcgatggtcgggcagggcagcctgttctgctttggcggcgaggaggccctgttcgtgcaacgcaacagccgcgatcggctctgcgtgtatgcggcgctgaagcgctcttccgagtggcttgatgcgcagatcgcgcagcacggcatacggacgctggtgacaggctgctataccgggtgggccacgaaccttcggcgcctgctggaggcctgcacggacttcgtgcggcggccgatctacagcctgccagcggatttttgctgggccccgcgcgatggcgtgaccttgatcggcgatgcggcgcatctgatgccgccggtgggcgtgggcgtgaacctggcgatgctggacgcgtcggatgtggcgatggcgttgtgcgcgcggccggatgcgatcagcgcgatgcgcgacgccgaagtgctggtgcgtgaacgcgcccgcgccctgatgccggatgcgatcgaggggttccagcgctggttcattaccggaggggatgctccacgcggttga

SEQ ID NO: 495455 - DNA, 486 bp, Stenotrophomonas maltophilia
atgtcaaccattgcccggcaacgttcggccatgacctcccccagcatcacacccgacgaatgggccacctggcgcggcttccggcgcatggcagaaatcacctccggccgcatcgtccaggacatcacccgcagcaccgggctctcaagggccgacttcatcgtgctgatggagctgaaccagtccaaggatcgctgccgcccccagcgcgaactgctggactacctggaatgggacaagacgcgcctctcgcaccagctgacccgcatggcgggccgtggcctgatcgaacgcgataccgacagcgaaaacgtcgtagtgatccgcatgaccacagaaggtcacgcgcagctgcgcgcggcacggccggtacacgccgccggtgtccgccggtattttctcgaccatctctccgcggatgatcgtgccgcactgcagcggatcaccgacaaactgcatgccgccctgcaggacggcgagaactga

SEQ ID NO: 495456 - DNA, 456 bp, Stenotrophomonas maltophilia
atggtggatatcgcacacagggtcggcatcaaggcccccgcaagccaggtgtatcaggcgctggccacccccgaaggcgtggccgcctggtgggccgaagacgcgcacggcgaccgcgaagccggcggcacggtcaaggtccgtttcaccaacaacggccaggaaatcggcgccatggaaatgaagcttgagcagcttgttccaggcgagctcgtgctgtggcggttcctcgccggccccgccgaatggatcggcacccacgcgcgcttcgcgctgaagcaggaaggcgactactgcatcgtgctgttcacccacgaaggctggaaggaacgtgtcgagttcacctcccactgcagcaccaaatgggcggtgttcctgatgagcctgaaggcactgctggaaaccggcaagggccagcccaacccacacgacgtcaggatcgacaactggaattga

SEQ ID NO: 495457 - DNA, 333 bp, Stenotrophomonas maltophilia
atggcggtagaccacgtgcgcgacgcagacaaggtgttcaaggcactggccgatcccacgcgccgcacgctgctggatctgctctgcaaggacaacgggcagacgctgggccagctgtgcgaacacctggagatggcccggcaatcggtcacccagcacctgggcctgctggaagacgccaacctgatcagcaccgttcgccgtggccgcgagaagctgcacttcatcaacccggtgccgctgcatgaagtctacgaacgctgggtacgcaagttcgagcagcagcgcctgagcctgctgcatgacctgaaacgcgaactggaaggagaatga

SEQ ID NO: 495458 - DNA, 459 bp, Stenotrophomonas maltophilia
atgtctgcagagtcaacccgcttcatccacgtgatctatatcgcgtccacgccacagaaggtgttcgaggccatcacccgccccgagatcgccagtcgctattggggtcacgagaacgtctcggactggaaaccgggctcgcgctggcagcacgtgcgcgccaacgaaacgcgctcggtcgagctggtcggcgaagtggtggaaagcacgccaccctcgcgcctggtcatcacctgggccgccgcctcgcaggccgacaacccggacgcctacagccgggtgaccttcgacatcgtgccctaccaggacatggtgcggctgacggttacccatgaggaactggaacccggcagcggcatggataccggcatccgccagggctggccgatcgtgctgtccagcctgaagtcgctgctggagaccggcaaggggctggatgtgtttgcgaagccgaactga

SEQ ID NO: 495459 - DNA, 1287 bp, Stenotrophomonas maltophilia
atggaagggtggaagagtcgttcgttgttgagcgcggtgctggtgtgttctggcctgccggttgcagccgccgagctgtgcacggtcagtgcctacggtgacgggcaaggcaacatcgtggtgctgggcgcacccgctgcggcgccggccacaggccagcgctatctgatgctggacgggcgacgtggcgccaccggtgatgccaacgcgccggtgagctgcagcgacgatgtggtcagcttcaggtcgcctgcgggagcgacgcagcgctggcagcgactgccgacccgcgataccgagacgaccttcagcagtgccggaacaaaactggtcgggcagctgatcgaaccagccggtccggccgaccccaaacggccgttggtggtgctggtgcacggctcggaacgcacgatggcggcggcggccatctaccagcgcatgctggtggcgcaggggatttcggtcttcgcttaccagaagcgtgggaccggcgattcggaaggcgagtacacacagaacttcgaactgctggccgacgacgcggcggcggcgcttgccaaggcgcgcgaactggcgagaggccggttcggccgcgccggctacttcggtggcagccagggcgggtggatcgcaccgcttgcggcgacgcgctcgcaggcggatttcgtggcgatcggtttcgggctggtggtgtcgccgatcgaggaggaccgcgagcagctgttcgacgaggcacggcgcatgcagctggatgcggcggcgttggcgcaggtcgggcagctttcagacgcaaccgcgcagttgatgcgcacgcatttcactgaagggttcgaagcgctggccagggtgcgtagccagatcggtgccgcgccgtgggcaaagacgatcaacggcgagtacagcggcgacatgctgcgcatgagtgacgctgacctgcgccggatcggtcgcgcgcgcttcgacaacctggagctgatctgggactacgacgccgaagccgcgctgcgccgcctgaaggtgccgttgctgtgggtgctggccgagcaggaccgcgccgcgccgattgccgccacgcgttcgatcctgtcgcgcctgcgcgcgtcggggcaaccgatcgacacctacctgttcccggataccgaccacggcatggtcgagttccgcaccgatgccgagggcaaccgggtgtcgacacggatcaccgacggctacctgcgcctgctggccgattggatcaagcaggatgtgcgtggcagttatgggcgttcgcgcagattgagcgattga

SEQ ID NO: 495460 - DNA, 378 bp, Stenotrophomonas maltophilia
atgcacacacatgtagaacagatcggcagcacccgcgtcctgcgcagcgccgatacaggcccgctgctggatggcaacgccctacgcgacctggtcggcgatgcccttgggcaccaggccgagtggatcgccgtgccggtgcagcgcctttcggcagacttcttcgagctgcgctccggcatggccgggcaatggctgcagatgctggtgaactaccgcctgcacttcgccgtactgggcgatgtcagcgactaccgcgcgcagagcgaatcgctggacgcgtggatcaccgaatgcaaccgcggccgcgacggctgcttcgtggccgactgggacgccctgctggcgcgcctttcggcccccgccagcgccggctga

SEQ ID NO: 495461 - DNA, 765 bp, Stenotrophomonas maltophilia
atgcgtgcttcagacgcagattccctgcacagcaaagtggcggctgtcaccctcggtttctgggtgatgaagatcgccgccaccaccctcggcgagactgcgggtgacctgctgtcgatgacgctcaacctcggctacgtggccagctcggccatcctgctggcgatctttgccggcctgctgggcatgcagttgtcggcgcggcgcttccatccggtgctgttctggtcggtggtgctggcgaccagcaccgctggcaccaccatgtccgacctgatcgaccgcacgctcggcctgggctacgccaccggcgccagtctgctggccggctgcctggcgctggtgctgctggcctggcgcatgtcggaaaagtcgatctcggtcagcaacatcgcatcgcgccgcgccgaaggcttctactggaccgccgtgctgttctccaacacgctcggcaccgcgctgggtgatttcctcgccgacgattccgggctgggcttcaccggcggcgcactgctgatcggcagcctcatcgcgctcactgcgctggccagccgcatcaagggcatcaaccgggtcatcctgttctggatcgccttcgtgctcacccgcccgttcggcgccaccttcggcgacctgctcaccaaaccgctggaaaagggaggcctgggcttcggcacagtcggctcgtcgctggtgctgttcaccattctcgccacactcgtggcactgccgatgttgcagcgcaaagcgcagctagccagctag

SEQ ID NO: 495462 - DNA, 783 bp, Stenotrophomonas maltophilia
atgctcagtggaaaggttgcagtagtcaccggctccaccagcggcatcggtcttggcattgccaccgccttggcccggcaaggcgccgatatcgtgctgaacggcttcggcgatgcggcggagatcgaacgcatccgttccaaactggaagccgagttcggcgtgcgcgtggcgcatgacggcgccgacctttcccatggcgaggcggtgcgcgggatgatcgatcgcgccgtcgcgacgatggggcgcatcgacatcctggtaaacaacgcgggcatccagcacaccgcgtcgatcgaggaattcccggtcaaaaagtgggatgcgattctggcgctgaatctctcggcggtgttccatgcaacggcggcggccttgccccacatgaagcagcagggcgccggccgcatcatcaacattgcgtcggtgcacgggctggtgggctcggtgaacaagtcggcctacgtggcggccaagcatggcgtggtggggttcaccaaggtgaccgcgctggagaatgcgggtacgggcattaccgccaatgcgatctgcccgggctgggtgcggacggcgctggtcgagcagcagatcaccgcgttggccgagcgcgaaggcacggatcaggagaccgccgcgcgtgcgctgttggctgagaagcagccgtcgttgcagtttgtgacgcccgagcagctgggagaaatggtggtgttcctggcttcggacgctgcggcgcagatcaccggcacggcgctgccggtggatgggggatggacggcgcgctag

SEQ ID NO: 495463 - DNA, 312 bp, Stenotrophomonas maltophilia
atgaccctggtgatggtggatgggaaagaggatcgggagcactacctctttgatgcggcgtccttttacctacggcgtgggccggtgcccacggcggttccgctttcgcagatcacctcagtcactcgcacctccgacaagatctacgggcgctatgtgtggcaggtgtgcttcagcaaagcatcgggcagaaagtgcgtgacattcaccaacaacctgaccctgttcaaccgcgatttcctgctgttcctggaggcggtgcggaaagccaatccgttggcgaccgttgatcgggcaggcatccgcttctag

SEQ ID NO: 495464 - DNA, 735 bp, Stenotrophomonas maltophilia
atgcgaacgtccatcctcttcaccttctccgccctgtgccttggcctgctgtccggctgtgccagtggcccggaggagcacgcctcaagccgcgagatcacgagtgcattcgtggccgacgacggccagttgtacctgttgccgcgctatgacgagccgatgcgcttcaatgccgcgccgttccgcgagtaccgcgcgctgatggatagcccgctgcgcgaggcggtggcctgcgcgcagatgtacttccatgaagattggcgcgacccggccaacaaggccaaggtgcacggcagctatgcgctgctgctgcggccggagcaggtaacggcagagcaggccgcacagttcaggctggagcggattgaggtccccccgcgtgaggcaaaggccgtggaggagcggtcgcgctactacctgccgatggaccggacccgctacgcgctggcgtttgaccgcgcctgcaatctttcaaggaagggcggcagctattacagcgcgctgttcgagggcgacggcgagcgggtgcagttgccggatgctgcggcactggcggagaaggggaagctggcacagccgatcaatgcgcgggcgcagcggatcctgccggagagggaggacaagccgggtgtgggttcggcggcgggcaaggtgctcggcgcggcgttgatccctgtggcggttccggtgtttgtgttgagcctgccgttcctggggccggatcactggaagtga

SEQ ID NO: 495465 - DNA, 576 bp, Stenotrophomonas maltophilia
atgaacgctgatgatgtgaagtcaataccgatgatggacccgctcgcgaactggcacaccggtggatcgagtgcatcccgacgcaccatctacgtagatcttgatggcgtgatggccgacttcgacgcggcatttcccgctctgtttggcctggaccaccgcgtgcttgccgacgatgaaatgtgggggcacatcaacaaccacccgtcatttttccgcgaccttccgccgatgcacggtgcagtggagttcttccacagcatccaccacttggacccggtgattctcacggcctgcccgaaatcgaactatccgctcgccgcgatgcagaagcgacagtgggtccgcgaacacctgtcagcaacctgcctggtgttgccggtactcggcggcaggcacaagcctcttttcatgcaccagccgggcgatgttctgatcgacgatttcgaagcgaactgtgatgcctggacagcggccggaggcgtggcgatcaggcatgccggcgattgggccgcgacgcgtcgcgcgctttcccagattgaagatctgtcaggaatagcgctcgcgaagggctga

SEQ ID NO: 495466 - DNA, 840 bp, Stenotrophomonas maltophilia
atgaacctgatgacccggctggccgcagcgctggccctgaccctggccgcaaccggcgcgcatgccgccaacgtgctggtggtgctgtccgacgaaaaccacctggacctgaaggacggcaagatgctgtccaccggcttctatctcaacgagctgatgcagccggtcaagctgctgctggacgcgggccacaaggtgaccttcgccacgccgcaggggcgggcgcccacggtggatgcgtcctcggtgacgccggcgtacttcggcaacgatgccgcgcagctgacgctgcacaaggacctgctggagaaactggcgctgacctcgccgacggcctcgccggtggtcagcctggcacgcatcgagcagcagggctacgcgcgtttcgatgcggtctacattcccggtggccacgcaccgatgcaggacctgctgaagagcccggcgctgggccggctgctggccgacttccaccagcgcaacaagaccaccgcgctggtctgccacgggccgatcgcgctgctgtccacgctgccggatgctgcgggttttgtggcaaagctggaagcgggtgcgatgccggccatgccgaagtggatctacagcggctaccagatgacggtgatcagcaaccaggaagaagagcaggccaagccgctgctgggcggcggtgaaatgaagttctacccgcagaccgcgctgcagcaggcgggtgcgaagttcagcagcaatgccacgccgtggacggggcatgtggtggtggaccgcgagctgattaccgggcagaacccggcttcggcgctggaggtggggcagcggttggtggagcggttgaagtag

SEQ ID NO: 495467 - DNA, 918 bp, Stenotrophomonas maltophilia
atgagccgcaagttcgactacctgggcgatgtggaggtgttcctggcggtggtcgagcacggctcgttcacggccggtgcggtggcgctatccaccacgccctcggtgctcagccgcgcagtcacccgtctggaagcgcgactgggccggcaactgctgcagcggaccacccgccgcgtgggcctgaccgacgccgggcggctctacctggaacaggtgcgcaccgccttcggcctgctggacgacgccgagcgcgacgtactggcccaggacggtgcgctggccggacgcgtgcgcctgagcgtacccaccacctatggccactaccggctgccgcccgtgctggcgcgctttgcgcagcagtacccgcaggtgcaggtggaactgaacatcaccaaccgcaacgtggacctggtggccgaaggcttcgacctggccatccgcctgggccagctgccggacagcgggctggtggggcgaaagctggaggatgcgcctttggtgctggtggccgcgccggactacctgcaacgccgcggcacaccgcagacgctggacgatctgcagcagcacctgtgcctgccgttcgtgatgccgcgcaccgggcggctggcgccatggatcttccgcgacggtgggcgcgacgtggactggctgccgcgttcgtccatcgagacctccgacgatgtgctgggcgtggtgtcgctggccgaacagggcatcggcatctgccagagctatgcgttcatcgtgcgtgagcggttgcagcgcgggcagctggtggaagtgctgccgcagctgcgggggcggtcgcggccgttctcggtgatctatgcgccgcatcggcggcagtcggccgcggcgcgagcgatgattgagttgctggtggggaatgcggctgaggctggcgttggttga

SEQ ID NO: 495468 - DNA, 357 bp, Stenotrophomonas maltophilia
atgaacgaatccgacaccttctcctcgtacaccgttgttgagcccatcaacgacgacactcccctgcccgacctgaactccctcctcggcatcctcaagcgcatgcgcggctgcgagggggcggatgggcacccctggccagaaaccgacgtgtcacccggccgccgcgtgagcctggcgaggaccgagcgcgcgatggtcggggcgctgacagtgctggaactattgcacgcggccgaccgctgccgggtggcagcggagccagagcggcatttggatgagggggttgtggatgggttgtttctggcttgccgggggttggttgagtgggcttgtcacgaagtgaggccagagtaa

SEQ ID NO: 495469 - DNA, 2988 bp, Stenotrophomonas maltophilia
atgtttaacgaatcaaacaccgtcgaagcctacgtccgcgacttgctcgccggcccgatcacggctgtcgcaaccaacgccgttcaggaacctcaagccagctacggtccgagtgccaagggcatcggctggcgctacgccgccacggctgagctgccgcgccagattcaggaagtgctggttgaaccctggctgcgcaatgcgcttattcgcattaaccccgagattgccgctcaacccgaccgcgccgatgaagtgctctacaagctgcgcgccatcgtgctctcggtgcgttcagatggtttgattcgcgccaacgaagaaatgacggcgtggatgcgtggcgagcgctcgatgcccttcggcgataacaacgagcatgtgccggtgcgactgatcgacctggacgacctcgcgcagaaccagtacgtcgtcacccagcagtacacctaccgtgctggccctacggagcgccgggccgatctggtgttgttggtcaacgggttgccgctggtgctgatcgaggccaagacgccggtcaagaaatgcatcagctgggtggatggcgcggtgcaggtgcacgacgactacgagaagtttgtgccggagctgttcgtttgcaacgtgttttcggtggccaccgagggcaaggcctatcgctacggttccatcggtctgccggttaaggactggggcccgtggcatctggatggtgatggggatgatggtcagcaccatccgctgaaatcgctcaagctgtctgccgagagcatgctgcgcccgcatgtggtgctggacatcctcggcagtttcaccctgttcgccaccaacaagaaaaagcagcgcatcaagatcatctgccgctaccagcagtttgaagcggccaacaagatcgtcgagcgcgtgctgatgggttaccccaggaaagggctgatttggcacttccagggttcgggcaagtcgctgctgatggtgtttgccgcgcagaagctgcgcatgcatgctggcttgaaaaatcccacggtactgatcgtggtggaccgggtcgatctcgacagccagatcacgggcactttcactggggcggacattcccaatttggaaaaggcggacagccgcgagaagctgcaacagctgctcgcgcaggacgtgcgcaagatcatcatcaccacgatattcaagtttggtgaggctgcgggcagtctgaacgaccgcagcaacatcattgcgctggtggacgaagcccaccgcacccaagaaggtgggctgggccgcaagatgcgtgaggccctgcccaatgcgtttctgttcggcctgaccggcacaccgatcaaccgtgccgaccgcaacaccttctatgcctttggtgccgacgaggacgagaagggctacatgagccggtacggcttcgaggagtcgatccgcgatggcgccacgctgaagctgcacttcgagccccggctgattgacctgcacatcgacaaggcggcgctggatgccgcttacaaagacctgaccggcggcctgtcggatctggacaaggacaacctcgccaagaccgccgccaagatggccgtgctggtcaagacgcccgagcgcatccacaaggtgtgcgaggacatcgtcgagcatttccagaccaaggtggagcccaacggcttcaagggtcagatcgttaccttcgaccgagagtcctgcctgctgttcaaggccgagctggacaaactgctgccgcccgaggctacagacatcgtgatgtcggtgcgggcgtccgacaagaaggagcatccagagtacgcggcctacgaccgttcacgcgatgacgaagaacggctgctggaccgcttccgcgacccggccgatccgctaaagctgatcatcgtcacggccaaattgctgaccggcttcgatgcgccgatccttcaggccatgtatctggacaagccgctgcgcgaccacacgctgctgcaggccatctgccgggtgaatcgcacctactccgagcagaagacccacggactgatcgtggactacctcggcatcttcgatgatgtcgcagcagcgctggaattcgacgaccagagcgtgaagcaggtggtcagcaacatccaggaattgaaggacaagctgcccgaagccatgcagaaatgcctggccttcttcgctggctgtgatcgcagcttgcagggctatgagggcctgatcgccgcgcagcagtgcctgcccaacaacgaggtgcgagacaactttgctgctgaatacagcgtactcaacaagatctgggaggcgctgtcaccggacaccgttctgggttccttcgagaaggactacaagtggttgtcgcaggtgtaccaatcggtgcagccctcgagtggccacggcaagctgatctggcactcgctgggcgccaagaccatcgagctgatccaccagaacgtgcatgtggacgcggtgcgggatgacctcgacaccctggtgctggacgctgatctgctggaagcggtgctgtcgaacccagacccgaagaaggccagggagatcgagatcaagctcaagcgccggctgcgcggacatggcggcaaccccaagttcaagaagctgtccgaacggcttgatgcgctgaaggaccgtttcgaatccggacagatcaacagcgtggagtttctgaagcagttgctggagatcgccaaggagacgctgcaagcggagaaggatcttcagcccgaagagcacgaggatcgtggtaaggctgcgcttactgagctcttcaacgagatcaagacttctgagacgcccatcatcgtcgaacgcgttgtctcggatattgacgagatcgtgcggctcgttcgctttccgggctggcagagcacgcaagcaggcgagcgtgaggtcaagaaagtgctacgaaaggctctcttcaagtacaagttgcacgtggatgaagagctgttcgagaaagcgtatagctatatcaagcagtattactaa

SEQ ID NO: 495470 - DNA, 1161 bp, Stenotrophomonas maltophilia
atgaagaatgaatccctgaagcccggctggaaagtttggcggttcgatcagatagcgaccaatgtcaatgtccgtatcgacaacccgtccgagtccgggatggagcactacgttggcctcgaacatctggatgttgactcactgaagattcgtcgctggggtacaccgggtgacgtggaagcaaccaagctgatgttcaagaagggcgatattattttcggtcgccgtcgcgcctaccagcgcaagcttggcgttgccgagtttgatggtatctgctcggcccatgcaatggtgctgcgggccaagcctgaagtcgcgctgcccgaattcctgccgttcttcatgcagagtgatctgttcatgaaccgggcggtggaaatctcggtgggttcgctgtctcccaccatcaactggaagacgttggcgacccaggagtttgctttgcctcctagggatgagcaggagcgtgtcgtttctgcgatcaagtcggcgcttgaatgcgaactggcttatgaggaagcacgcaacgcggccttagccttgttccgctcagcctccgatgaacttctcaatcctgcaggtacatggaaacagactatgctgcaggaggtggcaaatgtcgagcgcggaaagttcagtcatcgacctcgaaatctcccggttttttttggaggtccataccccttcgtgcagacgggtgacatcgttgcatcgacaggtgatttacgtggtgcatcacagatgcttagcgatgaagggctgaaatatagcaagtcgtttcctaagggctcgatcctcataaccattgcggccaacataggctatacggcgataacgacgcaggagacgtggtgcccggacagtgttgtggggatcgttccaagagatggcacaaatgttcgcttccttgagtacgtgctccggacaaagcaaaagcaccttgaaaatcatgtggccacccaaactgcgcagaagaacatcaatcttcaggatctgagaccacttcgattggacatgcccgatcctgtgatccagcaggagatcgcggatcagctttgcacattagaaaaggcggctgccgatttggaccgccgctttggagcggcgcgcgacttccgagtgaggctcgctaaccagagaatcggagttgctgatgtttaa

SEQ ID NO: 495471 - DNA, 1677 bp, Stenotrophomonas maltophilia
gtgattgccgttgacgcctggcagcctgcagatgggctgacgctcgaaccgaatgcgctgcttgccgcgaaagagaaggagcgttgccttgcactcacggccgggcccggcgcgggcaagaccgaaatgctggcgcagcgcgcagacttcctcttgcgcacaggcacctgcagatatcccaaacgaattctggcgatttcgttcaaggttgatgccagcaagaatttgaaggaccgcgtacagcgtcgttgtggcgctgatctcgcttcacgctttgacagctacaccttccacgcctttgccaagcgcatcattgatcgttttcgacccgtactgactggcaaggacgcccttgaggcgggctacacgcttggcagcccgaaggtgacgcataaacagattgatttcggcgaattgatccctcttgccatccagattcttcagaattcaaagcttgcccgcaacgctattcgccagacctacagtgacgttttcctagatgagtttcaggactgcacagacaaacaatacgagttcgtgaagcttgccttccaaggtaccagcatccggctgacggcagtcggcgataccaagcagaagatcatgggctgggccggtgcactcgatggcatcttccagacctttgcagccgattttgcggcgactccgctcaacttgtaccgtaactttcgctcgaagccgcgactgctgcgcttgcagaacgaaatcatccgcgtgcttgaccccggatcggtcatgccggaagagcaaattgccggtgatggaggacaagttcttgcccggggcttcgaagacagccgacaagaagctgactatctggctgagcagatcgccgcgtgggtcgagactgaacagacacctcattcggaaatcgctgtactgatctccaagcaaccggatctctacgccaaccatctgattgcggcgctggaggccaaaggcatcccctaccgcaacgaacaacagctgcaagacatcaccacggagcctgcagcgcgcttagtggtcgattacttgtcatgcatctacggcaagcgtgagcccaagtcatgggtgcagctgatgaacttgctggtgcctttcgccgatgacgaaatccaggtgagtacccgccgggactttgatcgcctgatcaaggcgcagcgcaagagcgcatcacttctggagttgattgatgagccctactcaggttggtgggagtcggcgcgagcatttttgaacaaaatcccccgcgaaaccttggtagcgctctcgcctgactacgaatcgccagatcggctcaaagaggtagtgcgcgacaccaaggcacgtatcgaagagctgctcaaaactgagcccgagttgcctaaggcgcttgaacgctttgcggatgacaaaacggtgcgcattctgaccatccacaaaagcaagggcctggagttcgactcggtcatcattctaggtgttgaaaatcagactttttggggcaaacccgacgaagagcgctgcggtttcttcgtcggtgtttcgcgtgcgaaacggcggctggttgtcaccatgagcaagcgccgggaagccccgccctctaatccaaatcgctggcgggaaatgcgaactccacacacggagttcttcggttacgtcatgccgtttgtgagcaaagaaaatgaagaatga

SEQ ID NO: 495472 - DNA, 1926 bp, Stenotrophomonas maltophilia
atgaaactccaaacaattcggctgtcgaacttccagtcattcggtgaagatcccactgaaatcacgctcgaagacatcacctacctgattggcccgaatggctcaggtaaaacggctgcactgcaggccttatgccgactcttcgccttcgacccgtcgctgcgcaggattctgcgttcagatttccatgtgcccagcagtgaagaagaagctccagtcgaacgacacctctggatcgaggccgacttcctttttcctgagctggcagaagatgcagacaacacgaccgttgccccaaattttgcgcacatgcgactggacgagcccgacggtattccgcgcgttcgttaccgtctcagtgcaaccctaggagcagatggcgatatcgaagaatccatggcgtatgtactggacctgaatgctgacggtgagccactcagtactgcgcacgtcccgcgcgccgagcgtaaccatatccacgttcactatcttccggcacagcgtgatcctgccagccacatcgcatacggtgccaatgcccttctaggaagaatgcttcgcgcagtgaaatgggatgcggagcgcgaggcgatcagaacgctgaccgatcagatcagtgacagcttggctgcaaatccgtcggtcaatacgctgagtgagagtctgaaaacaacgtgggccacgctgcacaaaggcaagttctttgccgatccgaagatcacctttgcggcctctgagatcgaagccttgcttcgccacatgtcagtctcattttcgcctgggcacgatgagagtctggtcgattattccaggctgagcgatggtcagaagtcgatgctttacctgtctctcgcactatcgtctcaagccattgggcgcgccgtgctcgccgggcaagacacttcgtttgacccagataaattacgccctcccatcttcacgcttgtagctgttgaagagcccgaaaacagcctctccccgtactacctgggacggatcgtcagtgccttgaacaacatggttcagaacccggacgcccaagcactcatcgctacgcatgcgccaacaatgctgcggcgagtcgcgccagagtacatccgctatctgcggctgaacgaagtacggcaatcacgcgtcaatgaaattcagttgcccgaaagcacggacgaagcgcacaaattcgtgcgggaagccgtccaagcatttccggaaatctatttctcgcggctggtcgttttgggcgaaggcgatagcgaagagatcgtgctgccacgcatgttgcaggtcaaaggcgctccagtagatgaatccgctgtcacgattgctccgctggggggcaggcacgtcaatcacttctggcgcctgctctcggcattgcagattccgtatctgacgctccttgatctggatgtagctcgctacgctgcgggctggggaaggatcaagtacgtcaacgatcagtttgcaaaatttgctcccgcagaacgtctcccatcctattggaaaatatctcaatgggatgacgatgaagtgccggtacggactcatcacttctttgaagacgggacaaagaatgttttcgaaagactcgaaaacagcaacgtatttttctcgtaccccatggatctcgacttcgccatgctgctcgcctttcccgaagcctacggcgtcgaagaagacgtgccggatgactcaacgatcaaggccgtgcttgggaaaagccaccacgacgctagccagtacagccctgaggaacagaaactgttcaacacctaccaccagcgcttcaagctgggtagcaaacccgctgcccacattgatgcactggcccaactgacggatgcagaattgctggcaaacatgcccgcttcgctgagcaggctggctgatgccgttatcgccaaactggcggagctgcccgagtga

SEQ ID NO: 495473 - DNA, 1524 bp, Stenotrophomonas maltophilia
atgagtcacccaagcaaacgcatcagccaacaagatctcgaaagctacctgtggggcgcagccgtgctgcttcgcggcctcatcgacgcgggtgactacaagcagttcatcttcccgttgctgttctacaagcgcgtctctgacgtttgggacgaggaataccaggcggcgctggccaactctaagggcgacctctcctacgcccagttcgccgagaaccaccgcttccagatcccccaaggtgctcgctggaccgatgtgcgtcagacgccgaagagtgtgggcgcagccatcaagaaagccatgcgcgccatcgagacggccaatccggatctgctcgacggcatcttcggcgatgccccctggaccaaccgcgaacgtctgcccgacgaaacgctgaaaaacctgatcgagcatttctcgacccagacactctcggtggccaacgtccccgaggacgagttgggcaacgcctacgagtatctgatcaagaagttcgcggacgactcaggccacacggcggccgagttctataccaaccgcaccgtcgtccacttgatgacgcagcttctggcgccgcagaccggcgagtcgatctacgaccccacctgcggtaccggcggcatgctgatctcggcgctggacgaagtgaagcgctcgggtggcgaataccgcacgctcaagctttacgggcaagagcgcaatctcatcacctcatccatcgcccgcatgaacctgttcctgcacggcgtggaggacttcgaaatcatccggggcgacaccctggccgaacccaagcacatcgaaggcgaccgcttgcgtcagttcgatgtgatcctggccaacccgccgtactccatcaagcagtggaatcgcgaggcctggagcagtgacaagtggggccgcaactcgcttggcacgccgccgcaaggtcgcgccgattacgccttccagcagcacatcctgaccagcctcaccgccaaggggcgtagtgctgtgctctggccgcacggcgtgctgttccgtaacgaagaacaggccatgcgcgccaagatggtcgagcaagactgggtggaggcggtcatcggcctgggtcccaacctgttctacaactccccgatggagtcgtgcatcgtcatctgcaaccgcaagaaggccgccgctcgcaagggcaaggtgatcttcatcgacgcggtgagcgaggtcagccgggagcgggcgcagagctttctgaagcccgagcatcaacagcgcatcctgaccgcctacaagacctttgaagatgcgcctggattcgccaaggtcgccaccctgaccgaaatcggcgccaatgcgggcaatctctcgatcccactgtacgtgaagcgcgctgccgccatcgttgccactgacagcaatggtgacgcggtttcgctgcgttcagcctgggatcaatggcaaaccgatggtcgcatcttctggcaacagatggacgcgctggtggaaacgctggatagcctttccaaggctgaggacacccaatga

SEQ ID NO: 495474 - DNA, 1497 bp, Stenotrophomonas maltophilia
gtgagcgaacagaaactcaccctcagtcagctcgagggccacctctgggagtccgccaacatcctgcgcggcccggtggatgcggctgacttcaagacctacatcttcccgctgctgttcttcaagcgcatctgtgatgtctgggatgaggagtaccaagacatcgtggacgagactggcgacgagcaactggcctggttcccggagtcgcatcgcttccagatcccggaagacagccactggaacgacattcgcactaaggccagcaatgttgggacggcccttcagcgtgcgatgcgcgaaattgagaaagccaaccccgaaaccctgtacggcgtgttcggtgatgcccagtggtcaaacaaggagcggctgtccgatgccttgctcaaggacttgatcgagcatttctccaagctgccgttcggcaacactaacgtcagttcggacctgctaggcgatgcgtacgaatatttgatcaagaaattcgccgacgccaccaacaagaaggctggcgagttctatacaccacgcagcgtcgtgcggctgatgatcgacatgctcgatcccaaggaagccgagaccatctacgacccggcttgtggtaccggggggatgctgctggctgccgtgcagcacgtgaaggagcagcatggtgacgtcaagcggctatggggcaagctctacggtcaggaaaagaacctgaccacctcatctatcgcccggatgaacctgttcctccacggcatcgaggacttccaggtggtgcgcggcgacacgctgcgcaatccagctttcttcgagggcgaccgactggccaccttcgactgcgtgattgccaatccgcctttctcgctggagaagtggggagaggatctctgggtaaacgatccctacgggcgcaacttcgctggcctgccgccggcatccagcggtgactttgcatgggtgcagcacatggtcaagtccatggcagtgggcagcgggcgcatggctgtggtgttgccgcagggcgcgctgttccgcaagggcgcagaaggaaacattcgccaggcactgctggagatggatctggtcgaggccgtgatcgggttggcgcccaaccttttctacggcaccgttctggccgcgtgcatcctggtcttgcgcaagcgaaagccggccaaacacaggaagaaggtgttgatcgccgatgcgtcgcgcctgttccgtcgtgggcgggcgcagaactatctgaaacccgagcacgccaccgagatcctcggctggtatcgcggctttgctgacgtgcaggacgcagtccgcgtggtcagtgtcaacgagatcaaggccgaggactggacgctgaacatttcgcgttatgtcctgccgccattgcaagaagacatcccacccctgcccgatgctatcgcgacattcaaggacgcgctcacccgctgccgtaaagccgaagagcggctcgcgcaggtcatgactgaagggggatggctgcaatga

SEQ ID NO: 495475 - DNA, 1566 bp, Stenotrophomonas maltophilia
atgaccaacatccataacgacaagatcctcatcctcgatttcggcgcgcagtacacgcagctgatcgcccgccgcatccgcgagctgggcgtctactgcgaaatctgggcgtgggaccacaacccggccgagatcgcggcgttcggcgccaagggcatcatcctgtccggtggcccggaatcgaccacgctgccgggtgccccggccgcgccgcaggaagtgttcgacagcggcctgccgatcttcggcatctgctacggcatgcagaccctggccgcgcagctgggcggtgccaccgaagcggctgaccagcgcgagttcggccacgccgaagtgaacgtgatcaaccccgatgcactgttcaagggcctgagcgaccacggcggcgagccgaagctgaatgtctggatgagccacggcgaccacgtctccgttgcgccgccgggcttcaccatcaccgccaccaccgaccgcattccagtggcggccatggccaacgaagaaaagcgctggtacggcgtgcagttccacccggaagtgacccacaccctgcagggccaggcgctgctgcgccgcttcgtggtggacgtgtgcggctgccagaccctgtggaccgccgccaacatcatcgacgaccagatcgcgcgcgtgcgcgaacaggtgggcgacgacgaagtgatcctgggcctgtccggcggcgtcgattcgtccgtggtggctgcgctgctgcacaaggccatcggcgagaagctgacctgcgtgttcgtggataccggcctgctgcgctggcaggaaggcgaccaggtgatggcgatgttcgccgagcacatgggcgtgaaggtcgtgcgcgtgaatgccgccgaccgttacttcgcagcgctggaaggcgtgagcgacccggaagccaagcgcaagatcatcggcaacctgttcgttgagatcttcgacgaagagtcgaacaagctgaagaacgccaagtggctggcgcagggcaccatctacccggacgtgatcgagtcggccggcagcaagaccggcaaggcgcatgtgatcaagagccaccacaacgtgggcggcctgccggagcacatgaagctggggctggtggagccgctgcgcgagctgttcaaggacgaagtgcgccgcctgggcgtggagctgggcctgccgcgcacgatggtctaccgccatccgttcccgggcccgggcctgggcgtgcgcattctgggtgaagtgaagcgcgaatacgccgagctgctggccaaggccgatgccatcttcattgatgagctgcgcaaggcggatctgtacgacaagaccagccaggcgtttgccgtgttcctgccggtgaagtcggtgggcgtggtgggcgacgcgcgggcttatgagtgggtgatcgcgctgcgggccgtggagacgattgacttcatgacggcgcattgggcgcatctgccgtacgagttcctggggacggtgagcaaccggatcatcaatgagctgcggggggtgtcgcgggttgtttatgacatctcggggaagccgccggcgactattgagtgggaatga

SEQ ID NO: 495476 - DNA, 1458 bp, Stenotrophomonas maltophilia
atgctgcgcatccaggctgaagcactcacttacgacgacgtctcgctcgtccccgcccactcgaccatcctgcccaaggacgtcaacctcgaaacgcggttgacccgagacctgaagctgaagcttccgatcctgtccgccgcgatggacaccgtcaccgaagcccgcctggccatcgccatggcccagctcggcggcatgggcatcatccacaagaatctcagcctggaacagcaggccgcggaagtggccaaggtcaagaagttcgaggccggtgtcatccgcgacccgatcactgtcggcccggaaaccaccatccgcgacgtgctggccctgacccaggcgcacaacatctccggcgtgccggtggtgggcagcgacggcctgctggccggcatcgtgacccaccgcgacatgcgcttcgagactgagctggacgatccggtccgccacatcatgaccaagaaggatcgcctgatcacggtcaaggaaggcgccgcgtctgatgaagtgctgcagctgctgcaccgcaaccgcatcgaaaaggtgctggtggtcaatgactcgttcgaactgcgtggcctgatcaccgtcaaggacatccagaagaacaccgacttcccgaacgctgccaaggatctgtcgacccgcctactggtcggcgctgccgtcggcgtgggtggcgataccgatcgccgcgtggaagcgctggtcgccgccggcgtggacgtgatcgtggtcgataccgcgcacggccactcgcagggcgtgctggaccgcgtcagctgggtcaagaagaacttcccgaacgtgcaggtcatcggtggcaacatctgtaccggcgaagccgcactggcgctgctggacagcggcgcggacgcagtgaaggtcggcatcggcccgggctcgatctgcaccacccgcgtcgtcgccggcgtcggcgtgccgcaggtcaccgccattgatctggtggccgaagcgctgcaggaccgcatcccgctgatcgccgacggtggcatccgctactcgggcgacatcggcaaggcgctggccgccggtgcctcgaccatcatggtcggtggcctgctggccggtaccgaggaatcgccgggcgagaccgagctgtaccagggccgttcgtacaagagctaccgcggcatggggtcgctggctgccatggagaaggggtcgaaggaccgctacttccaggacgccgccaccgccgacaagctggtgccggaaggcatcgaaggccgcgtgccgtaccgcggcccggtgggcggcatcatccaccagctgatgggcggcctgcgcgccaccatgggctacgtgggctgcgccaccatcgaagacatgcgcagcaagcccaagttcgtgaagatcagcggcgccggccagcgtgagagccacgtccacgacgtgacgatcaccaaagagccgccgaactaccgcgcctga

SEQ ID NO: 495477 - DNA, 879 bp, Stenotrophomonas maltophilia
atgaccgattccgccccccagcatcctgcccgcatccttgacggccgccgcatcgccgaggacctgctcgacagcctgaaggtgcgcgtcgacgcccgcgtggccgccggtggcagccgcccgggcctggccgtggtgctggtcggtggcgacccggcctcgaccgtgtacgtgcgcaacaagcgccgtgccgccgagaaggtcggcatcgaggcacacgactacgatctgccggccggtaccaccgaggccgagctgctcgacctgatcgatcagctcaacgccgacccgaagatcaacggcatcctgatccagctgccgttgccgggcatccccgacgcgcgccggctgatccagcgcatcgacccgcgcaaggacgtggacggcttccacccggaaaacgtcggccacctggccctgcgcgagttcggcctgcgcccgtgcaccccgcgcggcatcaccacgctgctgggccacaccgaccagccggtacgcggccgcaacgccaccatcgtgggcgtgagcaaccacgtcggccgcccgatgggcctggaactgctgattgccggctgcaccgtgaccagctgccacaagttcacccccaaggacgtactggaacaggccgtgcgcaacgccgacatcctggtggtggcggtgggtcgcccgggcatcgtgccgggcgaatgggtgaagccgggcgcggtggtgatcgacgtgggtatcaaccggttggacgacggccgcctggtgggtgacgtcgggtttgaagcggccgcccagcgggcgagctggatcaccccggtgccgggtggcgtgggcccgatgaccgtggctacgttgatgcagaacaccctggaagcggcggaagcgctgagctga

SEQ ID NO: 495478 - DNA, 1833 bp, Stenotrophomonas maltophilia
atggcggtagaagcagcgaccagcgagctggtcaaggtcgtcgccctgttgggcgcggcggtggtgatggtgcctttgttccgtcgggccggcctgggctcggtgctgggctacttcgccgccggcctggcgatcgggccgttcgggctgggctggttctccgacccgcaggccatcctgcataccgccgagcttggcgtggtgatgttcctgttcgtgatcggcctggagatgcggccctcgcacctgtggagcctgcgcaaggaaatcttcgggctgggcacgctgcagatcgtcacctgtgcgctggtgctgaccagcatcgccaagctgttcggcctgccgtggcaggtggccttcatcggtgccaccggctttgtgctcacatccaccgcagtggtgatgcagctgctggccgagcgcggcgacatcgcactgccgtcggggcagaagatcgtttcgatcctgctgttcgaagacctgctgatcgtgccgttgctggcgctggtggcctggatgggcccgagcgcgggcaacgccgatggcgagggctcgcgctggctgtcggtggcgatcggcgtcggtgccatcgtcggcctggtgctggtcggccgcttcctgctcaatccgttgttccgcgtgctggccgaatcgaaggcgcgcgaggtgatgaccgccgccgcgctgctggtggtgctgggtgcagcgctgctgatgcagctgtccggcctgtcgatggcgatgggcgcgttcctggccggcgtgctgctgagcgagtcgaccttccgtcaccagatcgaagcggacatcgagccgttccgcggcatcctgctgggcctgttcttcctcagcgtcggcatggcgctggacctgggcgtggtggctggcaactggcagctgatcctcgggctggtgctggcgttgatggtcgccaaggcgctgtgcatctacgtggtcgcgcgcatcatgggcagtgaccacgcgcaggcgctggaccggggcgtgctgatggcgcagggcggcgagttcgccttcgtgctgttctctgccgcggcatcggccggtgtgatcaacctggagatcaatgccaacttcaccgccgtggtggtgttgtcgatggcgctgaccccgctggtggtgctggtctacaagcgcatcgcgccgaagccgacggtgaacatggacggcgtggacgaggccgagggcctgtccggtagtgtgctgctgatcggcttcggccgcttcggccaggtcgccagccagtcgctgctggcgcgcgacgtggacgtgaccatcatcgacaacgacgtggagatgatccagagcgccgcgcgtttcggtttcaagatctactacggcgacggtacgcgactggacgtgctgcatgcctcgggcgcggccaccgcgcgtgcgattgcggtgtgcgtggacaaggccgaggccgccgaccgcatcgtcgaactggtgtcgcacgagttcccgcaggccaagctgatggtgcgctcgttcgaccgcgagcattcgctgcggctgatccatgcgggtgtcgatttccagatccgcgagacgtttgagtcggcggtgctgttcggccaggccgcgctggtggagctgggcgcggacgaggatgacgcggtggagattgccgagcagatccgtcgccgcgatgccgagcgtttcgagctggagattgccggtggtggcttgaatgccggcgccaagatggtgttcggcaactccggccagggcgtgccgacgccgacgccgttcaccgcgccgaagcgggcgagcaagacgttgaacccgcaggacgtgccggaagaggaagaataa

SEQ ID NO: 495479 - DNA, 1182 bp, Stenotrophomonas maltophilia
atgctggtcaaggcggcctgccgccacgtgcgcgataatgcggccatgagcatccaagagatttcccccgcgcaggcacgcgagcgcctggcccatggcgcggtgctgatcgatgtgcgcgaggcgcacgaacgggccggcggcatggccgagggcgcgcgcggcgtggccaagggcgagctgcaggccgacccggccgcgcatctgccgcggcacgaccaggaaatcctgctgatctgccagagtggcaagcgctcggccgatgccgcgcagttcctgctggaggccggctacacccacgtggcttccgtgacgggcggcaccgtggcctggcgcgagcagtcgctgccgctggtgcagccgctggccagtgctgccgaccgtgacttctacgatcgctattcgcgccacctgctgctgccacaggtgggcgaggccggccagcgccggctgcagcagtcgcgcgtgctggtgctgggcgcgggtgggctgggcgcaccggctgggttctacctggccgccgccggggtagggcacctgcgttttgccgaccacgaccgcgtggagcgcagcaaccttcaccggcagatcgtgcataccgaagccagcgtcggccagttcaaggtcgattcggcgcgcgagcggctgctggcgttgaacccgttgatcgacgtcgaggcggtgcctgagtgggtcacttccgagaacgtggatgcgctgctggagggcgtggacgtggtgctggatgggtcggacaacttcccgctgcgctacctgctcaacgacgcctgcatcaagcacaccacgccgctggtgtatgccgccatcgagcgctttgacggccaggtaagcgtgtttgacgctggccgccagcgcggcgtggcgccgtgctaccgctgcctgttcccggagccaccgccgccggagttcgcgccgaactgttccgaggccggtgtgctgggcgtgctgcccggcctggcgggcgtgctgcaggccaccgaggtgctgaagctgctgctgggtatcggtgagccgctggtcggccgcctgctgcgcttcgacgcgctgggcatgcgatttcgtgagaccggcatccggccggacccgcagtgcccggtgtgcgcgccgggcgtgccgttcccgggatatatcgattacgccgcgttctgccggggcgggtga

SEQ ID NO: 495480 - DNA, 1398 bp, Stenotrophomonas maltophilia
atgctgcctttggtcgccctggttggacggccgaatgtcggcaagtcgactattttcaatgcgcttacgcgcacccgtgacgcgctggtccatgaccagccgggcgtcacccgcgaccgcaactacggtgtctgccgtctggacgaggacaatcatttccttgtcgtcgacaccggcggtatcgcggaagaggaagaggggctggcaggggctaccacccgccaggcccgcgccgctgcggcggaagccgacctgatcctgttcgtggtcgacgcccgtgagggcacctcggcgatggacgatgagatcctggcctggctgcgcaagctgtcgcgcccgacgctgctgctgatcaacaagatcgacggcaccgacgaggacaccgtgcgttcggagttcgcccgttacggcttcggcgagatgctgaccgtctcggccgcgcatcgccagggcctggacgacctgctggacgaagtgatccagcgcctgccggaagaaggcagcggcgaagagctggacaacgatccgaaccgcatccgcatcgccttcgtcggccgcccgaacgtgggcaaatcgaccctggtcaatcgcatcctcggcgaggagcgcatgatcgcctccgacgtgccgggcaccacccgcgactcgatcgcggtggacctggagcgtgatggccgcgagtaccgcctgatcgataccgccggcctgcgccgtcggtcgcgcgtggacgaggtcgtcgagaagttctcggtggtcaagaccatgcagtcgatcgagcagtgccaggtggccgttctgatgctcgacgccaccgaaggcgtgaccgaccaggacgccaccgtgctcggtgccgtgctcgatgccggccgcgcgctggtgatcgccatcaacaagtgggatggcctgaccgagtaccagcgcgagcaggccgaaaccatgctgtcgctgaagctgggcttcgtgccgtgggccgagtccgtgcgcatctcggccaagcatggttccggcctgcgcgagctgttccgtgcggtgcaccgcgcgcacgaatcggcgaacaagaccttcaccaccagcgaagtgaacaaggcgctggaagtggcttacgagaccaacccgccgccgaccatccgcggccatgtctccaagctgcgctacgtgcacccggccggttccaacccgccgaccttcatcgtgcacggcacgcgcctgaaggagctgcaggaatcgtacaagcgctacctggagaacttcttccgcaagcgcttcaagctgatcggcacgccggtgagcttcatcttccgcgagggcaccaacccgtatgagggcaagaaaaacgtcctcaccgagcggcaggtcaaggccaagcggcgcttgatgaagcacgtcaagggcaagtga

SEQ ID NO: 495481 - DNA, 1209 bp, Stenotrophomonas maltophilia
atgagtcagaaggtcatgatcacccgcgtcgccaccgtgctcctgatgggcatggccctgaccggctgcagcaccatgaagggctggttcgccggcaaggacgcggccgcgaagaaggcacaggaaccggctgagctggtcaagttcgagccgaccctgaaggtcagcaaggcctggtcggtcaacctcggcaagggcgagcgccgcatcggcgtgcgccaaggcccggcggtggccaacggccacgtgttcgctgcggcgatcaccggtggcgtgcacgccatcgacctgcagaccggcaagaaggtctggacctgggagccgaagaaggagaagaagaaggcgaagctgcgcctgtccggcggcccgggtgtcggtgagaacctggtcgtgatcggcacgctggatggccaggtcatcgcgctggatatcaacgatggcagcgagaagtggcgcgcccgtgttccgggtgaagtcatcgccgcgccggccgttgcccagggcatggtctacgtgcgcagcaacgacggccgcgttaccggcttcgatgccggcaacggcacccagaagtggttcaacccgagcgagctgccggcgctgaccgtgcgtggcaacgcgccggtggtgaccggcccgggcgtgctgttcatcggcaaggacgagggcgcggttgcggccctggcccagcaggatggccgcacgctgtgggaacagaacctcggcaacggcgaaggccgcaccgagctggagcgcatggccgacgtcgacggcgctccggtgctggagggcaacaccctctacgtgagcagcttcaagaaccagaccatggccatcgagggcccgaccggtcgcccgctgtgggcgcgcgaccatggcggtgccggtggcgtggcggtgtcgtcgggcaacgtgttcgtcaccgacaacaagggcggcgtgttcggcctggacaaggccagcggcgcggccatgtggtcgcagaccgcgctggcccgtcgttcgctgaccggcccggcgctgcacggcgactacgtggtggtcggcgactacaagggatacgtgcactggttgcaggcgtccgatggtgcgatggcggcacgggcaaaaagtggcggcgacgccctgctggcccagccggtcgtcgcagacggggtgctgctggtgcagaacgttgatggcaagctgaccgccttccggttggcaaattaa

SEQ ID NO: 495482 - DNA, 639 bp, Stenotrophomonas maltophilia
atggcgatcgacgatctgctcgacgagcacgaacaaagtgaacgcgtccgcagctggctgcggaagaatggcgccagcatcctcggtggcgtagtcatcgccatcggtgccattgctggctggcagtggtaccagaaggatcagggcggcaagctggcctcggccaatgtcgagtaccagaaggccctgcagggcctgcagcagaacaagcttgacgacgccgccaaggcggtcaaggcgctcgaagccggcccgtccagcatctacggcgacctcgcggcgctgcagctggccaaggcccaggtcgacgccggcaagaatgaagaggcactggcaaccctgcgcaatgtgaaggtcgaaggtgacctgcagcgcgtggtcgaccagcgtgtggcccgcctgctggtggccaccggcaagagcgacgaggccatcaagctgctgggcagcgcgaccgacagcagcagcctggaaatccatggcgatgcgttgatggcgcagggcaagcgcgatgacgcccgtgcacagtacgagaaggcgctgaagacgctggacgtggcagcgccgcagcggcgcctgctggaaaccaaggttatggacgccggcggcaccgtcgccgcccctgcggagtcggtttga

SEQ ID NO: 495483 - DNA, 873 bp, Stenotrophomonas maltophilia
gtgattgatgaccagactgtgagcgctctcgagactgcggccggctgcggcacccgcctgcgccaggcccgcgaagcggccggactgaccctcgaagatgtcggctcgcgcctgcgcatgccggtccaggtggtcaagtcgctggaagaggaacaatggcagaagctgggggcgccggtgttcgtgcgtggccagctgcgcagctatgcgcgcctgctcgacgtggatgtcggccagctgctggaacaggcccaggtcggcccggtggttccgcccaccctggtcagccatacccataccccgcgtgcgcgccgcatcgccgagaacctcggccggcgcgtgctgtatgtcggcatcaccgccgtgctggcggtgccggtgtggttcgccacccgtggccacttcgacggcagcgcgaccccgtcgccgagcaccgcctcgctggatgtgatcccggccgctgtgccggtcaccccgtccacggccggtgccgaggctgttgcgccggccgaagcggccactgccccggccagcaagcccgcggccaccccgtacgtggcctcgctggccccggtgccgcgcccggcgccggctccggcggctgccggcaacgcgctggaaatgcagttcagcggcgacagctgggtcgacatcggcggcccggacggcagcaccgtcgagaaggcgctgatcagatccggcgagacccgcagcttcacgccgggccaggtgacccgggtgaccctgggcaacgcctcggcggtccaggttcagcagaacggcgctatcgtcgatctgaccccctaccagcgagccaacgtggcacgctttcaggtatcctctgaaggctccgttgtcccggtttcgcactga

SEQ ID NO: 495484 - DNA, 786 bp, Stenotrophomonas maltophilia
atgccgcggcctgaccgcctctggctggcgcttctcgcaggcgtgctggccgttgcggtcggcggctgcaaatcccatcccaaggccaagctcggtccgagccaggcgccggtctattcggtaggtgacccggaaagcgtgcggcgcgaagtgcgctggcgcgacctgttgacgctggcgacccgcgacatgcaggtcggcaatctcgatgccgccgagcgcaaggtgcgcgaagcactgaagctggcgcccgaggcgcccgatgcgctggtgctccaggccggcatcgatgaccgtcgtggccgcacccgccaggccggcgagaacttccgcaaggccgccgaactggcgccgcagcgcggcgacgtgctcaacaactacggtgcctggctgtgccagcagggccagccggccgaatcgctggtctggttcgatcgcgcgttgcaggcgccgggctatgccaccccgggcgaagcccaggccaatgccggcagctgcgcactggatgcgggccagcttgaacgtgccgaacgcgacctgcgtgcggcgctcgtggcggccccggccaacccggtcgcgctggagtcgatggcccagctgagctaccgccagggccgctacatggaggcccgggccttcgccgaacgtaggattgcggctgcacccgcaacgcgttccgtgttacaacttgcgtctcaaatcgaagtgaagctgggcgatcgggcggcatctgatcgttatctgcagcggattcgacaggaatttccgcaggacgcgggctcctaa

SEQ ID NO: 495485 - DNA, 1206 bp, Stenotrophomonas maltophilia
gtgaacgaggtcgtacagtcccccgccatccagccgctgccgaagtcggcacccacggctggcaagcagaacctgctcgacctcgatcgcgcgggcttggagaagtttttcgtcgaggttctcggcgaaaagaagttccgtgcccaccaggtgatgaagtggatccaccatcgctacgtcaccgatttcgatgaaatgaccgacctcggcaaggtcctgcgcgccaagctgcaggcccatgccgaggtgctggttccgaacatcgtgttcgacaagccctccgccgacggcacccacaagtggctgctggcgatgggcgtggatggcaagaacgccatcgagaccgtgtacatcccggacaagacccgcggcacgctgtgcgtgtcctcgcaggtcggttgcggcctgaactgcacgttctgctccaccgccacccagggcttcaaccgcaacctgaccaccgccgagatcatcggccaggtgtgggttgctgcacgtcacctgggcaacgtgccgcaccagatgcgccgcctcaccaacgtggtgatgatgggcatgggcgagccgctgatgaatttcgacaacgtcgtgcgcgccatgagcgtgatgcgcgacgatctgggctacggcctggccaacaagcgcgtgaccctgtcgacctccggcctggtgccgcagatcgaccgcttgtccgccgagagcgacgtgtcgctggcggtgtcgctgcatgcgccgaacgatgcgctgcgcgagaccctggtgccgctcaacaagaagtacccgatcgccgagctgatggcctcgtgcgcacgctacctgcgcgccaacaagcgccgcgaatcggtcaccttcgaatacaccctgatgaagggcatcaacgacaagcccgagcatgcccgcgaattggcccgcctgatgcgccagttcgacaacgcggtgcaggccaaggattcgggcaaggtcaacctgattcccttcaatccgttcccgggcacccgctacgagcgttcggaagaagcgcacatccgcgccttccagaagatcctgctcgacagcaacgtgctgaccatggtccgccgcacccgtggcgacgacatcgacgccgcctgtggccagctcaagggccaggtgatggaccgcacccgccgccaggcggagttcaacaagacgctgcaggcggggaaggggagcgatgccgcggcctga

SEQ ID NO: 495486 - DNA, 426 bp, Stenotrophomonas maltophilia
atggcgctggagcgcaccctttcgatcatcaagccggacgccgttgccaagaacgtcatcggcgaaatctacgcccgcttcgagaaggccggcctgaaggtcgtggccgccaagtacaagcagctgtcgcgccgtgaagccgaaggcttctacgccgtgcaccgcgagcgtccgttcttcaacgcgctggtcgaattcatgatctccggcccggtgatgatccaggccctggaaggcgagaacgccgtcctggcccaccgcgacctgctgggcgccaccaacccgaaggaagccgcgccgggcaccatccgcgccgacttcgccgaatccatcgatgccaacgccgcccacggctcggactcggtcgagaatgccgcgattgaaatcgcctacttcttcgccgccaccgaagtcgtttcgcgctga

SEQ ID NO: 495487 - DNA, 654 bp, Stenotrophomonas maltophilia
atggccaaacccgcccacttctcgaccaaggaccgcattctcggcgcggccgaggagctgttcgcacagcacggcttcgccggcacttcgctgcgccaggtgaccagccaggccgacgtcaacatcgcagcggtcaactaccacttcggctccaaggagaacctggtcaacgaggtgttccgccgccgcatggacgagatgaccggcgcccgcctgtcgcagctcgaacgcgcccgcagcgaacaccccgggcagctgcgcccggtgctggccgccttcgtcgagccggcattggcgctggcccaggaccgccagaacggcggtgccttcgtgcgcgtgatcgcccgcgcctacgccgagaagaacgacaacctgcgcaagttcctgtccgaccactacggccacgtgctgcgtgcgttcggcaaggccatcggcgagtgcgtacccgacctgagcaaggaagagctgtactggcgcctggatttcctggccggctcgctcacctatgccatggccgacttcgggctgatcaagcgtcccgccggtgtcactgaagcggcgcatcgtgcccatgccgcccacgaactgatccatttcgccgaagccgggttccgcgccgccgctcgcgccagcgccctgcccgcttccctttga

SEQ ID NO: 495488 - DNA, 2373 bp, Stenotrophomonas maltophilia
atgtccaattccctgctagtccgccgcgccgccgtgctgggtgccggcgtcatgggtgcccagatcgctgcccacctcaccaacgctggcgtcgacaccgtgctgttcgacctgcccgccaaggagggtccggccgacggcatcgtgctgaaggcgatcgccaacctgggcaagctgagcccggcaccgctggccagcaagtcgctggccgaagccatcactccggccaactaccagtccggcctggagcagctgaaggactgcgacctgatcatcgaggccatcgccgagcgcatggactggaagcaggacctgtacaagaagatcgcgccgttcgtggccgaccacgcggtgctggcctccaacacctcgggcctgggcatcaacaagctggccgacgtgctgcccgagcagctgcgccaccgcttctgcggcgtgcacttcttcaacccgccgcgctacatgcacctggccgagctgatcccggccaccaccaccgacgccgccgtgctggaaggcctggaagagttcctggtcaccaccctgggcaagggcgtggtgtacgccaaggacaccccgaacttcatcggcaaccgcatcggcgtgttctcgatcctgtccaccatccaccacacccagcagttcggcctgggcttcgatgaagtggacggcctgaccggtccgctggtcggccgcccgaagtcggccacctaccgcacctccgacgtggtcggcctggacaccatggcccacgtcatcaagaccatgggcgataccctgccgaacgacccgtggcatgaattcttcaagtcgccgaagtggctggacgcgctgatcgccaagggcgcactgggccagaagaccggtgccggcatcttccgcaaggtcggcaaggacatcgtggtgctggacctggagaagcaggactaccgtccggccgatcgcgctgccgcgccggaagtggtcgagatcctgaagatcaggaacccggccgagaagttcgccaagctgcgcgagagccagcacccgcaggcgcagttcctgtgggcgaccttccgcgacctgttccactacagcgcctaccacctggccgacatcgccgagaccgcgcgcgacgtcgacctggccatccgctggggctacggctggtcgctgggcccgttcgagacctggcaggctgccggctggaagcaggtcgcacagtggatcgccgatgacatcgtggccggcaagagcatgagcagcgcgccgctgccggactgggtgttcgatggccgcgatggcgtgcacgccgccgagggcagctacagcccgtcgcgcaacgccaagctgccgcgctcgtcgctgccggtgtaccagcgccagcgtttcccggatccgctgctgggcgaaacgttcgcgccgggcgagaccgtgttcgagaacgacggcctgcgcatgtggcacgacggtgatggcatcgccgtggtcagcttcaagaccaagatgaacaccgtgtccgaccaggtgctggacggcctgcaggaatgcgtgagccgcgccgagaaggacttccagggcctggtgatctggcagcagaaggaacccttctccgccggtgccgacctggccggtgccctcggcctgctgcaggccggcaaggtcgaccagttcgaagaaatggttgccaacttccagcgcaccagccagcgcatcaagtactcgctggtgccagtggtggctgccgtgcgcggcctggccctgggtggcggctgcgagttccagatgcacagcgccaagaccgtggccttcctggaaagctacatcggcctggtcgaggccggcgtcggcctgctgccggccggtggtggcctgaaggaactggccgtgcgcgcctcgcaggccgcgggcccgggcggcgacgtgttcgccgaactgaagaagaccttcgagaccgtggcgatggccaaggtgtccaactcggcggtcaacgccaaggaactgggcctgctgcgcagcaccgacaaggtggtgttcaacagctacgaggccctgcacatcgccaaggccgaagcacgcgccctggccgaagcgggttaccgcccgccgctgccggcacgccgcatccaggtggccggtgacgtgggtatcgccaccttcaagatgatgctggtcaacatgctggaaggccgcttcatcagcccgtacgactacgagatcgccgagcgcatcgctaccgtgctgtgcggtggcaaggtcgaccgcggcaccctggtcgacgaagagtggctgctgaccctggagcgcaagcacttcgtcgaactggcccagcaggaaaagacccaggcccgcatcgcgcacatgctgaagaccggcaagccgctgcgtaactga

SEQ ID NO: 495489 - DNA, 1209 bp, Stenotrophomonas maltophilia
atgaccaagcaaatccaggacgcctacatcgtcgccgccacccgtaccccggttggcaaggcgcccaagggcatgttccgcaacacccgccccgacgacatgcttgcgcacgtgctgcgcagcgtcgtcgcccaggccccgggcgtggacgtcaaccgcatcgatgacgccatcatcggttgcgccatgccggaagccgagcagggcatgaacgtggcccgcatcggcgtgctgctggcaggcctgcccaataccatcgccgcacagaccgtgaaccgcttctgctcctccggcctgcaggccgtggcgcaggccgccgacgcgatccgcctgggcaacgccgacctgatgctggccggcggcaccgagtcgatgtcgatggtgccgatgatgggcaacaagatcgccatggcgccgagcgtgttcgacaacgaccacgttgccatcgcctacggcatgggcatcaccgccgagaaggtcgccgaagagtggaaggtctcgcgcgaagaccaggacgcctttgccctggcctcgcaccagaaggccatggccgcgatccagaacggcgagttcaaggacgagatcagcccgtacgagatcgtctcgcacctgccggacctggccgacggccagcgcatcatcacccgcaacaagatcgccgacaccgacgaaggcccccgcccggactcctcggccgaaggcctggccaagctgcgcccggtgttccgcaacggccagttcggcggcaccgtcaccgctggcaactcgtcgcagatgagcgatggcgccggcgccgtgctgctggcctccgagcaggcgatcaaggattacggcctgaccccgctggcgcgtttcgtcagcttctcggtagccggcgtgcgtccggaagtgatgggcatcggcccgatcgccgcgatcccgaaggcactgaagcaggccggcctgacccaggaccagctggactggatcgagctcaacgaagccttcgccgcgcagtcgctggcggtgatccgcgattgcggcctggacccggccaaggtcaacccgctgggcggcgcgattgccttgggccacccgctgggtgcgaccggtgcgatccgtaccgcaaccctgctgcacggcctgcgtcgtcgccagcagaagtacggcatggtgacgatgtgcatcggcaccggcatgggtgcggcgggtattttcgaggcgctgtaa

SEQ ID NO: 495490 - DNA, 879 bp, Stenotrophomonas maltophilia
atgagcaagcgaattcgcaaagcagttttcccggtggcaggattggggacgcgttttttgccagcaaccaagactgtgccgaaggagatgctgccgatcattgatcggccgctgatccagtacgcggtggatgaggcgatcgaagccggctgtgacacgctggtgttcatcaccaatcgctacaagcacgccgttgccgactatttcgacaaggcgtacgagctggagcagaagcttgagcgcgctggcaagcaggagcagctggaattgatccggcacgtgctccccaatggtgtgcgcgcgatcttcgtgacccaggccgaggcgctgggcctcgggcacgcggtgctgtgtgccaggtcggtgatcggtgacgagccgtttgccgtactgctgcccgacgacctgatctggaaccgcggtgcgggcgcgctgaagcagatggccgacctcaacgaagccagtggcgccagcgtgatcgcggtggaagacgtgccgcacgataagaccgccagttacggcatcgtcgccaccgacgcgttcgatggccgcaagggccgtatttcgcagatcgtcgagaagccgaagccggaggacgcgccgagcgacctggcggtggtgggtcgttacgtgctcagcccgaagatcttcgagctgctggaacagacccagaccggtgccggcggcgagatccagctgaccgatgcgattgccgagctgctgaagaccgaagaagtcgatgcctatcgtttcgagggcacccgcttcgactgcggcacgcacctgggcctggtggaggcgacgatccgcttcgcgctggacaacccgaagctggctggcccggcgcgggagaagctggcggcgatgctggcggaataa

SEQ ID NO: 495491 - DNA, 1914 bp, Stenotrophomonas maltophilia
atggcttcaccctggcgggacagaatcctcggcctgatgccgcgttcggccatcgtctgccacgacctcttcatggtctgggcatgctggcagctgctccatgcagggcgttactcgatcctgcccaacgccccggcgctgcccctgtggaacgtcgataccaccctggtcctgctgctgcagggcctggtgttctggcgcgtgggcctgtaccgcggcctgtggcggtttgccagcgtcagcgacctgctgaacatcttcaaggccagcttcatcggcatggtggccatcatcctggtgctgatgtggaagcgcttcgacggcgtacccatgtcggtgctggtgatctacccgttcgcgctgtcggcactgctcggcgcgccgcgcctgctgtaccgcgcctggaaggactaccaggcactgcagtccgattccagcgcccgccgcgtgctgatcctcggcgccggccaggcggccgagaccctggtgcgcgacctgcgccgctccggcaacttcgagccggtcggcctgctcgacgatgcaccgcacctgcgtggcgccaagctgcagggcctgccgatcctgggcacgctggatgacgcgccgacggtggtccgcgagaccgctgccaagctgctggtcattgccatgccgtcgctggacgccgcaggcatgcagcgcgtcgtcgcgatctgcgaaagcaccggcgtgccgttccgtaccgtgcccaagctcagtgacatcctgcagggccagtcgctgccgggccagctgaaggaagtggcgatcgaggacctgctggggcgcaagccgatcatgccggactggaacctgatccgcggctggttgggtgggcgcaccgtgatggttaccggcgccggtggttcgatcggctcggagctgtgccgccagtgcgcgcggcatggtgccggtcgcatcatcctgctggagatcagcgagctgctgctgctgaccatcgagggcgagctgcgtcgcagcttccccgatgtcgagatcgaggcggtgctgggcgactgcggtgacccagcggtgatccgccacgcgctgtcgctgcaccccgtcgataccgctttccatgcggccgcctacaagcatgtaccggtgctggaacgccagctgcgtgaagcagtgcgcaacaacatcctggcgaccgagaacgtcgcgcgcgcctgcctggaagcccgcgtggagcatttcgtgttcatctccaccgacaaggcggtcgacccggtcaatgcgctgggcgcgagcaagcgctacgccgagatgatctgccagagcctggaccagaagtccacgcatacccgttttgtcacggtgcgcttcggcaacgtgctggcgtcggccggcagcgtggtgccgctgttccgcgagcagatcctgcgcggtggcccggtcacggtcaccgacccggaagtcagccgctacttcatgaccattcccgaggcctgccagctgatcctgcaggcggccgcatcggcgtcgcatggtgcgatctataccctcgacatgggcgagccggtgccgatccgcgtgctggccgaacagatgatccgcctgaccggcaagcagccgtacaaggacatccagatcatctataccggcctgcgtccgggcgagaagctgcacgagacgctgttctattcggacgaagattaccgctccaccgcgcacccgaagattcttgaagccggcgtgcgtacgttctcgcgcgacctggtgctgggcaacattccgcgcctgcgcgaggcgattgccagctacgacaccgcccgcatccaggaaatcctgtttgcgacgatgccggaattctcgccaatcgaacaggatgcttacatttcatccgctaaagtcgtgccttttccggcacgtgaggccaacaggcaccaatga

SEQ ID NO: 495492 - DNA, 990 bp, Stenotrophomonas maltophilia
atgccctggcttgtgatgggcgcgctgctggggctcgccctgctcagcgcgttgctgacctgggctgcgcggggctatgcactgcgccagcagttgatggaccagccgggcgagcgtcgcagccatagcgttgccaccccgcgcggtggcggcatcgccatcgtcatcagcctgctggtgaccgccggcgtggccatctgggcctggcccgaaagcacgccgacggtgctggtggccagccttgggctggtgctggtggccggtatcggctggtgggacgaccacaagcccctgccggcgatgcgtcgcctgctggtgcatttcatcgccgcagcgctgttggccggcctggtcaaggtgaatggtggcagctggctgttggcggtgctggtgctgctgttcaccgcgtcgctgatcaacatctggaacttcatggacggcatcaatggcatcgccgccagccaggctgtcgtggcgatgctggggctggcgccggtgctgccgtggccctattcactggccgccgtggccctgggcctggcatgccttggattcctgccgttcaacttccctcgcgcccggatcttcatgggcgatgtcggaagcggtgcgctggggtatgcggtcgcagtggtgctggcgatcgccagcgtgcgtaccgatatcaactggatcctgctgctggtaccggtttcgccgttcctcgtggacgcgggcttcacactgctggcgcgcatcatttccggacaacgctggatggaaccccatacccagcatgtctaccagcgcgcggtgcaggcaggagccagtcacccgcaggtgacagggatgtactttgctttgggtctgttcagtattacagtgttcaatgtctgctccaatttgcagccgaggtgggaggctgtcgtggcgatcgcgtggttcatcgcgctgagcgtcctctggctcctcctgcgcaatggaatgcgccaccgacaaggaattacctga

SEQ ID NO: 495493 - DNA, 1179 bp, Stenotrophomonas maltophilia
atggatttcgtcaccgagtggttctggttcttcctgttcgttccgctggccgccctggctgggtgggtgatcgggcggcgcggtggtcaacgccacggtgacagccaggtcagccgcctgtcgagcacctatttccgtggcctgaactacctgctcaacgagcagccggacaaggccatcgagctgttcctgcacatcgccgagctggacaaggaaaccttcgagacccaggtcgcgctgggccacctgttccgccgccgcggcgaagtcgaccgcgccatccgcctgcaccagggcctggtcaaccgccacgacctcagtgatgcacagcgcgtgcaggccctgctggcgctgggcgaggactacatgaagtccggcctgctggaccgtgccgagaccgtgttcaccgagctggcgcagctggatcagcgtgcaccgcaggcactcaagcacctgatcggcatctaccaggccgagcgcgactgggaaaaggcgatcgacaacgcgacccgtttcgaggacgtcaccggcgagccgatgggcaagctgatcggacagttcgaatgcgaactggccgaacgtttccgtggcgccggcaagctggaagaggcgagggcagcgatcgcccgcgcctaccaggccgacgcgatgtcggtgcgcgccggcatcatcgagggccgtctggaaaccgacgcgggcaatccagaggccgctgtgcgcgccttcgagcgcgccgcgcgcaacgatcccgaatacctgccggaactgctgccggcactgatgcagaactatcgcagggtcggcgatctggcaggtgcacgcgcgttcctgtcggagatgaccgagcactaccgcggcatcgccccggtactggcgctgacccggttgatggaagagcaggaaggcgtggcgccggcccgtgcctacctcggtcgccagctcaaggatcgcccgtcggtacgtggcgaatccgcgctgatcgacttgaccctcgccgagggagccgattccaccgccaccctgcatgacctcaagcacatcaccgaccagctgctggtgcgcaacccggcctatcgctgcacgcgctgcggcttcggtgcgcgtacccaccactggcagtgcccgagctgcaaggagtggggaacggtcaagccgctgctgaactacgcggtgctctga

SEQ ID NO: 495494 - DNA, 285 bp, Stenotrophomonas maltophilia
atgaaggtttttcgtctgctggtcctgctggcggtactcattcttgggttgatcatcggtgccatgaacatggacgagatgaccatcaacctgctgttcacccagcttaagacctcggtcggcgtggccatcattgccgcgttgctgatcggcgtcatcgttggcgctggcctggtgctggtgagcgtggtcattccgctctacagccagctgcgccgcgccaacaagtccgctgccgccacgccggcaccggttgcttcccctcaatcttttgatggacgctga

SEQ ID NO: 495495 - DNA, 306 bp, Stenotrophomonas maltophilia
atgaccaaatccgaactgatcgaaatccttgcgcgccgccaggcgcacctgaaggccgatgatgtcgatctggcggtgaagtcgttgctggaaatgatgggcggatcgctgtccgccggggatcgcatcgaaatccgtggatttggcagcttctcgctgcactatcgtccgccgcgcctgggtcgcaacccgaagaccggcgaatcggttgccctgccgggcaagcatgtcccccatttcaagccgggcaaggaactgcgcgagcgggtcagcagtgtgctgccgctggacgccgatccggcctga

SEQ ID NO: 495496 - DNA, 1686 bp, Stenotrophomonas maltophilia
atgaccgaatcatttgccgaactgtttgaagccagccaggccaatctggccaagctgaagccgggcgccatcgtcagcggtaccgttgttgaagtccgcggcgacgtcgtggtgatcaacgctggcctgaagtccgaaggcatcgtgccgatcgaacagttccgtaacgacgctggcgaaatcgacgtcgccgaaggcgacatcgtcaaggtcgccctcgactcgatcgagaacggcttcggcgaaaccgtcctgtcgcgcgagaaggccaagcgcgcgatggtgtgggacgagctggaagaagcgttggaaaagaacgaaaccatcaccggccgcatcagcggcaaggtcaagggtggtttcaccgtggacatcaaggatgtccgcgccttcctgccgggttccctggtcgatgtgcgcccggtgcgcgatccggcctacctggaaggcaaggaactcgagttcaagctcatcaagctggaccgcaagcgtaacaacgtcgtggtctcgcgccgcgctgtcgtcgaaagcgagcactcggaagagcgcgagcagctgatggacaagctgcaggaaggcgcgatcctgaagggtgtcgtcaagaacctgaccgattacggcgcgttcgtggacctgggcggtatcgacggcctgctgcacatcaccgacatggcgtggaagcgcgtgcgtcacccgtcggaagtcgtgaacgtcggcgacgagctggacgtccgcgtgctgaagttcgaccgcgagcgcaaccgcgtttcgctgggcctgaagcagctgggcgaggatccgtgggacaacatcggccgtcgttacccggccaacagccgcgtcttcggcaaggtctccaacgtcaccgattacggtgcgttcgttgagatcgagccgggcgtcgaaggcctggtgcacgtctcggagatggattggaccaacaagaacgtcaacccgtccaaggttgtccaggttggtgatgaagtcgaagtgatggtgctggacgtcgatgaagagcgtcgccgtatctcgctgggcatgaagcaggttgccgccaatccgtgggaaaccttcgctgccacccacaagaagggtgacaaggtgtcgggccagatcaagtcgatcaccgacttcggcatcttcatcggcctggacggcggcatcgacggcctggtccacctgtccgacatcagctggaacaccaccggcgaagacgtcgttcgcaacttcaagaagggcgataccctggacgccgtcgtcctggctgtcgatccggagcgcgagcgcatctccctgggcgtgaagcagctggagcaggatccgttcggccagtacatggctgccaatccgaagggctccaaggtcgaaggcgtggtgaaggaagtcgacgccaagggcgcgatcatcgagctggctgacggcatcgaaggttacgtctcggcccgcgacatcgccaacgagcgcgttgacgacgccacccagcacctgaaggtcggcgacaaggtcgaagccaagttcgtgggcatggaccgcaagggccgtaccctgcagctgtcgatcaaggccaaggacgacgcggaaatgcgcgaagtgctggaggaataccagtcctcttcggcttccagcggcaccacccagctgggcgcgctgctgcgtgcacagctgaacggcaacaagtccgagtaa

SEQ ID NO: 495497 - DNA, 678 bp, Stenotrophomonas maltophilia
atgaatccactcgctcccgtcctgaccatcgacggcccatccggggccggcaagggtaccatcagccgcatcatcgcgcgccggatgggctggcattacctggattcgggcgcgctgtaccgggcggtgggcgtggccgcaagctgggccgacatcgatacctccgacgcctcggcgctggtgcgttgcaccttcgacacccacgttcagtttgtcgagcagggcgatgccatgcgggtcatggtcaacggcaccgatgccaccgacgagctgcgcctggagaccaccggtgcgctggcctcggccattgccgccattcccgaggtccgcgctgccctgaaggagcgccagcgcgcattcagggagctgccgggcctggtcgccgacggccgcgacatgggcacggtgatcttcccggacgcctcctacaaggtcttcctgaccgccagtgccgaggagcgcgccgagcgccggcataagcagttgaaagacaagggggtttctgttaactttgatgacctcctgcgcgagatcatggcccgcgacgcccgtgatgcccagcgtaccgtggcgcccctgaagccggcagacgatgctgtcctcatcgacaccacaggcatcggcatcgatgatgtcgttgccagagtgatggatctgcttccggttccggctgcctga

SEQ ID NO: 495498 - DNA, 126 bp, Stenotrophomonas maltophilia
atgaaagtcctgtcctccctgaagtcggcgaaggcccgtcaccgtgactgcaaggtcgtgcgtcgtcgtggcaagatcttcgtcatctgcaagtcgaacccgcgtttcaaggcgcgtcagcgctaa

SEQ ID NO: 495499 - DNA, 330 bp, Stenotrophomonas maltophilia
atgaagcgttacctgtccgccctggccgtgatggccaccctggccgccgccacaccggcactggccgacaccctgcttgtcgaccgcgcccgcgagaagccggccggtgccctgcccgtgcgcggccagagcatgcagcaggtgcaggcgcagttcggcgcgcccagcgagcagctgcagccgcgtggcgggcagaaacggcaatggccgaccatcaaccgctgggtgtacccgcagttcaccgtctacttcgagaagcagaaggtgatcgacgtggtggccaaccaggcggacccgaacgaaatcggcccgaaaccgccgatccgttga

SEQ ID NO: 495500 - DNA, 1038 bp, Stenotrophomonas maltophilia
atgaaccagacccttcgttttcctgccgagtgggaagcccagagcggcgtcctgattgcctggcccaccgccgataccgactgggctgaccgcctgggccaggtggaagagacctacatcgccctggtcgcggccatcacccgcttccagccggtgctgatctgcgtggccgacgacgatgtggagacctacgccgagatgcgactgcgctccaaccgcatcgacatggacaaggtccacttcaccacggcggcctacgacgatacctggctgcgcgactccggcccgatcaccctgcgccgtgccgacggcggcttccagctgctggatttccgcttcaccggctggggcggcaagttcgacgccaccctggatgaccagctggtgggcgtgctcgaccaggccggcgtattcaacgatgcgccggtccgcagcattccgttcgcgctggaaggcggcggcatcgagaccgacggtgaaggcaccctgctgaccacctggaagtgcctgcacgagcgccacccggaccgcgaccgcgccagcctgagcgccgacctggccgactggctgcagcaggaccgcgtgctgtggctggaccacggctacctggaaggcgacgacaccgacgcgcacatcgataccctcgcccgcttcgcctccgctgacagcatcgtctaccaggcctgcgacgacgagagcgactcgcattacgccgaactgcaggcgatgggcaatgagctggccgcgctacgcaccaaggatggccagccgtaccgcctgttcccgctgccgtgggcccggccggtgatcgacgaaggccgtcgcctggctgcctcgtacgccaactacctgatcgtcaatggcgcggtgctgatgccggcctatggcgacccggccgatgacctggcccgcgacgtgctggcacaggcgcacccgggccgagagatcgtgcaggtgccctgccgctcgctgatctggcagaacggcagcctgcactgcatcaccatgcagctgccggccgggctgttgaaggcgtaa

SEQ ID NO: 495501 - DNA, 888 bp, Stenotrophomonas maltophilia
atgaactcgcgcagcccccttaccgtcgccctgatccaggagcgcaaccacggtgatgccgccgccaacctggcggtgatcgaagcacgcgtggccgaggcggctgcgcagggtgccaagctggtgctgctgcaggaactgcataacggcccgtacttctgccagcacgaatcggtggacgagttcgacctggccgagccgattccgggcccgagcaccgagcgcctgggcgcgctggcgaagcagcatggcgtggtgctggtcggctcgctgttcgagcgccgcgctgccgggctgtaccacaacaccgccgtggtgttcgagaaggacggtacgctgctcggcaagtaccgcaagatgcatatcccggacgacccgggcttctacgagaagttctacttcaccccgggcgacatcggcttcaagccgatcgatacctcggtgggccgcctgggcgtgctggtgtgctgggaccagtggtacccggaagcggcgcgcctgatggcgctggccggcgccgagctgctgctgtatccgactgcgatcggctgggatccggacgacgtgcaggacgagaagacccgccagcgcgacgcctgggtgctgagccatcgcggccatgcggtggccaacggcctgccggtgctgagctgcaaccgcgtcggccacgaggcctcgccgctgggcgcgtcgggcatccagttctggggcaacagccacgtgctgggcccgcagggcgagttcctggccgaggccggcaccgaggccaccgtgctgctgtgcgacgtcgacctgcagcgcagcgagcacgtgcgccgcatctggccgttcctgcgtgatcgccgcatcgatgcctacggcgacctgctcaagcgctacatcgactga

SEQ ID NO: 495502 - DNA, 531 bp, Stenotrophomonas maltophilia
atggccgtcctcatccgtgatgccggcccggccgacatcgacgcgatcaccgcgatctacgcggtggaagtgaccgacttcgtcaacacttacgagtacgacatcccggacgcgtccgagatgctgcgccgcatgcgcgacatcgtcgaccgcggcttcccctacctggtcgccgagattgacggccaggtggccggctatgcctacgccaacacctaccgcacccgcgttgcctaccagtggaccgtggaaaactcggtctacgtcgatgccgcgttccagggccagggcgtcggcaccggcctgctgcaggcgttgatcgacgcctgcgtggcgcgtggctaccggcagatggtggcggtgatcggcgaaccgaccaataccgcttcaatcaagctgcacgaacgcttcggcttcgagctggtcggcgtgttccgtggcctcggccgcaagcatggccgctggctggataccgtgcagatgcagcgcgcgctcggcgatggcgccgacactgcaccttccaatgaatga

SEQ ID NO: 495503 - DNA, 1221 bp, Stenotrophomonas maltophilia
atgaccgaaacccttcccgagaccggcgacgacctgttcgccggccagccggtacgcgtcgtcgaacgcgacggcgtgcgctacaccctgctgggcaccgcccatgtctcccgcgccagcgtcgaggcggtggagaaagccatcgacagcggtcgcttcgacgccgtggccgttgaactggacccgcagcgcctgcaggcactgagcgacccggacacgctggccaagctcgacctggtcgaggtgatccgcaagggccgcgtcgccctgttcgccgccaacctggccctgtccgcctaccagcgccgcctggccgaacagctcgacatcgagccgggcgcggaactgaaacgcgcggtggaactggcgcgcgaacgcgacctgccggtgcacctgatcgaccgcgaggtcggcctgaccttccgccgggcgtcgcagcggcttgggttcttcggcaagctgaagctggttgccgggctgggcgccggcctgttctcgtccgaggaagtgggcgagaacgagatcgaaaagctcaagcagggcgacatgctggaatcgagctttggtgagttcgccagcgagagcccggcgctgtacgagaccatcatcggtgagcgcgaccgttacatggccacgcgcctgcgcgaggagcacaccccgcagcagcgtgaagtgctggcggtggtcggtgccggtcacctggccgggctggcgcgctacctggaaaccgataccgaggcaccggcgccgctgcgcgccgagctggaggcggtgccgaagaagcgcaacatcccgtggttcacgctcggcatcctggcgatcgtggcgaccggcatcggtgtgggcttctaccgcggcggcctgggcgtgggcaccgagctgctggcgacctgggcaatgtataccggcggcctggcgggcctgggctgcctgctggcaggcggtcacccgctgagcattctcaccgcgatcgcggtggccccgttcaagccgttccgcctgagcatcccgaccggcgcattctcggcgctggtggaagcgcgcctgcgcaagccggcctacgaggacttcctgaagctgcgcgacgatgcgcagagcctgaagggctggtaccgcaatcgcgttacccgcgtggtgctgaccttcatgctgaccaacatcggcagcatgctcggcctgtggctgaccaccttcaaggtgtggggcaaggtggcggggtaa

SEQ ID NO: 495504 - DNA, 3087 bp, Stenotrophomonas maltophilia
atgagtgttgccgagttctccatccgccgtccggtcaccaccatcatgtgtttcgtgtcgttggtggtgatcggcctgatcgcttcgttccgactgccgttggaggcgctgccggacatctccgcgccgttcctgttcgtgcagattccctacaccggctcgaccccggaagaagtggaacggaccatcatccgtccggtcgaggaatcgctggcgacgatgaccggcatcaagcgcatgcgctcgtcggccacctccgaggcggcgctgatctacatcgagttcagcgactgggaccgcgacatcgccattgccgcgtcggacgcgcgcgagcgtatcgacgcgatccgcagcgacctgcccgacgacctgcagcgctacaacgtgttcaagtggtccagcagcgaccagcccgtgctgaaggtgcggctggccagcaccaccgacctgaccaccgcctatgacatgctcgatcgtgagttcaaacggcgcatcgagcgtattcccggtgtggcccgcgttgatatcaccggtgcgccgccgaacgaggtggagatcgccatcgatccgaaccggctcaacgcgcatgggttgagcatcaacgagctgagcgagcgcctgcgcacgctgaacttctcgatctcggccgggcagatcgacgacaacggccagcgcgtgcgcgtgcagccggtaggcgagatcaccgaccttcaggagatgcgcgacctggtgatcaacgccaagggactgcgcctgggtgatatcgccgatgtccgcctgaagccggcgcggatgaactacgggcgccgcctggacggcaacccggcggtgggcctggacatcttcaaggaacgcagcgccaacctggtggacgtttcgcgtgcagcgctggccgaagtcgaggcgatccgcgcgcagccgtcgatgcgcgacgtgcagatcaaggtgatcgacaaccagggcaaggcagtgacgtcctcgctgctggagctggccgaggccggcgcggtcggcctgatcctgtcggtcaccgtgctgttcttcttcctgcgccattggccgtcgacgctgatggtgacgctggctattccgatctgcttcaccatcaccctcggcttcatgtacttcgtcggggtgacactcaacatcctgaccatgatgggcctgctgctggccgtcggcatgctggtcgacaacgcggtggtggtggtggagagcatctaccaggagcgcgagcgcatgccggggcagccacggctggcctcgatcatcggcacccgcaacgtggccatcgcgctcagcgccggcacgctgtgccactgcatcgtgttcgtgccgaacctgttcggcgagaccaacaacatcagcatcttcatggcgcagatcgcgatcaccatctcggtctcgctgctggcctcgtggctggtggcggtcagcctgatcccgatgctgtccgcgcgcatggccacgcccaagctggtgcactcgcagaccggcctgatcgcgcgcctgcagcgacgctatgcgcagctgctggactggtcactgcatcaccgcggttggagcctgctcggcatcctgctcgtggtgctggtcagcctggtgccgatgaagctgaccaaggtcgacatgttcggtggtgagggtggcaaggacatcttcatcggctacatgtggaagggcgcctacacctaccgccagatgtccgaggaagtggcgcgggtggagaactggatcgaccagaaccgcgagcgcctgcacgtgaagcaggtgtattcctggtacagcgagcaggaaggcagctccacggtggtcaccctggacgaaaagtacgccaaggacatcaagtcgctgcaggaggaactgcgcaagggcctgccgaagtcggcccgcaccgattacttcgtcggcaaccagggcggcgatggcggtggcggcagcaaccagggcgtgcaggtgcagctggtgggcgactccagctcgatgctgcaggagatcggccaggaagtggtgccgttgctggcgcagcgtgccgagctgcgtgacgtgcgcatcgacaacggcgacaagggcggcgagctgaaggtgcgcgtcgaccgcgagcgtgccgcagcgttcggcttcaatgccgagcaggtggccagcttcgtcggcctggcgctgcgcggcgcgccgatgcgcgagttccgccgcggtgacaacgaagtgccggtgtgggtgcgctttgccggcgccgagcagagcagcccggaagacctggccggtttcagcgtgcgcaccggcgatggccgcagcgtgccgctgctgagcctggtcaccgtggacgttggttcgtcggccacccagatcggccgcaccaaccgccagaccacgttgaccatcaaggccaacctggccgagaaggtcaccgcgccggacgggcgcaaggcgatcgaagccgtgctcaagccgatgaacttcccggccggctatggcttcaccttcgacggcggcgactacggcaacgacgacgaggcgatgcagcagatggtgttcaacctgctgatcgcactggtgatgatctacgtggtgatggcggcggtgttcgagtcgctgctgttcccggcggcgatcatgagcggagtgctgttctcgatcttcggcgtgttctggctgttctggatcaccggcacctcgttcgggatcatgtccttcatcggcatcctggtgctgatgggcgtggtggtgaacaacggcatcgtgatgatcgagcacatcaacaacctgcggcgcagcggcatgggccgcacccaggcgctggtggaaggctcacgcgaacgcctgcgcccgatcatgatgaccatgggcacggcgatcctggcgatgatcccgatctcgctgaccgatacgcagatgttcggcaatggcccggagtattcgccgatggcgcgcgcgattgcgggcggcctggcgttctcgacggtggtcagcctgctgttcctgccgacgatctatgcggtgctcgatgacctgcgcaatgccgtgacgcggttgatccgccgtgcacgcgggctggagaggatggagccgggcgctgcccggctgtaa

SEQ ID NO: 495505 - DNA, 3522 bp, Stenotrophomonas maltophilia
atgaccgccccgggccacgaccacggtgcctcgccggcgagcgacggcgccgccgccggcatgcgcggcggcctggtggagtttgccacccgccgccgcgtgaccatcgccatgtgcacggtcacgctgctgctgttcggcctgatcgcgctgggcaatctcaaggtcaacctgctgcccgacctgagctacccgacgctgaccgtgcgcaccgaatacaccggtgcagcgccgactgaaatcgaaaccctgatcacccagccggtcgaagaagcggtcggcgtggtcaagaacctgcgcaagctgaagtcggtctcgcgcaccggccagagcgacgtggtgctggaattcgcctggggcaccaacatggaccaggccagcctggaggtgcgcgacaagatggaagcgctgaacctgccgctggaggccaaggccccggtgctgctgcgcttcaatccgtcaaccgagccgatcatgcgcctggtgctgtcgaacaagacggcgccgaccagcgatgccgatgcggtgcgcgagctgaccggcctgcgccgctatgccgatgaagacctcaagaagaagctggagccggtcaccggtgtggcggcagtgaaggtgggcggcggcctggaggacgagatccaggtcgacatcgaccagcagaagcttgcccagctgaacctgccgatcgacaccgtcatcaagcgcctgaaggacgagaacatcaacatttccggcggccgcctggaggagggctcgcagcgcttcctggtgcgtaccgtcaaccagttcgccgacctggaggagatccgcaacctgctggtgaccacccaggccgccaatggcagcgccgcggactcggcgctgcagcagatgttcaacatcgccgcgtcgaccggttcggcggccgccatcgcggcggcgtcggcggcacagagcgcgtcgtccggtggtggctccagcgtggttgccaacggcgtgccggtgcgcctgaaggacgtggccaccgtgcgccagggctacaaggagcgcgaagcgatcatccgcctgggcggcaaggaatcggtcgagctggccatctacaaggaaggcgacgccaacaccgtgtccaccgctgaagcgctgcgcaagcgcctggagcagatcaagggcacgttcccgtccgatgtcgagctgaccaccatcgaggaccagtcgcgcttcatcgagcacgccatcgccgacgtcaagaaggatgccgtgatcggcggcctgctggcgatcctgatcatcttcctgttcctgcgcgatggctggagtacgttcgtgatcagcctgtcgttgccggtctcgatcatcgccacgttcttcttcatgggccagctcggcctgagcttgaacgtgatgtcgctgggtggcctggcattggccaccggcctggtggtggatgactcgatcgtggtgctggagagcatcgccaaggcccgtgagcgtggcctgggcatcctgcaggcggcgattgccggcacccgtgaagtgagcatggccgtggtcgcctcgaccctgaccaccatcgcggtgttcctgccgctggtgttcgtcgatggcatcgccgggcagctgttccgcgaccaggcgctgaccgtggcgatcgccatcgcgatctcgctgctggtgtcgatgaccctgatcccgatgctgagctcgctgaaggggcggccgccgctggcgttcccggaagaggcgccgaacgcagcatggcagccgcagaagcgttggcagaagccggttgcactgggccgccgtggcgtgctcgccagcgtgcgctggagcttctacgcgctggcctggctcgtggtgcgcctgtggcgcggcgtggtcgcggtggtcggcccggtcatgcgcaaggccagcgacctggcgatgaagccctatgcaggcgccgagcgaggctacctgcgcctgctgccgagtgcgctggcgcatcccggcaaggtgctgggcgtggcagccatcattttcgtggcgaccatggcgctggtgccgatgcttggcgccgatctgatcccgcagctggcgcaggaccgtttcgaaatgacggtgaagctgccggccggcacgccgctgaagcagaccgatgcgctggtgcgcgagctgcagctggcgcatggcaagggcgaaggcgtggcctcgctgtatggcgtcagtggcagcggcacccggctggatgccagcccgaccgaaagcggcgagaacatcggcaagctgaccgtggtgatggaaggtggcggcaatgcgcacactgaagcggcgatcaccgagcgcctgcgcggcaccatgagccagcacccgggtgcccaggtcgacttcgcgcggccggcgttgttcagcttttccacgccgctggaaatcgaactgcgcgggcaggacatggcgaccctggaagtggccggccagcgcctggcggcgatgctgcgcggcaacgcccactacgccgacgtgaagtcgacggtggaagagggcttcccggaaatccagatccgcttcgaccaggagcgcgccggtgcactgggcctgaccacccgccagatcgccgacgtggtggtgaagaaggtgcgtggcgacgtcgccacccgctacagcttccgtgaccgcaagatcgacgtgctggtgcgcgcccaggaaggtgaccgcgccagcgtggagagcatccgccggctgatcgtcaatccgggcagcacccgcccggtgaccctggacgcggtggccgacgtggtcgccaccaccggccccagcgagatccatcgtgccgatcagacccgggtcgcggtggtatcggccaacctgcgcgacatcgacctcggcgccgccatgcgcgaagtgcagcagatggtggccgagcagccgctgggcgcgggtgtcggcctgcacatcggcggccagggcgaggaactggcgcaggcggcgaagtcgctgatcttcgccttcggcctggcgatcttcctggtctacctggtgatggcctcgcagttcgaatccctgctgcacccgttcgtgatcctgttcaccatcccgctggcgctggtcggcgcgatcctggcgctgatgctgaccggaaagcccatctcggtggtggtgttcatcggcctgatcctgctggtcggcctggtcaccaagaacgcgatcatcctgatcgacaaggtcaaccagctgcgcgaggccggcgtggccaagcatgaggcgctggtggagggtgcgcgctcgcgcctgcggccgatcatcatgaccacgctgtgcacgctgttcggcttcctgccgctggcggtggcgatgggcgagggcgccgaagtgcgtgcaccgatggcgatcaccgtgatcggtggcctgctggtgtcgacgctgctgacgctgctggtgatcccggtggtgtacgacctgatggatcgtcgcggcgacgcctactaccgtgagcgcggccgcaagcacgccggtgagggcctgcatggcgacgagggcggcacagcgggtgtggaggaaccggcatga

SEQ ID NO: 495506 - DNA, 1146 bp, Stenotrophomonas maltophilia
atgtcgcacccaaccttcctgtccggccgtcgcagcggaatctgcgctgccgcactgctgatctccacctccctgctgctgggcggttgcgccgcagggcccaattccgaagccaaggctgccgagaccaaggaggagaagaaggtcgacgcagtcccggtcgaagtggcggtggccagccatcgtgccgtcgcggccagctacaccggcacggccgcgctggaaccacgcgccgagtcgcaggtggtcgccaagacctccggcgtggcgctggcggtgctggtcgaggaagggcagcgggtcaccgccggccaaccgctggtgcggctggacccggatcgtgcacggctggccgttgcgcagagcgaagcacagatgcgcaagctggaaaacaattaccagcgcgcacagaagctggtcggccagcagatggtcagcgccgccgatgtcgaccagctgcgctacgacctggaaaacgtccgtgcgcagtaccggctggccacgctggagctgtcctacaccacggtggtggcgccgatctccggcgtgatcgcatcgcgctcgatcaagaccggcaacttcgtgcagatcaacacgccgatcttccgcatcgtcgacaactcgcggctggaagccaccctcaacgtgcccgagcgtgaactggccaccctgcgcgccggccagccggtgacgctggcggccgacgcgttgccggggcagagcttcaccggcaccgttgatcgcatcgcgccggtggtggattcgggcagcggcacgtttcgcgtggtcagcgccttcgacggcgccgcacacgcgctgcagcccggcatgttcggtcgcatccgcatcgactacgaccagcgtgccgatgcgctggtcgtaccgcgcctggcgttgctcgacgacggtgagccggcggtgttccgcgtgcgcgaaggcaaggtcgcacgcgttccggtcaagctgggttacgccgagggcccgtgggtggagatccgtgatggcctggcggccggtgatcaggtggtcaccgccggcaaggtcgccctgcgcgacggcacaacggtgcaggtgattgccgatccgaaggcgaagacggtcgctgcggccgccaagcccgcagacaaggccgggagcaagcaatga

SEQ ID NO: 495507 - DNA, 390 bp, Stenotrophomonas maltophilia
atgcgcccgcagccgctcgccgcttgtctcgctctggccgtcctcctgccccttggggccgccgcacagcccgctcctgctcctgccacacccgccccggccccggctcccgccgttgcgccagcgcccgccgcacccaccggcaacttcgacaatggccgcgtcctggcctacacctgccagggctgccacgggatcaccggctacaagaacgcctaccccagttaccgggtgccgaagatcggcggccagacccagcagtacctggcccaggccctgaccgagtaccgccagggcaagcgccggcatccgacgatgcaggcgcagtcgatgagtttcagcgaacaggagatcgccgatctctctgtttacctgtccaccgtcaagtaa

SEQ ID NO: 495508 - DNA, 462 bp, Stenotrophomonas maltophilia
atgtcgaaagccgcgcatccgatgcgtcacgccatcgccctgtccgttgccctgctgctggccgcctgctcacagtcgcaggtggaaaacagcgaaaaatcggccgccgacccgggccatgccagcggcgagcacggttcatcgtcctccgccggcctgccggcaggtcgcgaggccgccggtgaagcccgcgccaaggtgaagggcaaagccaccaaccagagctgcatcgactgccatggggccgacggcaatgcgccgatcgatccgacctatccgaagctgggtgggcagtacggtgactacctggcgcacgcgctgcaggcctaccgcgccggtgaccgccagcatgcgctgatgacgccgcaggcgaaggacctgagtgatcaggacatcgccgatctggcggcgtacttcggcagccggccgagccagctgcgggatctgcacggggtcaaatga

SEQ ID NO: 495509 - DNA, 1884 bp, Stenotrophomonas maltophilia
atgcctctgattactctgcagaacgtcgacttcagcgtcggcggcccgttgttgctggaaaaggccgaactgtcgatcgagccgggcgaacgcatcgccctgatcggccgcaacggcgccggcaaatccaccctgctcaagctgctgtccggcgaccacaagcccgatgacggcgaagtccgcgtgcagcagggcgtgcgcgtcacccgcctggagcaggaagtgccacacggcgccgccggctcggtgttcgacgtcgttgccgatggtctcggtgaactgggccagtggctggccgagttccaccatctcagccatgccgaggtcttcgatggcgaagcgctcggcaacgtgcaggccaagatcgacgccgccaacggctggggcctggaccagcgcgtcagcgaaacgctgaccaagctcgacctcgacggcgatgccgaattcggccgcctgtccggcggcatgaagcgccgcgtgctgctggcccgtgcactggtctccagcccggacgtgctgctgctggacgaaccgaccaaccacctggacatcgaagccatcgactggctcgaagcgttcctgaagggctggagcggcagcgtggtgttcgtcacccatgaccgccgcttcctgcgtgcgctggccacccgcatcgtcgagatcgatcgcggccaggtcaccagctggccgggcgactgggccaactacgagcgccgccgcgaggaacgcctcaatgcgcaggcgcaggaaaatgcccgcttcgacaagctgctggcgcaggaagaagtctggatccgccaaggcatcaaggcccgtcgtacccgcgacgagggccgcgtgcgccgcctcaaggcgatgcgcaccgaacgctcgcagcgccgcgacctcagcggtaacgtcaagatggaagccgcgcagggcgtcagctccggcaagaaggtcatcgacgtcaaggacatttcgttcgccttcggcgagcgcaccatggtccgcgatttcaccaccaccatcctgcgtggcgaccgcatcggcctgatcggccccaacggcagcggcaagaccacgctgctgaagctgctgctgggtgaactgcagccggccaagggagaggtcaatgcgggcaccaacctgcagatcgcctatttcgaccagtaccgcgcggtgctgcgcgaagactggagcgcgatcgagaacgtggccgaaggccgcgatttcctcgagttcaacggcaagcgcaagcacgtgcatgcctacctgcaggacttcatgttcacccccgagcgcgcgcgtgcgccgatcacccgcctgtccggtggcgagcgcaaccgcctgctgctggccaagctgttcgcgcagccgtccaacctgctggtgatggacgaaccgaccaacgacctcgacgtggaaaccctggagctgctggaagagctgctgggcgagtacaccggtacgctgctgctggtcagccacgaccgtgacttcatcgacaacgtggtgacctccacgctggtgatggaaggcgacggcgtgatcggcgagtacgtcggtggctacagcgactggcagcgctatgcggccagcgtggctgcgcctgccgcggccccggctgccaagccggcgactgttgcaccggccgctgctgcggccgcgactcccgcagcccccaagcgcaagctggcgtacaaggaagcgcgcgagctggagcagctgccaaagaccatcgagaagctggaaggcgatgtcgaagggctgacctcggcgatgaacgacccatcgttctacacccgcagcagtgctgaagtgacggcgcacacccagcagctggccaaggtgcaggccgaactggatgccgcttacgcgcgctgggaagagctggaaggctga

SEQ ID NO: 495510 - DNA, 876 bp, Stenotrophomonas maltophilia
gtgcgcctgaccttgcgccagctgcaggtgttcgtcgccatcgccgaccatggcaccaccactgccgccggccaggccgtcgcgctctcgcagtcggccagcagcgccgccctgcaggagctggaggcgcacttcggcaccccgctgttcgaccgcatcggccgccgcctggcgctgaacgggcacggccgcgcgctgctggagccggcgcgcaccttgctggtcaacgccgccgatctggagcggcagctggccgccggcggcgacccgtcgcagggcgcaccgctgcggctggtgctggccgccagtaccaccatcggcaactacctgctgccgccacgcatcgccgaactgctgcggcaggcgccgcaggccgaggtcgatctgcgcatcgacaacagtgccggcgtggtcgccgcggtacagcgcctggacgtcgacgccggcctgatcgaaggcccgtgccatgagcgtggcctgcaggtgaccgcctggcagcaggacccactggtgatcgtggctgccgccgatgcccgcgcacgctggtcgctggatgaactgcgccgcgcacgctggctgctgcgtgagcctggctccggcacccgcgaagccgtggaacaggccctgctgccgcacctgcgtggcttcgcgcagaccctgcagctgggcaataccgaagcgatcaagcaggccgccatcgccggcctcggcctggcctgcctgtcgcgccacgcgctggaagagccgctggccctgggccgcctgcgcgtgctcgagactccgctgccggccctgcagcgcaccctgtggctggtgcgccaccccggcaagcaatggctgccggggttgcaggcgttgctgggggaggtggggtag

SEQ ID NO: 495511 - DNA, 1080 bp, Stenotrophomonas maltophilia
atgaacgccaccgctctctcctcctggtccctgcccgccctgcgccaacgctggcagcctcgcctgcccggcctgctgctggtgggcctgatcgcggcggcgtcgctgtacctggcccagcttccctggctccaggcgcatggcctgagcgcgctgaccgtggccatcgtcgccggcatcgtggtcggcaacaccctttacccgcggctggcgccgagcagcgcggccggtgtcggcttctccaagcactggctgttgcgcgccggcatcgtgctgtacggcctgcgcctgaccttccaggacatcggccacgtcggcgtggccggcgtgctgatggacgtgctggtggtcgccagcaccttcgggctggcctgctggctgggcatgcgcgtgttcaagatggagcgcgaagcggcgatgctgatcggcgccggcagcgcgatctgcggcgcggcggcggtgatggccgccgagccggtggtgcgcggccgcgctgcgcaggtcaccgtcgcggtctctacggtggtggtgttcggcacgctggcgatgttcctgtacccggcgttgtatgcactggtgcagtcgcacggctggctggcaatggacgcgcggcagtacggcctgttcaccggtgcgacggtgcatgaagtggcacaggtggtggcggcaggccgcgcggtcaacgaagcagcggccgacacggcggtgatcaccaagatggtgcgggtgatgctgctggcgccgttcctggtcgcgctgtcgctgtggctggcgcgtggcggcaaggccagcgccgacggcagcaaggcgcgcatcgtggtgccgtggttcgcttttggtttcgtggcggtggccgggttcaactcgctgcatctgctgccggcgggcctgcaggcggggctggtgcagctggataccgtgctgctggcgatggcgatggccgcgctgggcctgaccacccacgtctcggcgctgcgccaggccgggctgaagccgctgctgctggcgctgatcctgttcgcctggctgctgttcggtggcctggcgatccatcagggtgtactggcggtgcttggctga

SEQ ID NO: 495512 - DNA, 1377 bp, Stenotrophomonas maltophilia
atgactgacttctcgaccctgccgctgagcccggccctgcagcccggcctggatgccctcggctacaccaccctcacccccgtgcaggcgcagagcctgccggccatcctcgatggccgtgatgtgatcgcacaggcacccaccggcagcggcaagaccgccgccttcggcctgggcctgctgcaggccatcgaccccagcctgatccgcgtgcaggcgctggtgctgtgcccgacccgcgaactggccgaccaggtcggcaagcagatccgcaagctggccaccggcatccccaacctgaagctgttgctgctggtgggcggcgtgccgctgggcccgcagctggcctcgcttgaaggccacgatccgcatgtggtggtcggcacgcccggccgcgtgcaggagctggcacgcaagcgcgcgctgaacctgggcgcggtgcgcacgctggtgctggacgaggccgaccgcatgctcgacatgggcttcgaggagccgatccgcgagatcgccggccgcacccatagggaccgtcagagcctgctgttctccgccaccttccccgacagcatccgcgccatggcgcgtgacctgctgcgcgacgcggtggaagtgaccgtggaaggcgccgaccaggcaccggccatccgccacctgttctgcgaggtggaaccggcgcatcgccagaaggcgctggccggcctgctgctgaagtacacgccggaatcggcggtcgtgttctgcaacacccgcaaggatgttgacgaagtggccaactcgctgcagcagttcggcttctccgcactggccctgcatggcgacatggaacagcgcgaccgcgaggaagtgctgctgctgctggccaaccgcagctgcaacgtgctggtggccagcgacgtggccgcacgtggcctggacgtggaagagctggcggcggtgatcaactacgaactgccgaccgacgtggagagctaccagcaccgcgtgggccgtaccgggcgcgccggtgccagcggcctggcgatcagcctggtggccggccgcgagaagacccgcgccgacgccatcgaagcgcagatggggcagccgctggactggcagaagacgccgctggcaacctcgcgcccggccgaactgccgcaggccgcgatgcgcacgctgcgcatcgacggtggcaagaccgacaagctgcgcccgggcgacatcctcggtgcgctgaccggtgatgccggcctgtcgagcaagttcatcggcaagatcgcgatcttcccgacccgctcctatgtggcgatcgcgcgtgagcaggccaacaaggccgtggccaagctggaagccggcaagatcaagggccgtcgtttccgcgtgcggatgatgtga

SEQ ID NO: 495513 - DNA, 537 bp, Stenotrophomonas maltophilia
atgaccgacgccatcgtcgctccgcagtgggcctcccgcctgcgcgacatcgccgacttccccaagcccggcatcctgttcaaggacatcatgccgctgctcgcccatggcgaggatttccgcggcgcgatcaccgcgatggccgaccgttggcgcgaccagaagctggacgcagtggtcggcatcgaatcgcgtgggttcatcctcggtgccgcgatggcgctggagctgggcgtcggcttcgtgccggtgcgcaagccgggcaagctgccgggccaggtcctgcgcgaagaatacacgctggaataccgcagcgactgcatcgaagtgcatgccgatgcgctgccggccggcgcccgcgtggtgatcatcgacgacgtgctggccactggcggcacgctggtcgctgcgctgtcgctggtgcgccgcctgggcgttgaagtggtcggcgccggtgtactggtcgagctggacggcctcggtggccgtgcgcgctgggaaacggacctgccgctgcacaccgaactggtgttctga

SEQ ID NO: 495514 - DNA, 993 bp, Stenotrophomonas maltophilia
atgagcctgttccgcccccgcatgctgctgtccgtcgccctgatcggcctgctggccggctgcggtggcgacccggtccgccccacgccgccgccggcgccgaccgtggtgccgcaggccaagccgatcaggatcggcatcgccctcggtggcggcgcggccaagggcttcgcgcacatcggcgtgatcaagatgctggaagccaacggcttcgagccggccgtggtctccggcaccagcgccggcagcgtggtcggtgcgctgtatgccagcggcatggacgccttccagatgcagagcaaggcagtcgcgctggacgaagccagcatccgcgacgtacgcctgttctccggtggcctggtgcagggccagaagctgcaggactacgtcaacgagcaggtcgccaaccgtcccgccgagcgcctgaagaaaccgttcgccgccgttgccacccagctggaaacgggcgagcgcgcgatcttcgtgcgcggcaacgtcggccaggcggtgcgcgcgtcgagcagcatccccggtgtgttcgagccggtgaagatcggcggccgcaattacatcgacggcggcgtggtcagcccggtgccggtggatgccgcgcgccagctcggcgccgacttcgtgatcgccgtggacatctccagcaaggccagcggcaaggcaccgacggacatgctgggcatcgtcaaccagtccatctcgatcatgggccagcgcctgggcgagcaggagctggcgcgcgccgacatcgtcatccgtccgaaggtactggacatcggcgccgccgatttcagccagcgcggcaccgcgatcctggaaggcgagaaggccgcaatggcggccatgccgcagatccgcgcgaagatccagcagttgcagcgcgcgcgcgccgccgcagcggcacccgcgccggtggccgcaccaaagtgcgaggaagcctcgcgcctgggcaagctgatgggccgcaaggacaagtgctga

SEQ ID NO: 495515 - DNA, 486 bp, Stenotrophomonas maltophilia
atggccggagaagtccagttcgatcgcacggatatacgtctactggctgaaatccagcgggatgggcgcgccaccaacgccgagctggcgacacgggtgaacctctcgccctcggcctgcctgcgccgcctgcagcggctggaaagcgagggcgtgatcgtcggctatggcgcgcggctggaaccacgccagctgcgcctgggcctgcaggccttcgtgcgcgtgcagctggaaaagcatgaccaggccgccatcggccacttcgtggacagcgtgcaagcgtgggacgaggtggtggcctgccatgcgctgaccggcgacatggactacctgctgcacgtctacgtgcgcgacctggagcacttctcgcacttcctgctggaccggctgctcaacgccggcggcgtggccgatgccaattccagcttcgtgctgcgaacggtgaagggtttccaggcgttgccgttgtcgcagctggagccctga

SEQ ID NO: 495516 - DNA, 894 bp, Stenotrophomonas maltophilia
atggacctcgcccagccccgccgcgtcgaacaccagcagaccgacaagggctacgtgccggtgtataccaccgcgctcgtcgagcagccgtgggacacctacagcgccgatgaccacgccacctggagcacgctgtaccagcgccagcgcgaactgctggtcggccgcgcctgccaggagttcctggacgcgcaggacgagatgggcatgagcgcacacatgattccgcgcttcgaccagctcaacgaagtactgggcgccgccaccggctgggccctggtcggcgttgaaggcctgctgccggaactggatttcttcgaccacctggccaaccgccgtttcccggtgacctggtggatccgtcgcccggaccagatcgactacatcgccgaaccggacctgttccacgacctgtttggccacgtgccgctgctgatgaacccggtgttcgccgactacatggaggcgtacggccgtggcggcgtcaaggcccacgcgatcggcccggatgcactgcagaacctgacccgcctgtactggtacacggtggaattcggcctgatcgatacgcccgacggcctgcgcatctacggcgccggcatcgtgtcgtcgaagggcgagtcgctgtactcgctggagtcgcccgcgcccaaccgcatcggtttcgacctgcagcggatcatgcgcaccaagtaccgcatcgacaccttccagaagacctacttcgtcatcgacagcttcgaacagctgatgcaggcgacgtcgccggatttcaccccgatctacgcggcactggccgaccaggcgcatctgccggccggcgaggtgcagggcgatgaccgcgtgttccagaagggcacgggtgaaggctgggccgacggcggcgacgtgtaa

SEQ ID NO: 495517 - DNA, 1041 bp, Stenotrophomonas maltophilia
atgagcgatgccgcgttgccggcatcgaaaggcaaggctgccacgatcaacgacatcgcacgactgtcgggagtttccaagaaaacggtttcaagaatcatcaacaactcgccgctggtgcgcaaagacacccgcgacaaggtcgaggcgttgatgcgcgaggtcggttacgtgcccgacccgctggcgcgcggactcgcgttccgccgctccttcctgatcggcctggtgtatgacgaccccggcgcccaatgcattgtcgacctgcagcacggcgcgctggaagcgctgcgcggcaccggctatgagctggtggtgcacccgtgcaacagccaggatccggactgtgcggacggcgtgcgccgtttcgtgcagcagcagaaactgcatggcgtgatcctcggcccgcgcgcctccgaatcgatggcgctggcgcagatgctcgacgcgatcgactgccgctacatccgcatcaacgcgcatgcgtcggaagaagacgtgcaggcggtggtcacccacgatcgcgatggtgcggcggcggctgcgggctacctgctctcgctcggccaccgcgacatcgcggtgattgccggtcccggtgaccggcgcgctgcccgcgagcggacccacggcttccttgatcggctggcccaggtcggcgtgaccctgccgggcgagcgcgtgctggaagcgggcgacaccttcgagtccggcgtgcatgccgccgaacgcctgctgatgggcggacaacgccccagtgcgatcttcaccggcaacgacgaaatcgccgcgggcgtctaccaggtggcattgcgtgcgggcatcgcggtgccgcagcagttgtcgatcgtcagctacgacgacagcccgctggcgtcgcggctgtggccgccgctgacgtcggtacgccgccacgtctccgacatcggccgcatggctgccgcgatgctggtgcagaccgacgtaccggaggcgccggctgcggccagcgtgcatccgcaactgatggtgcgcggttcctgccgggccgtggacggctga

SEQ ID NO: 495518 - DNA, 591 bp, Stenotrophomonas maltophilia
atggacctgcagacctctccgtttccgccgttccgtggccgcgaccggttgatcgctgcagtcgacgcggcggtgaccgccggtgatgccgggcgcatcaccgccgacctgcagctggcgctgcaggaagccataaccgacagccgcatcgaattgcccgaatgcgtgcatcggccggtcagtgatcattacgcgcgacgtccgctgtaccacagccgcgaacacggctacagcgtgatcgccatgagctggggcccagggcagggcacgccgctgcacgaccacgatgccatgtggtgtgtggagggagtgtggttgggcgaactggagatcacccgttacgagctgctggagcgcgccggcgagcgctggcgtttccaccgccacgccacgctgcgcggaggctgcggcagtgccggcagcctgatcccgccgcacgagtaccacaccctgcgcaacgccagcgacgacgcattggcgatttctgtgcacgtgtacgagtcgcagatggagcgctcggcggtgttcgacccgctcggtggcgactggtaccagcgccgcatccaggcgctgcaggccgacccggcctga

SEQ ID NO: 495519 - DNA, 639 bp, Stenotrophomonas maltophilia
atgtccagcgctgatccgcgcctgcgcgcgctgttgaagctggcaccggtgatcccggtgtacacccccgaagatgtgaatgaagcggtcgacgtcgcccaggcactgttccgcggcggcctgccggtaatcgaggtgacgctgcgcacgccgcaagcgctggatgcgatcaaggcgatggtggaggccgtgccggacgcggtgatcggtgccggcaccgtactcgacgccgcgcagatgcaggcagcaaagcaggccggcgcgcgcttcgcggtgtcccccggtgccacgccggcgttgtatgcggccgcgcgtgatgccgacctgccgtacctgcccggtgccgccaccgcctcggacctgatcctgggcctggagcatggccaggacaccttcaagttcttcccggcggtacagaccggcggcgccgcgctactggccgcctggcacggtccgttcgccgatgtgcgcttctgcccgaccggcggcatcagtgcgcagaccgcaccgcagttcctgcacctgcccaacgtgctgtgcgtgggcggttcgtggctgaccaccccggcactgctgcagacccgcgactgggaggcgatcgaacgcctggcccgcgaggcgtccgtgctggccagctga

SEQ ID NO: 495520 - DNA, 1029 bp, Stenotrophomonas maltophilia
atgaattcgaccatgaaggccgctgtcgtgcgtgagttcggcaagccactggtgatcgaggaagtctcggtaccacgcccgggggcgggcgaggtactggtcaggatcgaggcctgtggcgtctgccacaccgacctgcacgccgccgagggcgactggccggtgaaaccgaacccgccgttcatccccggccacgagggcgtggggcacgtcgtggccgtgggaggcggggtagggcacgtcaaggaaggcgacagggtcggcatcccctggttgtactcggcgtgtggccattgcgaacactgcctgggtgggtgggaaacgctgtgcgagacacagcgcaataccggttactcggtcaacggcggcttcgccgagtacgcactggccgatgccaactatgtcggcctgcttccgaaggacgtgggcttcgtcgagatcgcaccggtgctgtgcgccggcgtgaccgtctacaagggcctgaaggtcaccgacaccaagcccggcgactgggtggcgatttccggcatcggtggcctgggccacatggcggtgcagtacgcccgtgcgatgggcctgaacgtggctgcggtggacgtggacgacaacaagctggcattggcccggcagctcggcgcgcagatcaccgtgaacgcgcgtaccaccgatccggccgccttcctcaggaaggagatcggcggcgcgcacggcgccctggtcacggcggtctcaccgaaggcgttcgagcaggcgctgggcatggtccgccgtggcggcaccgtctcgctcaacggcctgccgcccggtaatttcccgctggacatcttcggcatggtgctcaacggcatcaccgtgcgcggctcgatcgtcggcacccggctggacctgcaggagtcgctgcagttcgccgccgaaggcaaggtcgcggccacggtcagcaccgaccgcctggagaacatcaacgacgtgttcgcgcgcatgcacgcgggcaccattgagggccgcgtggtactcgacttcgctgcctga

SEQ ID NO: 495521 - DNA, 393 bp, Stenotrophomonas maltophilia
atgcccggcctgctcaagaccctgttcctgtccatcgtcgccctgatcggcggcgtcctgtcgcttgcgctggtcagcagcgtcgccagctggctgcccccgttgctgggcctgtcgccggacaacaacagcgtgcagctgggctgggacctcaccttcagcgttcttggtggcatcgcgggcgtttcctttgccacctattacgccccctgctggccgcgttcgcatggcttctcgatctggtcgctgatcgcgctgggctgtggctacgcgatgtggacggccggtgcggatttcccgttctggttcgtcatttcgctgctgacatcgctgccgctgcaactgctggccggttggtggttcggccgtcgcgcctcgcgcgatccgcgctga

SEQ ID NO: 495522 - DNA, 2493 bp, Stenotrophomonas maltophilia
atgtcgctgcaccagtaccggcgcaagcgccggcttggcggaggcacagggcagacgccggagcctgacgacacacccgcacgcggtgatccgcagcggcggccaaccttcgtcatccagctgcaccatgccagttcgcgccactatgacttccgccttgagatggacggcgtgctgaagagctgggcagtgccgaaaggtccttcgcttcgcgtcggcgagaagcggctggccgtggaagtggaagatcacccgttgtcctacgctggcttcgagggcgacattcccgaaggccactacggcgcggggcacgtggaggtgttcgatcagggcacctgggcctgcgaaggcgatccactgcaggcgctggcagctggaaagatcgacttcgtactgcatggacaacgcctggccggtggctggaagctggtgcgcacggcaatgaagggacgccaggtgcagtggctgctgatcaagcgcgacgacgagcaggcgcgcgatgccgaagcagacgatctgctggatgcgcacgtgcccaagcgcgcatccaccgtgatgaagcgcactgaggggaaggcagggcgtgttgtgcccgccgcacgcacggctacccgcaaggccgatgcacgctggcatgcgcgcgcgctgaaactggacggtgcacgtgacgcgccctacccgcatgggttcaagccgcaattgaccgatcatcgcgacagcgcgccggacggcgcgcgttggctgcacgagatcaagtgggacggctatcgcctgctggccgatctgcacgacggcgaggtgaagctccgctcccgcaatggcctggattggaccgatgacttccccgaggtcgtgcaggctgtgcaggcgctgccggtgcgcgatgcgcgcctggacggtgagctggtggtgctggacaaggaagggcgcagcgatttcgcagcgttgcagcgcgtgatcgatggaagctcgaagcaaccgctgcgctacatcgtgttcgatcttccgggtgtggccaacgcggacatcagtcgtgcgccattgctggaacgcaaagcgctgctgaaggatctcatcggacccgtgcccggcatcctggccttcagcgaacacgtgatcgaccagggtccacaggtgttcgatgccagtggccaggcgggattcgaaggcatcgtcagcaagcaggtggacgcgccgtacgtgaacgcccgcgcacgcagctgggtgaaggtgaagcacgaagacaccgacgagttcgtgattgtcggctacacggcccccaggggctcgcgggtgggtttcggatcattgttgctggcaacgccggacaaggagggtctgcgctatgtgggccgcgtcggtaccggcttcgacgacgagaacctgcgcgcgctgctcaaggcattgcagccactggcagtaaagacgcccgtgctgcagcttccggcgcatgtgccgttccgcgccgccagcgtgcgctgggtgaagccggtgacggtggcggaagtggcgttccgtggctggggcaaggaaggcctgctgcgccaggccagtttcaagcggctgcgcagcgacaagcagaaggaggacctgggaatgagcaacgcaacagcagttgctgaagccgggggtgaggtccagatcacgcatccggagcgggtggtgtttcccaggcagggactgggcaaaggcgacgtggccgactattaccggcgcatggcgcgctggatcctgcccgaaattgccggacggccgctgtcattgctgcgctgccccgatggggtgggcaaggcctgtttcttccagaagcatcatggccccggcctgggcgacgcggtgcacgcggtgcccctgcagcagaagagcggccgcgaggactatgtctatatcgacgacgcacggggcctgctgcagctggtgcagatgaacacgctggagctgcatccgtggggtgcgaccgtagcagacaccgagcatccggatcgactggtattcgatctcgatcctggcaacggcgtcagctgggcacaggtgaaatcgggtgcacgtgatgtgcgtgatcgtctgcagcaggtgggcctggagagcttcgtgcggctgtctggcggcaaggggctgcatgtggtggtaccactgcagcccaaggctggctgggacgaggcgaaggcgttctgcgaggcctttgcgcaggcaatggcaaaggagcaacctgatcgctatgtggcgacgatgagcaaggccaagcgcagtggcgtcatcttcatcgactggttgcgcaacacccgaggagccaccagcgtgtgctcgtggtcgctgcgcgcgcgcgattccgccggtgtggcagtgccgctgcgctgggaggaactggcgcgtatcagtgctgccgacgcctttcccatgggcaaggcgctggcgagggcgcaacgcctgaagagtgacccatggcagggcatcacgcagttgaagcagacgctgccgtcgctgaagcggtag

SEQ ID NO: 495523 - DNA, 921 bp, Stenotrophomonas maltophilia
atggcccgcccgatctggaccggtacgctgtccttcggactgctcaatgtgccggtgtcgctgatgtccggcgaacgcaaggttgacctgcagttccgcatgctcgactcgcgcgatcgcaagccgatccgtttcgaaagggtcaacgccgacaccggcgaggaagtgccctggaaggacatcgtgaaagcctatgagtacgacaagggcagttatgtcgtgctggaggaaggcgacatccgctcggcggcgccggaaagccacgaagcggtggaggtggaatccttcgtggacgcagcgcagatcgacccgcgctactacgagaagccgtacctgctggtgcccggcaagaaggccgaaaagggctacgtgctcctgcgcgaaacgctgcgcagtaccggcaaggtaggcattgcccgggtggtggtgcgcacgcgcgagtacctgtgtgcggtgatgccgcatgcggacgcgctggtgctgatgatcctgcgctatccgcaggaactggtggatcccgaggactacaagctgcctgccggcaagctgtccgactaccgcatcaccagcaaggaaacggcgatggccgagcagttgatcgagtcgatgtccggcgattgggacccatcgcactaccacgatgaattccgcgagcgcctgcagcaggtgctgaacaagcgcatcaagtccaagggcggtaccacgcgggtggaagatgagcccgcaccacacgaggatgcgacaacgaacgttgtcgacttcatggcgttgctgcagaagagcctggatgcgaacaaacgcacgccggcgaagaaggccgcaacgcgcaaggcagctacaaagtcgacggtgaagaaggccgcaaagaagacaacgaagaaggctgcaaagaaggccgcaccacggcgcaaggcaggttga

SEQ ID NO: 495524 - DNA, 399 bp, Stenotrophomonas maltophilia
atgccccgtcttgaacgacccgcaccgtccgtgttcaacgccctgctcgatccgctcggccaacgtaccgcgcagcgccgcacgcgccgccatgaggatccgcaggcggtggcccaggactatctgcagtacatgctcagtgactacgaggaacgtcgcgggcaaagtcatcgcaactggcgtgacctgtgcccggtctatgccttcgcgttgacaacccatgctgccgactggccgcgcggcgacgctgccgatacctgcgaggaattggccgagcactgggaacagatgcgcgggcagtcgcggctgggctggtcgcaggcgcggccggtggtggaggacgcctggcgcgcgctggaccatattccggcggcggcggtgaggccgttgctgcagtag

SEQ ID NO: 495525 - DNA, 345 bp, Stenotrophomonas maltophilia
atgagccgagagacctcccgcgacccgctgcgcgcaaaccacccgcccattccgggcgagcagcgcggcaaacgcgatgccgacaacgccgactaccgtggcaccggcgcaccgttcttcgatgccgagcacgggagcgaccatctgccggtgaagcacgaggctgaacaggcagcgcaggaccgcaaggatggcggtgaccgccatcgcggtggccaggaaagcccgctcaagcgccgcgaacgcaagcagcgcgccagcgacaaccaggacgaagcgctggaggagaccttcccggccagcgacccgacatcgccgttcgtgccagccaaggcccccgactga

SEQ ID NO: 495526 - DNA, 2094 bp, Stenotrophomonas maltophilia
atgaatcccgccgcacgacgccgttgcctgccgctgtccgccctgctgctgtcgccttggacggcggtggccgagcctgcgcccaccgccctgcctgcggtgcaggtacaggccgcccgggtgccgggcatcgatccgttcgcgctgccggccagccaggacacggtctggatcgacgccagccgcgcgggcaccggtgcgcagctgtctgaggccttggccggggtccccggactgctggcacgtgaccggcagaacttcgcccaggacacgcagctgtcgattcgtggcttcggcgcacgctcgaccttcggcgtgcgcggggtgcgggtgctgatcgacggcgtgccggccaccatgcctgacggccagggccagctgtcgcatgccagcctgttgggcgccgagcgcatcgaggtgctgcgcgggccgttctcggcgctgtacggcaattcctccggcggcgtgctgcaggtctggagcgcgcagggccaggccggtgacccgtggcggttgcgcgtgaatgccggcgccgacaacacgctcagtgtcggcgcacagctcaagggtgccggcccagcgctggactacaacatcgcggccaaccacttccgcaccgatggctggcgggaccacagccgtgcgcgccgcgaatcgctcaacgcacgcattggtggtgatctaagcggtgggcggctggagctgctgctcaatgcgctggatgcccccgatgcgcaggatccgctgggcctgagccgtgcccaggtggcggctgatccgcgccaggccacggcagtcgcgcaccagtacaacacccgcaaatcggtgcgccagcagcaggctggcctgcgctggacccgggagaccggggcagagcgctggcaattgatgggctatgccggccaacgcacggtgacccaatacctgccgattccgccggcaccccagaccaacagcccgctgcatgccggcggcgtgatcgatctgcagggcgggtatggcgggctggacgcgcgctggggctggcacggcgacctcgccggccggccgctggacctggtggccgggctcagcgccgaccgccagcgccagcaccgcaccggctacgagaacttcgtgggcagcgccctcggggtgcgcgggcgcctgcgccgtgaccagatcgataccgtgcagaacgtggaccagttcgcccaggcctggtggcaatggagtccgcgctggtcgctgctggccggggtgcgccacagcgcggtgcgtttcgactcggacgatcgctacttcaccccccgcaacccggatgacagtggccaccggcgctaccaggcgaccacgccggtggcaggcgtcagcttcgaggccagcccgcagtggcgcctgcatgccgccgtggggcgtggattcgagacccccaccgtcaacgagctggggtatcgcgccgatggtcaggcgggtctggcgctggatctggcggccgcccgcagccgcagcctggagctaggcagcaagtggcacgcacaggatggaactcggctcgatgtcagcctgttccgtgcagataccgacgatgagctggcagttgcaagcaacatcggcggtcgcagcacgtatcgcaacatcggccgcacccgccgccagggtgtggaactgcagtatcgccagccgctggccgagcagctggagctgcagctggcgtggacctggctgcaggcgcaggcgcgttcgccgtacctcacctccaacaccctggttgccgccggcagccgcctgcccggggtaccgcgccagcaggcctttgcccggctgcaatggtcgcccggccagtggcagtgggcgctggaggcctccgccggcagtgataccgtagtcaacgacgtggcgaccgaacgcgcgcccggcttcgccctgctgcatctggaaggcggccgtcgctgggccctgccgggtggcgagctgcgcgccttcgcccggatggagaacgtgctggaccaggcctacataggctcggtgatcgtcaacgatggcaacgggcgcttctacgaaccgggaccgggacggcgggccaacgtcggcctgcaatggtcgtggcgttga

SEQ ID NO: 495527 - DNA, 1203 bp, Stenotrophomonas maltophilia
gtgtccttctttgcaaacgtggaactggtcccagtcgacccgatcctgggcctgaccgaggcgtacaacgccgacagccgcccgaccaaggtcaacctgggtgtgggcatctactacgacgagagcggccgcattccgctgctgcgcgccgtcaagcagatcgagcagcagctcgccgctgaagccaaaccgcgcggctacctgccgatcgatggcctgccggcgtacacgcaggcgacgcgtgagctggtgttcggcaaggattcgccgctgctggccgccggccgcgtgaccaccgcgcagaccgttggtggcagcggtgcgctgcgcgtcggcgccgacgtgctgaagaagctgctgccgcacgccaccgttgcgctgagcaacccgagctgggaaaaccaccgtgcggtgttcagcgccgccggtttcgaggtgctggattacacctacttcgacccgggcacccatggcgtcgatttcgacggcatgctggccgacctgggcaagctggaagccggcaccgtggtgctgctgcacgcctgctgccacaaccccaccggcgctgacctcacggtcacccagtggaagcaggtcgcgcaactgctgaaggacaagcagctgttccccttcatcgacatggcctaccagggcttcgacaagggcatcgagcaggacggcgcagcggtgcgcatcatcgccgaagccggcatcgacagcttcatcgtcgccaactcgtactccaagtcgttctcgctgtatggcgagcgcgtgggtgcgctgtcgatggtggcgccgaccgccgctgacgccaaggccgtgcaatcgcaggtcaagcgcgtgatccgcaccatctactccagcccatccacccacggcgctgcactggtggccggcgtgctgaccaacccggaactgcgtgcgatgtgggagcaggagctgaccgagatgcgcgagcgcatccacgccctgcgccacggcctggtcgagaagctggccgctgccggtgcaccgcagttcggtttcatcaacgagcaggccggcatgttctcctactccggcctgagccgtgagcaggtcgagcgcctgcgcgacgagttcggcatctacgccgtcggcaccggccgtatctgcgtggccgcgctgaaccagaacaacctggaatacgtcgccaaggccgtggccaccgtcgccaagggctga

SEQ ID NO: 495528 - DNA, 1017 bp, Stenotrophomonas maltophilia
atgtcccgtacttcgttgacccgcttcctgatccaggaacagcacgccggccgcatcaatgccgacctgcgccagctgatcgcggtcgtcgcccgcgcctgcaccagcatctccatcgccgtcagcaagggcgccctcggtggcgtgctcggcgacgccggtaccggcaacgtgcagggtgaagcgcagaagaagctcgacgtcatcagcaacgagatcctgctcgaagccaacgcctggggtggccacctcgccgcctgcgcctcggaggaaatggaccacagccagccggtgccggacatctatccccgcggtgatttcctgctgctgttcgatcccctcgatggcagctccaacatcgacgtcaacgtctccgtcggcaccatcttctccgtgctgcgctgcccgaccaatgtcgagctgccgggcgacgacgccttcctgcagccgggcagcaagcagatcgccgccggctactgcatctacgggcccagcacccagctggtgctgaccgtcggccatggcacccacgccttcaccctggaccgcgagaagggcgagttcgtgctgaccaccgagaacatgcagatcccggcggccacccaggaattcgcgatcaacatgtccaaccagcgccactgggaagcgccgatgcaggcctacgtcggcgacctgctggcgggcaaggaaggcgtacgcggcaagaacttcaacatgcgctggatcgccagcatggtggccgacgtgcatcgcatccttacccgcggcggcatcttcatctacccgtgggacaagaaggacccgtccaaggccggcaagctgcgcctgatgtacgaagccaacccgatgggcctgctggtcgagcaggccggcggtgccgcctggaccggccgcgagcgcatcctcgacatccagcccgaccagctgcaccagcgcgtgccggtgttcctcggttcgcgcgaggaagtggccgaggccgtgcgctaccaccacgcacacgacgacgcacagggctga

SEQ ID NO: 495529 - DNA, 708 bp, Stenotrophomonas maltophilia
atgcacgagcagggcccggtcgatttcatcgaagtcatccacaacgccgtccccagcgaggtctgcgcggcgatcgtcgagcgcatgcgtgccacgcgtggcctgctgcccggtgcggtgggcagtggcgtgttcccggaactcaagcacagcaaggatctgcgcatcagcggcctggacggctggcaggatgttgatcagcagctgcagattgcggtgttcaacggcctgctgacttatctacgccgttatccacaggcgttgatcgccccactgatgttgcagatccaggacagcaacggccaactgcgacgcctgtctgccgaggacttccccgacatgccgcagcagcagctggccgacctggcccgcacctgcctgcgcccgggtgcgatcaacctgcagtggtatgcggcgggcgagggcggctacccgtactggcactgcgagctgtacccgaaggatgcgcaggccgagacactgcaccggcatgtgctgtggacgctgtacctcaacgacgactttgacgaaggtgaaaccgagttcctgttccagggccgcaagatcgcgccgcgtaccggcagcctgctgatcgccccgacggcgttcacccacacccatcgtggcaaccggccgcagggtggcgacaagttcatcgcgacgagttggatcctgttccagagtgcgcagaagttgtttggggggtaa

SEQ ID NO: 495530 - DNA, 1092 bp, Stenotrophomonas maltophilia
atgggtattgcgatcaagggccgaggttccacgtcccaccttgccgggcgctttgaaagcaccgtcagcgagacggtggacgacggctgggcggtcgacgaaagcgaagagttcctcgccccgcgcctgcgcaccgaagtacgcgccgaaaccgcgcgcagcatcatcacccgcaacaactcgcccgacgtcggcttcagtcaatcggtgaatccctaccgcggttgcgagcacggctgctcgtactgcttcgcccgcccttcgcatgcctatctgaacctgtcgccggggctggacttcgagaccaagctgttcgccaagaccaatgcgccgcagctgctgcgcaaggaactgtcgaaaccgggctatgtgccgcagccgatcgcactgggcatcaacaccgatgcgtaccagccgatcgaacgcaagttcaagctgacccgccagctgattgaagtgatgctggagacccggcatccgttctcgctgatcaccaagaacgcactggtcgagcgcgacatcgatctgctcgcgccgctggccgcggagaacctggtcagcgtgcacttctcggtgacctcgctggacccgcatctttccgcgaagctggaaccgcgtgcatcagcgccacatgcacggctgcgcgcgatgaagcgcctgcatgacgccggcattccggtcggtgtgatggtggcgccggtgattccctggatcaacgacagcgagctggaagccgtgctggaggctgcgcacggcgcaggtgcgagcaccgccggttacgtgctgctgcgcctgccgctggaagtggcaccgctgttccgcgactggctggatacgcaccatcccgatcgcgctgcgcacgtgatgagcaccatccagcagctgcgcggtggcaaggactacgacagccagttcggcacgcgtatgcgtggccagggcgtgtatgccgatctgttgaacaaccgcttcaagctggcacgcaagcgtctgggcttcaatgcacagaacagccattggccgaagctggattgcagccgtttccagaagccgctgccgccgaagaaggagtcgccgcagggctcgttgttctga

SEQ ID NO: 495531 - DNA, 744 bp, Stenotrophomonas maltophilia
atgacccagctcagcgtcaacgtcaacaagatcgccgtcctgcgcaattcgcgcggcggcgccgaaccggacgtggtgcgcgccgcccaggcctgcctggatgccggcgcgcatggcatcaccgtgcatccgcggccggaccgccggcatatcaccgccgaggacgtgctggccctgtccacgctgacccgcgcgcgtggcgttgaattcaacatcgaaggcaatccgttcgcgccgccgcgcgagggctacccggggctgctgccgctgtgcgaacagacccgtccggcgcaggccaccctggtccccgatgatgatggccagatcacctccgaccacggtttcgacttcgaacgcgatgccgagcgcctgcgtccgctggtggctgcgctgaaggccatggggtgtcgggtcagcctgtttgttgacgcgggcaacccattgctggagcaggcagccgaggtgggggcggaccgcatcgagctgtataccgggccctatgcagaggcgcatgcggcgggcgatgccgatgcgatgctggcgctgttcgccactgctgcccgacgagcgcaggccgtcggcctgggtgtcaatgctggccacgacctgtcgcaggacaacctgcgcgacttcctggcccacgtgccggaggtgctggaggtgtcgatcggtcatgcgctgatcggcgaggcactgtatgacgggctggatgccaccgtgcgcgggtacctggcgctgctctga

SEQ ID NO: 495532 - DNA, 270 bp, Stenotrophomonas maltophilia
atgtactggttgtacctgctgctggcgctgagctgctttgccttcgccctgaagaccccgagcgcggggttgatgaccctgtgcctgctggcggcgctcggcttcctgctggcctgggtgcgcggccgctacgtggcccgcttcggtgacctgcagcgcgacccggccacgctgatcgatgccgaggagctgcgccgcctgcgcgaacaggcccaggtccgccgcactgacgaccacaacgaccacgacccgtcccctctttccaagtag

SEQ ID NO: 495533 - DNA, 1461 bp, Stenotrophomonas maltophilia
atgctcgccctcttcgactccctgcgccattggctcgacggcatcgcccacctcggcacgatcctggcggtggcctacctgctctacctgttcgcgctggcgggctggatcatgctgcagaagcgcgagccggtggccacgctgagctggatcctttcgctggcactgctgccctacctcgggctcttcatctactacctgctggggccgcagaaggtgaagcggcaacggctgcgtcgtggccgtgcacgctcgggcatggagcactacagcgatgtctgcccgcccgattcggactgcaccgagctggccaaggttgcccaggccaccaccggactggcgcccagcagtgccaccgaggtgacctggctggtcgacggcgcagccacctatgccgcgctgcacgacgcgatcgcgcaggcgcgcgaccacgtgcacctggagtactacatcttcaaccccgaccatgccggcaccgcactgcgcgatgccctggtcgaacgtgcgcaggccggtgtgcaggtgcgcctgctgctggatgcggtgggctcttccgccctgccccggcgcttcctgcagccactgctggacgccggcggcgaagcgatctggttccatccgcgacagctgctgaagccgttcaagcgcccgtggctgaacctgcgcacccaccgcaagctggtgatcgtcgacggtcgcctcgccttcaccggcggcatcaacatcactgacgaggaagacgagagccgcaggcccgacgcttaccgcgacctgcacatgcgtatccgcggccacgtggtgcgcagcctgcagctggtgttcgccgaggactggctctatgccagtggccaggaccactcgcgtttcgacatcgcccgcctgtggccggccgacatgccgctgcgtgcggatggatcgatcagcgcccaagtgctggtgtccgggcccgactcgggctgggagaccatccaccgcctgcacgtggcggcgatccaggaagcacacgagcgcgtgtggctggtgacgccctacttcgtgcccggtgaagcagcgaggatggcgctgacctcggccgcgctgggcggcctggacgtgcgcctgctggtgccgaagatgagcgactcctggttcgtcacccaggccgcacggtcctacttcgacgaactgctgcacgcgggcgtgaagatctacgagtacggcccgcgcatgctgcataccaaggcgttcatcgccgacgacgatgtctgcatcgtcggcagcgccaacttcgaccaccgcagcttccggctgaacttcgaactgtcgatgatgatcagcgaccgtgaccgcgtcgctgcactggccgaactgctgcagggcgaattcgaccgttccacgcgggtgcacgaccaggccggccgctcgctgtggctgcaccgcctgcccgaggccttcgcccggctggcctcgccgctgctctga

SEQ ID NO: 495534 - DNA, 414 bp, Stenotrophomonas maltophilia
atggcattcagtagtggtggtggcaagggccccatggcagacatcaacgtcacgcccctcgtggacgtgatgctggttctgctgatcatcttcatcgtgaccgcgccgatcatgacgtacccgatcgccgtggacctgccgcagcgcgtgctcaacccaccgccgcagctggtcgaaccgccgccgccgatcgaactgaagatcgacgccagcaaccaggtctcgtggaacaacagcccgatcaataccagcgagctgcagcagcggatggagcaggaggtccagcgtgacccgaccaaccagccggaactgcgcatcgacgccagcccggattccgagtacgacgtgatggccaaggttctggccgccgcgaagaatgctcagatgaagaagatcggatttgtgcagcagtaa

SEQ ID NO: 495535 - DNA, 426 bp, Stenotrophomonas maltophilia
atggctttcagtagtggtaacagcggcggccccatggccgacatcaacgttacgcccctcgtggacgtgatgctggtgctgctgatcatcttcatcatcacggcgcccctgatgtcccacaaggtcaaggtggatctgccggaagccaacctgatccagaagccggaagatgctgaaaagcgtccgaacccgatcacgctggcagtcaaggaagacggctcgatctactggaacgacgaagaaatcaacaagcagactctcgagtcccgcttggcgaccgccgcacagcagaccccgcagccgccgctgaacctgcgtggtgaccgcaccaccaagatgcgcgtcatcaacgacctgaccaaggtcgcgcaggaacagggcatgctggacgtcggcttcgttgcgaccaaagaaaaggggcaataa

SEQ ID NO: 495536 - DNA, 762 bp, Stenotrophomonas maltophilia
atgctgcaggaaattttcatcgccgctgctgccgggggcaatccgtccaacgccctgtcgcagatgggcttcgagcacctgatccacgaaatgaccaccaagccgggtgatttcgcggtttcctgggtcgtgctgctgaccctgatcgccatgtcggccatgtcctggtactggaccgtcatcaacatcttccgtgccacccgcctgaagagcgccgctgaccgcgtcgtcagcctgttctgggacaccccgaacgcgcaggacgccatccgtgcgatggaagagcagccggcttcggagccgttctcgaagatcgccctggacgctgcccaggccgctgctcaccaccagcgcgctgaaggcggtgctaccggcggcgtcggtgagaacctgagccgttcggagttcgtcgaccgcgctctgcgccaggccgtcacccgcgaaagcaacaagctgcagtcgggcatgacgctgctggccaccgtcggcgcgaccgctccgttcgtcggtctgctgggtaccgtgtggggcatctacggcgcgctgatcaagatcggtgccaccggctccgcttcgatcgacgccgttgccggcccggtgggtgaagcgctgatcatgaccgcgatcggtctgttcgtcgcaatcccggccgtgttcgccttcaacttcttcagcaagatcaacagcgcgaccatcagcaagttcgataccttcgcgcacgacctgcacgacttcttcgccaccggttcgcgcgtccgctaa

SEQ ID NO: 495537 - DNA, 669 bp, Stenotrophomonas maltophilia
atgacggaacaactagtcgttcaccggtacgaacaacccgatgacaaggggctgagctggcctcgcatcgtcggcatcgcgtttgtaattgccctgcatctggccgccttcatgatgctcctcattcccgccgtggctcccaaggccgtcgcggagaaggagcgcaacgtcatggtgaccatcgtcgacgcgccgccgccgccccctccgccgccgccgccgccgccgccgcaggatactccgccaccgccggtgaagaatctgtcgccgccgaagccgtcgcccgtaccgccgccgccgcaggcgccggtcgtggacgtgccggagccgcgcccgaacgatatcgtcaccccgccgtcgcccccgtcgccgccggctccgccgacctcgatcgaggccagcgtggacatctcgtcgaaggccatgaatccgccgcgctatccgccggccgccttccgcgcgggtatccagggcgaagtgatcctgatcattgatgtcgatgccaacggcaacgtcaccaatgtcacggtggaaaagtccagccgtaaccgcgacctggaccgtgctgcgatggaagcagctcgcaagtggcgcttcaacgccgctgaatctggcggtaagaaggcggcaggtcgcgttcgcgtcccggtcaactttgcgctgaactga

SEQ ID NO: 495538 - DNA, 1194 bp, Stenotrophomonas maltophilia
atgattttccgtaaccacaaagctgtgctttccgtcctcgtcgcgaccgccctgaccggcgccgtggtcaccgatgcctttgcgcagtcctcgcgttcctccgaccgtggcagccgcggcggtagcagcaagcaggccaaggccgaaccgctgtacccgaatgcgacccgccaggagccgaccgccaaggcctcggccaagatgggcagcaagctgcagaaaatgatcgacagctacaacaaggaaaagttcccggagacgcgcgaacaggctgacgcgatcctggccgacagcgcttccaacgagtacgacaagtcgctggccgcgcagctggcctcgcaggccgcctaccagaccgacgacgtgccgggcgccatcgcgtacctgaagcaggtgatccagttcaacggcctggacaacaacggccacttccagtcgatgctgatgctgggccagctgcagctgcaggaagacaagaccgccgaaggcctggccaccctggacaagtacttcgcagagagcaagtcgaccaagccggaagagctgatcgccaagggccaggcgctgtaccagctggagcgctaccaggaagcgatcccggtgctgaagcaggccatcgccggcgccgccgaaccgaaggacaactggaaccagctgctgatggcggccctgtccgaagccggccagaccggtgaggccgtgcaggccgcagaagcgctggcggccaagaacccgacggacaagaaggcccagctgaatctggccaacatgtacatgcaggctgaccagatgccgaaggccgccgcggtgatggacaagctgcgcagcagcggccagctcaccgaagagcgcgagtacaagcagctgtactcgatctatgccaacaccgagaacaaggaaaaggacgtcatcgcggtcatcaacgaagggttgcagaagggcatcctgaagccggactaccaggtctacctggcgctggcccagtcctactactactccgaccaggtgccgcaggcgatcgatgcgtggcagaaggctgccccgctctccaaggacggtgagacctacctgaacctggcacgcgtcctgcatgccgaaggtcgcgtccccgaggccaagcaggccgcccagcaggcgctggcgaagggcgtgaagaaccaggcggatgccaaaaaaatcatcaacctgaagtaa

SEQ ID NO: 495539 - DNA, 807 bp, Stenotrophomonas maltophilia
atgaaacaactgctgctggctctagtcatcaccaccgtggtcagtgcctgtgcgaccaccacctcgccaaccggaagacggcagatggtgggcggcgtatcgcaggcacagcttgaccagctcggcgcgcaggcgtttgccgagaccaagcagaaagagaagatcagcaccgatggccgccagaacggctacgtgcagtgcgtggtcaacgcgttggtcgcgcagttgccgcctcagtaccgtggcgtacggtgggagaccgccgtgttcgtcgacaaggaaccgaacgcctttgccctgcccggcggaaaagtgggcgtgaacaccggcattttcaccgtcgccaagaaccaggaccagttggctgccgtgatcggccatgagatcggccatgtcatcgcgcgtcaccacgaagaacgcatcacccggcagatgggcgcgcagaccggcctggccgtgctgggcgcgctggccggtgccgcctatggcgatggcgccgccagcacggtcaaccagctgggtgggatgggcgcgcaggcggccttcctgctgccgggttcgcgcacgcaggaaagcgaggcagacgtgattggccagcggctgatggcgcaggctggattcaacccggcccaggccgtggacctgtggcagaacatgatggccgccagcggcggtcgcagcccgcaatggctgtccacccaccccgatccggccaaccggatccaggagctgcgacgtgatgcaccgggcctgacgccggtctaccagcaggcgcaggcggccgggctgcggccaaagtgcggatga

SEQ ID NO: 495540 - DNA, 849 bp, Stenotrophomonas maltophilia
atgtccgcatccgccccggtctccgccgctccgcctccggttccgccgccgtctaccccgccgcgcgccgtggcaccgttggcaggtttcttcatcgacctgggcatcgccgccgtcaccctggtcggcctgagcatggtcaccggactgttctggggcttctaccgtgcgatcgtggtcagccgcgccaacgtcgcggccaatggcggtgcactcacacctgacagcgccggcgcggcagtgggccagcccggggccctggcccagatcctgatggccctgatcgccaccggtggtgccgcgctgctgctgtacttctggcggcgcccggcgaacgccggcgaacgcctggcctcgcgacaggcgctgcagcgtccttccacctggggctggaccctgctggtggccacgctgatcgtggttggcagcaacggcgtcgccttcctttccaagcagttcggcatcgagccggtgccgaccaacgtggaactgatgcagagcgcgatcgcgcgcttcccgttgttcctggtgctgtttgcggtcgtcctcgcccccgcctacgaagagctgctgttccgtcgtgtcctgttcgggcgcctgtggcaggccggccgcccctggctgggcctcatcctcagcagcctggcgttcgccctggtccatgaagtgcccggtgtcagcaagaactcgctgctgggcatggcgcagctgtggctggtctacggcggcatgggtgccgccttctgctggctgtaccgccgcaccggcaccctgtgggcggcgatcacggcgcatgcgctgaacaacgcggtggcgctcgccgcaatggtgttcctggggtcaacgtaa

SEQ ID NO: 495541 - DNA, 2460 bp, Stenotrophomonas maltophilia
atgagcgacgaacagaacaccccggcaaacaacggcaattacgacgccaacagcattaccgccctggaaggcctggaggctgtccgcaagcgtcccggcatgtacatcggcgacgtgcatgacggcaccggtctgcaccacatggtgttcgaggtcgtcgacaactcgatcgacgaagcgctggccggccacgccgaccatgtcgcggtgacgatccacgccgacggctccgtctcggtgtccgacaacggtcgcggcattccgaccggcaagcacgagcagatgagcgccaagctcggtcgcgaagtgtcggccgccgaagtggtgatgaccgtcctgcacgcaggcggcaagttcgacgacaacagctacaaggtgtccggcggcctgcacggcgtcggcgtcagcgtggtcaacgcgctgtcgcagaagctgctggtggacgtgttccagaacggcttccactaccagcaggaattcagcaacggcgccgccgtgaccgcgctggccaagctggaaaccaccaccaagcgcggcaccaccgtgcgcttctggccgtcgacggtcgccttccacgacaacgtggaattccactacgacatcctggctcgccgcctgcgcgagctgtcgttcctgaactccggcgtcaagatcgtccttgccgacgaacgtggcgatggccgccgtgatgacttccactacgaaggcggcatccgcagcttcgtggagcatctggcccagctgaagaccccgctgcacccgaacgtcatctcggtcaccggcgagcacaacggcatcgtcgtggatgtggcgttgcagtggaccgactcctaccaggagacgatgtactgcttcaccaacaacattccgcagaaggacggcggcacccaccttgccggcttccgcggtgcgctgacccgcgtgctcaacaactacatcgagcagaacggcatcgccaagcaggccaagatcaacctgaccggcgatgacatgcgcgaaggcatgatcgcggtgctgtcggtgaaggtgccggacccgagcttctccagccagaccaaggaaaaactggtcagctccgacgtgcgcccggcggtggaaaacgccttcggcgcgcgcctggaagagttcctgcaggaaaacccgaacgaagccaaggcgatcgccggcaagatcgtcgacgctgcgcgtgcacgcgaagcggcgcgcaaggcccgcgacctgacgcgccgcaagggcgcgctggatatcgccggcctgccgggcaagctggccgactgccaggaaaaggacccggcgctgtccgaactgttcatcgtcgagggtgactcggcaggtggctcggccaagcagggccgcaaccgcaagaaccaggcggtgctgccgctgcgcggcaagatcctcaacgtggaacgcgcacgcttcgaccgcatgctgtcctccgaccaggtgggtacgctgatcacggccttgggcaccggcatcggccgtgacgagtacaacccggacaagctgcggtaccacaagatcatcatcatgaccgacgccgacgtcgacggcgcccacatccgcaccctgctgctgaccttcttctaccgtcagatgccggagctgatcgagcgcggttacgtctacatcggcctgccgccgctgtacaagatcaagcagggcaagcaggagctgtacctgaaggacgacccggcgctggacagttacctggccagcagtgcggtggaaaacgccgcgctggtgccggccaccggcgaaccgggcatcgaaggcctggcgctggaaaagctgctgctggcctatgccgccgcgctcgattccatcgaacgcaatgcccaccgctatgaccgcaacctgctcgaagcgctggtcgatttcgtgccgatggacatggacagcctgcgcaatgcgggcgaaggcgaaggcctggatgcgctggccaagcgcctcaaccagggcagcctgggcagcccgcgtttcagcctggaactgcaggaggccaacgaggagcgccccgccgccgtgctggtgacccgtcgccacatgggcgaggagcacatccaggtgctgccgctgtcggcgttcgaaagtggcgaactgcgcgcgatccaccaggcctccaagctgctgcacgggctggtgcgcgaaggtgcaacgatttcccgcggcgccaagtcgatcgaagtcgacagcttcgcgaaggcgcagaactggctgctcgaggaggccaagcgcggccgccagatccagcgattcaagggtctgggtgaaatgaatccggagcagttgtgggataccacggtgaacccggagacccgtcgcctgctgcaggtgcgcatcgaggatgcggtcgctgccgaccagatcttcagcaccctgatgggcgatgtggtcgaaccgcgtcgtgacttcatcgaagacaatgcgctgaaggtcgccaacctggatatctga

SEQ ID NO: 495542 - DNA, 1095 bp, Stenotrophomonas maltophilia
atgcttatccgccgcctcgccctgcaccaactgcgtcgcttcaatgcggtggagctgtcgccccagccgggattgaacctgctgaccggcgacaacggtgccggcaagaccagcgtgctcgaggccctgcacctgatggcctatgggcgcagcttccgtggtcgtgtccgcgatggattggtgcgccagggccaggaagcgctggaaatcttcgtggaatgggacgaacaacgtgccaatcacccgccgcaccgccgaaaggccggcctgcggcacagtggccaggattggaaggggcgcctggacggcgaagacgtggcccagctcggcaatctgtgcgcagcgcttgcggtagtcacattcgagccaggcagccatgcgttggtcagcggtggtggtgaaccccgccgccgattcctcgattggggcttgttccacgtggaacctgatttcctgtccctgtggcgccggtattcgcgggcactgaaacagcgcaatgccctgctcaagcaaggtggcccgtcgcggatgctggatacctgggatcacgaactggctgaagccggcgaaccgttgaccagccgtcggcagcactacctggagcgtctgcagcagcgcaccgtggcgctggcttccagcctggccccgcagctcggcatccaggcactggaactcagcccgggctggcgtcggcacgagctccctctggccgatgcgctgcttctggcccgggaacgtgaccgccaggccggatacacctcggtcggtccgcaccgggcagactggagcgtggatttccacagcattccgggtcgcgatgcgctgtcccgcggccaggccaagctgacggcattggcctgcctgctggcgcaggccgaggactacgcggaacagcgcggcgaatggccggtgatcgcattggacgatctggcctcggagctggatcgcacccaccaggcgcgggttctgcagcgtctgctcggtgggccggcgcagatcttcatcaccgccaccgaaacgccggcggcgctgcaggaactgacccacatcgcccggttccacgtggaacatgcacagatcgtggctgtgccatag

SEQ ID NO: 495543 - DNA, 1101 bp, Stenotrophomonas maltophilia
atgcgtttcacactgcagcgcgaagcctttctcaagccgttggcacaggtcgtcaacgtggtcgaacgccgccagacccttccggttctggccaatttcctggtccaggtgcagaacggccagctgtcgctgaccggtaccgacctggaagtggagatggtgtcgcggatcgcggttgaagatgcccaggacggcgaaaccaccattcccgcccgcaagctgttcgagatcatccgcgccctgcccgacggcagccggatcaccgtctcgcagaccggagacaagatcaccgtgcaggccggtcgcagccgtttcaccctggccacgctgccttcgaacgacttcccgtcggtggatgaagtcgaagccaccgagcgcgtggccatcggtgaggcgaccctgaaggagctgatcgagcgcaccgcgttcgcgatggcccagcaggacgtgcgctactacctcaacggcctgctgttcgacctgcgcggcgatgccctgcgtaccgttgccaccgacggccaccgcctggcgctgtgtgaaaccgatctggccaagcccagcgggtccaagcgccagatcatcgtgccgcgcaagggtgtgaccgaactgcagcgactgctggaaagcggcgatcgcgagatcgagctggaagtcggccgcagccacgtgcgcgtcaagcgcgacgatgtcacctttacctccaagctgatcgacggccgcttcccggactacgaagcggtgattccgatcggtgccgaccgtgaagtgaaggttgatcgcgaagcgctgcgcgcctcgcttcagcgcgccgcgatcctgtccaacgagaagtaccgcggcatccgcgtggaagtctcgccgggcaacctgaagatcagcgcgcacaacccggaacaggaagaagcccaggaagagatcgaagccgataccacggtcagcgatctggccattggcttcaacgtgaactacctgctggatgccctctccgccctgcgcgatgaggaagtcatcatccagctgcgcgattccaactcctcggcactggtgcgtgaatccagcagcgagaagtcgcgccacgtggtgatgccgctgcgtctctga

SEQ ID NO: 495544 - DNA, 1332 bp, Stenotrophomonas maltophilia
atggatgcctggtcccgtagtctcgagcgcctcgaagcggagttcccgccggaagacgttcatacctggttgaagccgctgcaggccgatctgcgcgtggacagcctggtgctgtatgcaccgaatgccttcatcgtcgaccaggtccgcgagctgtacctggcccggatccgcgagctgctggcgcatttcgccggtttcagcgacgtttttcttgaaatcggctcgcgcccgcgccctgtggaggcgcagaacgcgccggtttccacgccgtcggcgcatgtgtccagcgaaccgcaggtgcccttcgccggcaatctggacagccactacacgttcgccaacttcgtcgaaggccgcagcaaccagctgggcctggccgccgccttccaggcagcgcagaaaccgggcgaccgggcgcacaacccgctgctgctgtacggaggcacgggcctgggcaagacccacctgatgttcgccgccggcaacgccatgcgccaggccaatccaggtgcaaaggtgttgtacctgcgttcggaacagttcttcagcgcgatgatccgggccctgcaggaaaagaccatggatcagttcaagcgccagtttcagcaggtggatgcgctgctgatcgatgacatccagttcttcgccggcaaggaccgcacccaggaagagttcttccacaccttcaacgcgttgttcgatggcaagcagcagatcatcctgacctgcgaccgctatccgcgcgaagtcgagggcctggaagcgcgcctgaagtcgcggcttgcctggggcctgtcggtcgcgatcgaaccgccggacttcgagacccgcgccgcgatcgtgctggccaaggcgcgcgaacgcggtgccgagattcccgatgatgttgcgttcctgatcgccaagaagatgcgctccaacgtgcgcgacctcgagggcgcgctgaataccctgaccgcccgcgccaacttcaccggccgcgcgatcaccaccgaattcgcccaggaaaccctgcgcgacctgctgcgcgcccagcagcaggcgatcagcattcccaacatccagaaaaccgttgccgactactacggcctgcagatcaaggatctgctgtcgaagcgtcggacccgctcgctggcccgtccccgccaggtcgccatggccctgaccaaggaactgaccgagcacagcctgcccgagatcggcgacgcctttgccggtcgcgatcacaccacggtgctgcatgcctgccgccagatccggaccctgatggagaccgacggcaagctccgcgaagactgggacaagctgatccggaagctgagcgaatga

SEQ ID NO: 495545 - DNA, 141 bp, Stenotrophomonas maltophilia
atggccacgaagcgcacctaccagcccagcaacctcaagcgtaagcgcgaccacggcttccgtgcccgtatgaagaccgctgacggccgcaagatcctgtcgcgtcgccgcgccaagggccgcaaagtcctgagcgcctga

SEQ ID NO: 495546 - DNA, 495 bp, Stenotrophomonas maltophilia
atgccgcaccccgcggcagacgcaatcccttcgacagtgaatactgcagacccgcgcaagcgattccctcgctctgcgcgggttcgcacgcgtgccgaatattcaacggtcttcaacggcgcccgccgtgtgtccgatccgctgatgaccctgcactggctgccggctgaccggccggccaggctgggtctggcggtttcccgcaaggttgatccgaacgccgtggggcgtaaccggatcaagcgcgtcctgcgcgacatcctgcgtcagacacgtaccgaaatccagccaggcgacttcgtcgtcgtggcgcgtagtgctgcgcgttccgccagcaacgacgagatccgccaggccttcctgcgcctgctgcgtcgcctgcgtgcattgcccgcgccgggcgtggacggcacaatgccgccgcctgatggcatcgcaactccttctttgaccgagccggcatcgcgtcccggccccgccgagcctgtccgctga

SEQ ID NO: 495547 - DNA, 1716 bp, Stenotrophomonas maltophilia
atgaaccagacccgcgtattcctcatttttgcctggctgatggtggccgtgctgctgtggatggagtggagccgtgaaaaggctgctccgaccccggcaccgacgaccacgtcggccccggctgctgcacagagtgttccgggcgcgaccccgggcagcatccccagcgcgcaggtcccgggtgcgccgggccaggccgctgtgcaggcccaggccagcgccaccccggccagccagcgcgtgaccgtcaccaccgacgtgctgcgcctggtgctggacggcggccgtgtgctcgatgccgagctgctgcagttcccgcagaccaaggacgaaggcagcccgccggttcgcctgctgaccgaagaccccgcgcatccgtacagcgcgatcagcggctgggccagcgaagacaagaacaccccggttcccggcgctgacggcttcaagctggtcggtgataccaaggacttcgtgctggccaagggccagaacgaactgcagatcccgttcgtgtggaccgccgacaacggcgtgaccatcaagcgcaccctgaccgtctcgcgcaacgagtacgccgtgcgcttcaaggacgaagtcagcaacgccggcgccgcaccgtggaacggctacgtctaccgcaccctggaccgcaccccgaccatcctgtcgcggagcatgaccaacccggattcgttcagcttcaacggcgccacctggtacgacaacgacaagaagtaccagcgtcgtgcgttcaaggattacctggacgacggcgcactgaaccagaacatcaccggcggctggctggcgatgctgcagcaccacttcttcaccgcctggatcccgcagaaggaccagaccgcgcactacgtgctgtcgcaggtggccggtcgtgacctgattgaagcgcgtggcccggccttcaccgtggccccgggccagtccaccagcaccgaggcccgcctgtgggtcggcccgaagctggtcaacctgatcgccaaggaagacgtgccgggcctggaccgcgtggtcgactacagccgcttctcgatgatggcggtgatcggccagggcctgttctgggtgctgaaccaggtgcacaagctggtcggcaactggggctgggcgatcgtcggcctggtggtgctgctgaagctggtgctgtacccgctgtcggcgacccagtacaagagcggtgccaagatgcgccgcttccagccgcgcatcgcgcagctgaaggaacgctatggcgatgaccgccagaagttccagaccgcgatgatggaactgtacaagaaggaaaagatcaatccgatgggcggctgcctgccgatcctcatccagatgccgatcttcttcgctctgtactgggtgctggtggaatcggtcgaactgcgccaggcgccctggttcggctggatccaggacctgaccgcacgcgacccgtacttcatcctgccggtcatcaacgtggcagtgatgtggttcacccagaagctgaccccggcaccgggcatggacccgatgcagcagaagatgatgcagttcatgccgctggtgttcggcgtcatgatggccttcatgccgtccggcctggtcctgtactgggtggtcaacggtggcctgggcctgctgcagcagtggtggatgaccaagcgccatggcggcgagccggttgcggccaccaccgctccggccccggtcaagaagaagtaa

SEQ ID NO: 495548 - DNA, 2673 bp, Stenotrophomonas maltophilia
atgccgcgtgcgtcgtcgttccgcctgttcctgccctcgctgttgttgaccctggttgttgccggctgcggcgacaaggacgcgaaggcgccggcgaccaccgtcacccagccaagcgcgcaggccgcggccgccgccgatccggccgccgcgccgttgctggcggcgctgcagaagcagctcgacggctaccgccggatcatcgtgctgctggcagacgaggaacagcaatcggccgccgaccgcggcacctccacgcgtgtgggccagcagctgttccacgatggcctggaacagcgcacggcgatcgccgcgcagttcgacaccctgctgcgcggctccagcccgcagcgcttcgccaccctcggcaccgtgctggactacatcgagtcggcgccggaactgttcgacgccgaccgcctggccttccgcgaagtgctgcgtgatctgcatgagcgggtcggcactgattcgtcgctgccggcggtcaagctgcaccagcgcatcggcgaggacctggaggcactcgacgagatcgagcgaaactacaaccaggaactgacccgcatcttcagccgcttcgagcgcacccgtgccatcgagctgaagcgtgagaagtgggacgactacatcgcccacctgcacaaggactacagccgcgaagcgatcctgcgcgactacggcgtgatcgagccctacccgatgtcgatgaaggacagcgaccgcgagatcttcggccgcgacctgccggccaagaccgtggtgctgaccttcgacgatggcccgcacaaggcctataccgatgaagtggtggccatcctcaagcgctacgacgtgccgggtgtgttctttgaagtgggccgcaaccttggcaaggtcgaggccgatggcaaggtcagcctcggcccgatggcgaagatcagccgcaacctgatggaagagggctatgcggtcggcaaccacagcctgacccacgcccagctgtcgcgcaccaccggtgacgcgctgcgccagcaggtgctcgacaccgacacgctgctgaaggatgtcgacagcaagcgcgcgccgctgttccgtttcccgtatggcgcgcgcaatgccgaaggcctgcagctgctcaacgaggccgggctgaagtcgatcatgtggaacatcgactcgatggactgggccgacccggtaccggaatcgatcgtgcagcgcgtgctagaccaggtgaacaaggaacagcgcggcatcatcctgttccacgacatccacgatcgtgcggtgaaggcgctgccgcagatcctcgaccggctgatcgccgatggttaccagttcgccggctggaacggccgtgacttcactgtcgcccgtgcgcgcaagggtgaagccggtgccgccacggtcaccaccggctacgagaagtcctgggcgatcgtggtcggcatcgacaactatgccaagtggccgaagctggagtacgccagccacgacgcgcaggcggtggccgataccctgaccgggcagttcggcttcccgtcctcgcaggtgatcgtgctgaagaacgagcaggcgacccgcaacaacatcctcgcggccttccacgatcgcctggcagatgaccgcaccggcaagaacgaccgcgtgttcgtgttcttcgccggccatggcgcgacccgccagctcgcttccgggcgcgacctgggctacatcattccggtcgattcggacccgaaggaattcgccaccgacgccatcgcgatgaccgacatccagaacattgccgagagcatgcaggccaagcatgtgatgttcgtgatggatgcctgctacagcggcctgggcctgacccgcggtgggccgtcgtcgtcgtcgttcctgcgcgagaacgcgcgtcgcagcgcgcggcagatgctgaccgccggtggtgccgaccagcaggtggccgatgctggcccgaacggccattcggtgttcacctgggtgctgttgcaggcgctggccggcaagggcgacctcaacggcgacggcctgatcaccggtaccgagctggccgcctacgtggcgccggccgtatcggcggtctcgcaccagaccccggccttcggcagcctgcccggttcgcagggcggcgagttcgtgttccaggtgccggacagccaggaattcctcaacgccgatacgcgccagctgaccgccgatgcgatcgcgctgaacaacaaggtggacgcggccagcgaggccaagggcagccaggcgccggtgacggtggccgacctgcagggtggcaaggccaagctggtggtgcccaccgctggcccggcgtccgaccgccagcgcgcgcagcaggccaacgaccgcggcctgcagctgtaccgcgagaagcagtacgacgaggcagccgcgcagttcgccgaagcgctgaagctgcgtcctgatttcgcccaggccgccaacaacctcggcttcgtctactaccgccagcagcgctatgcagaagccgcgcgctggctggagaacacgctgaagatcgacccgtcgcgcgcggtggcccatctgaacctgggcgatgcctacttcaacgccggcgacaaggccaaggcgaagcaggcctacaccacctacctggcgctgcagccgcagggcagtggcgcggcccaggcgcgcgcgcagctggagaagctctga

SEQ ID NO: 495549 - DNA, 1350 bp, Stenotrophomonas maltophilia
atgaacgacgcgatccgcaccgacaccatcgtggccatcgccagcgcccccggcgccggcggtgtcggcctgttgcgcctgtccggtccgcgcgctgcggcgattgccaatgcgctgggggcgcctgcactgcgcccgcgccacgcgcactacgcgcgcctgcgtgatgccgacggcgaggtcatcgacgatggcatcgtgctgtggttcccggcaccgaacagtttcaccggcgaagaggtggtggaactgcagggccatggcagcccggtgctgctgcagcagctggtcgcgcgctgcatcgcgctcggtgcgcgccaggcgcggccgggtgagttcagcgaacgggcgttcctcaacggcaagctggacctggcccaggccgaggccatcgccgacctgatcgctgcgggcgacaaccgtgccgcacgcgcggcgcgtcgttcactggatggcgtgttctcgcgccgcatcgatgcggtggtcgagcagctggtgctgctgcgcatccacgtggaagcggccatcgacttcgccgacgaaccgctggataccctcggtggcgcgcaggtacggcgtgggctggaacaggcgcgcagcgatctggccattctgcgccgcgatgccgaacgcggccgtcgcctgcgcgatggcctgcacgcggtgctgatcggtccgcccaatgccggcaagagttcactgctcaacgcgctggccggcagcgaacgcgccatcgtcaccgacatcgccggcaccacccgcgacaccctgcgcgaaaccatccgcctggatggcctggagctgaccctggtcgacaccgccggcctgcgcgacggcggtgacgccatcgaacgcgaaggcatgcgccgcgcccacgtggaaatcgagcgcaccgacctggcgctgatcgtgctggatgcgcgcgatccggcggccggtgaagcggcgctgggcgaggccgtggcggcggtaccgcacaagctctacatccacaacaagtcggatctgctggcggcgctgccgtcgctggatgatccggatcgggtgttcgtttcggccgccaccggcgccgggctcgacgatctgcatgcgcgcctgcgttcgatagcttcggccggtgccggtgagcaggtggacggcgagttctccgcgcgtacgcgccacgtggatgcgattgaacgcgcgcaggaacatgcgcagcgcgccgatggcgagctggcgcacgagcacctggagctggccgccgaggaactgcggctggcccacgatgcgctgggtgagatcaccgggcagatgagtgccgatgatctgctggggaggatcttctccagtttctgcattggcaagtaa

SEQ ID NO: 495550 - DNA, 1107 bp, Stenotrophomonas maltophilia
gtgaagtcgtggggttgtgcgttgctgttgtcgctggccgtggcaccatcggtggccatgagtgctgaatcctccaccccggccgtgcccaaggtgtcggtctacggccatcgcggggcaagcgcactgctgcccgagcacaccctggcctcgtatgcgcaggccatcgccgatggcgccgactacatcgaaccggacctggtgatgaccagggacggcgtgatggtggcccgccacgagaacgagatcggcggcaccaccgacgtcgcctcgcatccggagttcgccagccgccgcacccgcaaggtgatcgatgggcagcaggtcgagggctggttcaccgaggacttcaccctggccgagctgaagaccctgtacgcccgtgagcgcctgccggaactgcgcagcaccgcctacgacggccagttccgcatcgccagcctggacgagatcctggccttcctggtgcagcaggccgggcgcgccaaccgtggcatcggcctcgtgccggagatcaagcacccgacctatttccagtccatcggcctgccgatggaagacaagctgctggccgcgctgcgtggcaacgcgtacaccaatgtcggcccggtcacgatccagtcgttcgagaccgccaacctgcgctacctgcatggcaagatcggccggggcagcaacatccgcctgctgcagctgctgtggaagggcgatacccagccggccgacatcgccaaggccggcggcacgctgacctacgcacagatgatgaccccggccgggctgaaggacatcgccggctacgccgatggcatcggccccgagctgcgttcgatcattccgctggatgcgaagggtgcgctgggcacgccgaccgcgctggtacgtgatgcgcatgcggccggcctgatggtgattccgtacactttccgcccggagaaccatttccagcccagcaacctgcgcaagggcgccgacaacgcgcgcaacgtcgaaggctcgatcgctgagatgcgcgcctacctggcgaccggcatcgatgcgttcttcaccgatgatcccgcgctcggccggcaggcggtggacgggatgggcgcggcggggaactga

SEQ ID NO: 495551 - DNA, 771 bp, Stenotrophomonas maltophilia
atggacaacaacacgcccctgcccgccggcgacgtgccggccccccgcaatgaccgctcgcgcatcctgcgggcgttcaatgtcagcctggcggccgtgctggtgctggtggccgtgttcgccctgcagggcacgttcgactggcgaccgtgggcggttgcgccactggaagccaagggcctgctcggcctgatcggcggcccgatgctgcatgcctcggtcgagcacatcgccgccaacagcatcgccatcctgatcctcggcaccctggccggcagtgtgtatcccaaagccaccgtgcgcgccctgcccctgctgtggctgggttcgggcctcggcgcgtggatgctgggcaatccgggcagcgtgcacctgggtgccagtggcgtgacccatggcctgatgttcctgctggccagcctcggcctgctgcgccgcgaccgtgcggcaatcgccaccggcctgatcggcatgctgttctatggcggcatgctgatgaccatcctgccgcatgccgatggcgtgtcctggcagtcgcacatgggcggcgccttcgccggcatcatcgccgcgctgctgttccgcaacgccgatccgctgccgccgcgccagcgctacagctgggaagacgaagaagacgaggcagagccgctggccgacgacgagctggagccgccgtctccgcagcgcgtaccggtgttgtggcagccgcgcgagggccaggactacgtggtgatcccgttccgccgcccggacgagccgcgcggttga

SEQ ID NO: 495552 - DNA, 963 bp, Stenotrophomonas maltophilia
atgcagacgatcggtaacgtgtggttgtggggcggcttcgcagcggtggtggtcatcgccctgctggtcgacctcgtgttgatgcgccatggtggaccgcacaaggtcaccttcaaggaagccctgtggtggtcgatcggctgggtcgcgctggccctgttgttcaacgccggcctctggtactacctgaatgagaccgccggccaggtggtggccaacaaggtcggcctcgaattcctgaccggctacctggtcgagaaggcgctggcggtcgacaacatctttgtgttcctgatgatcatgagctacttcgcagtaccggaggagcagcgccagaaggtgctgatcatcggcatcctgggtgcgatcgtgctgcgtacgatcatgatcttcgccggcagcgtgctgatcagccagttccattggctgctctacgtgttcggtgccttcctgctgttcaccggctggaagatgtggttcgccgccggccaggaaccggatctggaaaccaaccccgccctgcgctggatacgcaagcacctgcgcctgctgccggactacgccggcaatgcgctgagcgtgaagcgcgatggcgtgcgctggttcaccccgctgttcgcggtgctgatcctgatcgcggtcaccgacgtgatcttcgccgtggacagcatcccggcgatcttcgcgatcaccaccgacccgttcatcgtgctcacctccaacgtgttcgcggtgctgggcctgcgtgcgatgttcttcctgctggccggcatggccgaccgcttccacctgctgccgtacggcctggcgctggtgttggccttcatcggcatcaagatgatgatcatcgacctgttcaagatcccgaccccggtgtcgctgggcgtggtcgcggtgatcatcgccgccaccgtggtgctgagcctgaagtacccgccgaaggaaggctcgggccacgcctga

SEQ ID NO: 495553 - DNA, 1170 bp, Stenotrophomonas maltophilia
atgaataccccccttccgattgtccgcctcaagaatgcgtggcgctccagccacccgtggatcttccagaaactggtcgagaagccgaccgtccggcccaagcccggttccatcgtcgacgtggtcggcattgatggcgagttcattggccgcgggttctacaacgggcattcgcgcattgccgtgcgcatccttgagaccgaccagaacgtgccggtggatgccggctggttctcgcgcaagattgcccaggcggtgtcactgcgccgtgaggtgctcaagctcgacgcggtctccgacgcctggcgcgtggtgcacagcgaaggcgacggcctgtccggcctggtggtggatcgctacggcgacctggtggtggtcgaattcttcgccgccggcatgttccgccaccgcgagtggatctacgacgccctgcgcgagcagttcccgggttgccgcttccacagcttcgccgatgagcacgtgcagaaacaggaaagcttcgatttccacggcaataccaccaccgaggcgtcggtgatcaccgagtacggcatcaagttccgcgccgacccggccggtgcgcacaagaccggcttcttcgccgaccagcgcgagaaccgcgagtggctgagccagcaggtggaaggcaagcgcgtgctggacctgtgctgcaacaccggcggttttgcggtgtacgcggcggcgcgaggcgcctcggaagtggtcggcatcgacatcgatgaagacgtcatccagatcgccaagggcaattcgcgcctgaacaacgtgcgcccgaagttcgtccagtccgacatcttcccgtggctgcgtgatgcggccaatcgtggcgagcagtacgacgtggtgatcctggacccggcgaagatgacccgcgaccgcgaccaggtcatcactgcgctgaagaagtacctggacatgaacaagctggcgctgggcgtggtcaagccgggcggcctgttcgccacgttctcctgcaccggcctggtggccgaggaccagttcctcgacatgctgcgccgcgcggcgtatttctccggccgcacgatccagatcctgaaggtggccggcgccggtccggaccacccgttcatggcccacgtgcaggaatcgcgttacctgaaggccgtgttctgccgcgtggtcgactga

SEQ ID NO: 495554 - DNA, 1242 bp, Stenotrophomonas maltophilia
atgccatcgttgcgccacctgtccgtcgtgctcgccgtggcgctgtgcgcgccgctgtcggctcatgccatcgagttcagcgccgaggaactggcccgtgccaaggcgctgcagcagcgcctggtcacgctcgacagccatctggatacgccggcaaatttcggccggaccggcttcgacatcgagcagcgccacgaccgcaacgcgctttcgcaggtggactacccgcgcatggtcgaaggtgcgctcgatggcggtttctgggcgatctacaccgaccagggcgatcgcagcgcagcggcccacctggccgagcgtgaccacggcctgcagcgactgctggaaatccgcgagatgctggcggccaatcccgcgcgcttcgcgctggcactgaccgccgatgatgcggcgcggatcaaggccgccggcaagcgcgtggtctacatcagcatggaaaatgccagcccgctggtggaagacccgagcctgctctcgttctaccaccgcgccggcctgcggctgctcagcaccgtgcacttcgccaacaacgagttcgccgattcggccaccgatcccaagggcgcggagtggaagggcctgagtccggccggcaaggagctggtgcggcaggcagtgaagctgggcatcgtgatcgaccagtcgcatgcctcggacgcggtgttcgacgacctgctggcgatgatgccggtgcccttcgtgctgtcgcacagctcggccaaggcggtgtacgaccacccgcgcaatcttgatgacgcgcggctgcgcaagctggccaaggccggcggcgtgatccaggtgaacgcctatggcggctacctgatcgacacggcgaagacgcccgagcgcaagcaggccgaagaagcgctgagcaagcagctgggcggctgggaaggcatgggcatcgagcagggtgttgccctgctgaaggccgagcaggcactggaccacgagcacccggtgcgccatgccagcctcgacgacttcttcgcccacttcgagcacatcctcaaggtggtcggccccgagcacgtgggtatcggcctggactgggatggcggcggcggcctgagtgacctgcccgatgtcagccagctgccgaagatcaccgcctggctgctgcgcaagggctataccgagcagcagattgccggcatctggggcggcaacctgctgcgggtgatgcgccaggcgcaggactacgcggcaaagcagggcggttga

SEQ ID NO: 495555 - DNA, 1428 bp, Stenotrophomonas maltophilia
atgtccctgttccggcgcaagtccctagattccgtcaccgtccacgaagccggcaggcgtctgatcccgacgctcagctggccgcacctgatcgcactgggcatcggtgccatcgtcggcaccggcatctacacgctgatcggcgtcggtgccaacctggccggcccggccgtgctgatctccttcgccatcgccggtgcggtctgcgcctgtgcggcgctgtcctatgccgagctgtcgacgatgatgccggccgccggcagcgcctacacctacagctacagtgcgctgggcgaggtgttcgcctgggtggtgggctggagcctgatcctggagtactcgctggtggtgagtacggtggcggtgggctggtccggctacttcgtcggcttcctcgaatgggtccacacccagttcggctggaacgtgcacctgccggcctggctggcagccggcccgcacgtggaaggcggcatgatcaacctgccggcgatcatcatcacctggctggtggccggcatgctgatggccgggaccaaggaaagcgccacgctcaatgccatcctggtggtgttcaagctgatcgcgctggcgatcttcgtggccgtggccctgcctgcgttcgacagcgccaacctgcagccgttcatgccgtatggctttgccaagtcgatgggccccgatggcgtcgagcacggcgtgatggcggcagcggcgatcatcttcttcgccttctacggcttcgatgcgatctccactgctgcggaggagaccaagaacccgggccgtgacctgtcgatcggcatcatcggttcgatgatcggctgcaccattgtctacgtgctggtggcgctggccgcagtgggtgcgatgagctacgccgtgttcgggcacagcgccgagccgctggcgctgatcatgcgccagctgggccatccgacagcggcgatggtgatcggcgtgattgcgatcatcgcgctgccgaccgtgctgctggccttcctgtacggccagagccgcatcttcttcgtgatgagccgcgacggcctgctgccgcgtggcctgtccaaggtcaacgcgcgtaccggcacgccggtggcgaccacgctgttcactgcggtggtggtgtcggcgctggccggcgtggcccgcctggacgagatcgccgcgctggccaatgccggtaccctggccgcgttcactgcagtgggcgtctgcctggtggtgctgcgcctgcgcgagccggaccgcgcgcgcacgttccgcacgccgctggccttcgtggttggcccgctggccgcactgggttgcatctacctgttcatcagcctgccgcacaccacccagctgtacttcctgttgtggaacgtggccggcctggtgctgtacctgctgtacagccgacgccatgcgctgatcgcgaaatag

SEQ ID NO: 495556 - DNA, 996 bp, Stenotrophomonas maltophilia
atgaagacccgtactctcggccccgccggccccaccgtgtccgccctcggcctggggtgcatgggcatgagcgcgtactacggcggccgcggcagtgacgatgacggcattgccgtcatccggcacgcgctggaccgtggcgtgaccctgctcgacaccgccgatgtgtatggcccgcacaccaacgaggtgctggtcggtcgcgcgattgccggccgccgcaaccaagtgttcctggccagcaagttcggcatcggcctggacccggctgacccgaaggcgcggcagatcaacggccacccggactatgtgcaggccgcctgcgaggccagcctgcgccgcctgggcgtggaccacatcgacctgtactaccagcaccgcgtcgacccgaccgtgccgatcgaggacaccgtgggtgccatggcacgcctggtggaacagggcaaggtgcgctggctgggcctgtccgaggcctcggcggccaccctccgccgcgcccatgcggtgcacccgatcacggcggtgcagagcgagtactcgctgtggtcgcgcgagccggagcagaacggagtgctggccaccacggcggagctgggcatcggcttcgtgccgtattcgccgctgggccgtggcttcctgaccggcgccatccgcagcccggacgacttcgacgccgacgattaccggcgcacctcgccccgcttcgaaggcgaaaacttccagcgcaacctggcactggtggataccgtgcaggcgctggccgccgagcgcggcatcgccgcctcgcagctggcgctggcctgggtgctgtcgcgcggcgagcacatcgtgccgatcccgggcacgacgcggcgggcacggctggacgagaacctcgctgcgctgcaggtggaactggacgcggccacgctggacgcactggatgcggccttcccgctgcatgccgcggccggtgaccgctactcggtcagcggcatggccaacatcgagtcgtag

SEQ ID NO: 495557 - DNA, 921 bp, Stenotrophomonas maltophilia
ttgaaggctgccttcacaatggatgcctccgtcccgctcactgctgtggtcgctttcgtccacgtggccgagcacgccagctttacccgcgccgccgatgccctgggtgtgtcgacctcggcgctgtcgcagagcgtgcgcgcgctggaagcgcggatgggcgtgcggctgctgcagcggaccacgcggcgggtcaacctgaccgagcacggcgcgcgtttcctgcagcgcgtgcgcggcggcctggaccagatcgaccaggcatttgccgaactggacagcgcgcgctcggtgcctgccgggcggctgcgcgtgaccctgccgcgcatcgtcgccgatcgcatggtgctgccgcggctgcccgacttccttgcgcgttacccgcaggtgcaggtggaactgtgcgtcgaccccgcgctgaccgatctggtggccgagggcttcgacgccggcatccgcctgggcgaatcactcgcacagggcatgatcgcggtgccggtcgggccacccgagcggcaggtggtggtagccacgccggcctatttcgaacgccatggcgtgccgcagaccccgcatgacctgcagggccacgcctgcatcgtgcaccggctggccaacggccggctgatgccctgggagttcagccgcgacggccacgacctggacgtgcaagtgagcgggcggctggtgttcaacgatgccggcgtcgcccatggtgccgtgctggcgggtctgggaatggcccaaggcttcgcctcgttaatggccgacgacatcaacgctgggcgactgcagagcgtgctgcaggactggcagccgccattccccggcttccacctgtactaccccgcgcgtgagcagatggcgcccaagctgcgggtgttcatcgaccacctgcgcgcggagatgcacgaccggtag

SEQ ID NO: 495558 - DNA, 438 bp, Stenotrophomonas maltophilia
atgaacgggcggctgccactgctcggcatgaccctgctgctggccggtgccgcctctgccggcaccgtgcaggaccatcgctgcctgacgggcggtcgcaacgacaacatccacctggaatggcgctggctggaagacggccgggccgacgtgcgttacgccggccagcgcgagcgcctgcccctgcaccggatctcgatggagaccacggtgctggccgaggatcgcccgtaccagttcgacagcgtgtgggaagagcgcttcgacgggcgcctcaacggccgctacctgctgagcacgcagggcgcgctggtactggatctgagctacgaacgcgcccgtgatggccgtcgcaccaccttccacgatgacagccaggcgtggcaggaggatggctgccattggccgggaggcgtagcggcgcgcgtggtcgattga

SEQ ID NO: 495559 - DNA, 630 bp, Stenotrophomonas maltophilia
atgccgtggatgggcatccaggacctgtggacgtttctggtcgccgtgctggtgtttctcgccctgcccggtcccggtaccttcacgctgctgactgccaccggccgtggcggcgtgcgcggcggctacaccgcactggccggcctgctggtcggcgaccagatcctgatgtggctggcgctggccggcgtggccgcactgctgaaggccaatcctctggtattccacgccgtgcagtacctcggcgcggcctacctggtgtgggtcggcatcagcctgctgcgcacgcccaagcacgagggcggcgacgccggcccgatccgcatgcaacccggccgctacttccagcaggcgatcctggtcagcctgctcaacccgaaggcgatcctgttctacatggccttcctgccgttgttcatcgatccgaaggcgcaccagggcatcgccaccttcgccgcgctggccggcatcatcctggtggtcagcatcgcctactgctcgatgctgatcggcgtgggcaacctggcccgccgccggttgatccagcacccgcggatcagcgatgcgctgcgccgcgtggccggcctgttcctggtggggttcggcatccgcctggggctgaacggatga

SEQ ID NO: 495560 - DNA, 972 bp, Stenotrophomonas maltophilia
atgaagatgatccgcttcgacgatctgcagctgttcgtccgcactgccgcgctgggcagcttctcgcaggccgcccgcgaggccgacctgctgcccgggcaggtcgctgcggcggtggcacggctggagcgcgagctggacctgcgcctgttcgtgcgcacgacccgcagcctgcgcctgaccggcgagggcgcgctctacctgccgtatgcgcaggaggtgctggccaccctgcgcgaaggccaggcccgcgtgcagggcgaggacaccgagctgcacggcacgctgcagctgtcggcgccgtcggacttcggccgcaacctgctgctgccctggctgagcgcgttccgcgccgcgcacccgcggctgcgcctgcacctgcgcctgtccgacgaggtcgccgacgtgttccgcgaaccggtcgacgtggccatccgcatcggccacttcgatgacgccaactacgtagccctgcccctgctggaaggcaaccggcgcgtgctggccgcctcacccggctacctgcagcggcgtggcccgcccacgcgcctggaggatctgcgcgagcacgactgcctggtctatcaactcaatggccgcgcctacgatcgctggtcgttcgaggtggacgggcgccgcagcgtggttccggtacgcggcccgctggtctgcgacgacgccgacgtggtgcggcgctgggccgtggccggcgaaggcatcacctacaagtcctggctggacctgcgcgaggatgtgcaggccgggcgcctgcaggtgctgctggacggcgttggcagcagcatcccgctgcagctggtgtgcccgcatcgcaagcagttctcacccgccgtgcggcagctgcacgcgcagctgcgccagcacctgcaaccgctgctgtccgggatgccggttggccccaccggccccctgtcgcccgccgcagcgctggccgacaatggcggccccccgtaa

SEQ ID NO: 495561 - DNA, 1008 bp, Stenotrophomonas maltophilia
atgcgcgccattgcctatacccacgccggcctgccgatcgatgatgccctggccctgatcgacatcgaactggagctgccgcagcccggcccccgcgacctgcgcgtggcggtacgcgcggtggcggtgaacccggtcgacaccaaggtccgccgcggcgtggccaccgatggcccgcgcgtactgggctgggatgcggtcggcatcgtcgacgcggtgggcagcgaggtgaccctgttccagcccggcgacgcggtctactacgccggcgtcatcgaccgcccgggcagcaatgccgagtaccagctggtggacgagcgcagcgtcgggcgcaagccggccagcctcgatgatgccgccgccgcggcgctgccattgactgcaatcaccgcctgggagctgctgttcgaccgcctgcgcatccccgagggtggtggcgagggccagaccctgctggtgatcggtgctgccggtggtgtcggttcgatcctggtgcagctggcgcggaagctgaccaggctgaccgtgatcggcaccgcctcgcgtccggatacccaggactgggcatacgcaatgggcgcgcaccacgtgatcgaccaccgcctgccgctggccgagggactggcgcggctcggcatcagcgaagtgcagcatgtggccagcctgacccactccgaccagtactacgcgcagatcgtggaactgctggcgccgcagggccagctggggctgatcgatgatcctggccaggtggacgtgatggcgctcaagcgcaaggcgttgtcactgcactgggagtcgatgttcacccggccgctgtaccgcaccgccgacatgcagcgccagcacgacctgctgaaccgtgtggccgagctgatcgacacgggcgtgctgcagaccacgctgggcgagcacttcgggcgcatcgacgcggccaacctgcggcgcgcccacgcgctgctggagagccaccgcgccaagggcaagatcgtgctggaaggctggtaa

SEQ ID NO: 495562 - DNA, 603 bp, Stenotrophomonas maltophilia
atgctcgctctgtacggaaaacccacctccatcaacgtgcgcaaggtgctgtggctgtgcgccggcctcgacctgccacttcaccacgagccagcgccgccgacggacctgctggccacactgaacccgaaccggcaggtgccggtgctgcgcgatggcggcttcgtgctgtgggaatccaacagcatctgccgctacctggccgtacgcgctggccgtgatgacctgctgccccgcgcggcacaggatcgtgcgcgggtcgaacaatggatggactggcaggccagcgacctcaacagtgcctggcggcacgtgttcatggcgcgcgtgcgccagcatccggactacccggacgatgcccgcgccgaggccagcctggtccagtggaacggcttgatgggcgtgcttgatgcccagttggccgctggcggctacgccgctggcaacaccttcaccctcgccgacatcgtgctcgggctgtcgacccagcgctggcgcagcacaccgggccacaagccggcgctggcacacgtgggcgcctggttcgagcgcctgcgccagcagcccggtttcgccgaacacgtcgacaacggcgtggcctga

SEQ ID NO: 495563 - DNA, 1569 bp, Stenotrophomonas maltophilia
atgaatatcgaagtcctcatgatcctggcagtggtcctgctgctggcgaccctggtcgcgctggtgctgctgtggcgtcgcagtgctggcggtgcaccctccgacgaactgcagcggctgctggacagcgaacgcgaacagcatcgcctcgccctggtcgatgccggccagctgcgcggccgcctcgatgcgctgagcgctgaactggagaacgaacggagccgcagccagcagcacgcacaggccgtcactacgctgaccgcccgggtggagcgcgaagcagcgctgtcggccagtcgcgaagcacagctggccgaacgtgaagcggccctggcgcaggcgcgcgctgccgttgcggagaccagcagcgagctgcagcaggtgcagcagcgctaccagcagttgcacggtgaacatgcccgcgcggtggccaatctgcagcactccgaacgggccagtgccgaactgcgcagctatcttgataccgccaaggaaaagctgtcgggcgccttcgccgaactggcgggcaaggtgttcgacgaacgcggacagcagttcgagaagaacgtgcggcaggcgacagtgcagtcacgcgcggacatcgaggggctgctcaagccgttcgccgacaagctgggcgatttccgcacccgcgtcgatacgctgtatggcgaggaagcgcggcaacgcgccagcctgctgggtgcggtgggcgaactgaagacgctcaaccaggacatggcggcgcaggcatcggcgctgacgaatgcgctgaagggcaatgccaaggtccgcggcgactggggcgagctgatgctcgacaacgtactgcgcggatcggggctggaagagggcgtgcactaccagcggcagaagcatgccgtggatgacgaaggtgcgcgcctgcgaccggacgtggtggtgcagttccccgacgaacgcagcgtggtgatcgacagcaaggtgaacctgatcgcctggcaggaagccatgaatgccactaccccggagcagtcggaagacgcgttgcgcaggcacgcggttgcgctgcgccagcacgttaaggacctgggcgagaagaattatccgaaggcgttgggcagcgagacgctggacatcaccatcgccttcgttcccatcgagggtgccttgtcagccgcactgggcgccgatggcagcctgcaggcgttcgccttcgacaaccgcgtggtgttcgcctcgcccaacaccctgatggcgctgctgcgcgtggccgagcgcctgtggacgcgcgacaaggtgcagaagcaggcgctgaagatcagcgaggccggcggtctggtgctggacgccctgaccgggttcctgcaggacttcaccgccatgggcaagaagctggacgatgccggcaaggcctacgccgatgcgcgcaatcgcctgatcgattcgccgcagtcggccatcagccgcgcccgtcggcttgccgaactgggcagcaaggccaagcgcgcgctgccaccggagctgaccccggacccgatgcagcagctgggcgcgccggaggacgacgaggacggcaatgcgggttga

SEQ ID NO: 495564 - DNA, 462 bp, Stenotrophomonas maltophilia
atgcgggttgacacgtcccgtgcacctgcgcctggctatgctgggcaccctgagtccgtggcgggtatcgacatgcgcttgcgctcctgtgccgttcttgtcctggctgcgttgctggctgcgtgcagcagcacgcccccggtcgccgacacgactacggccgctcctgcgccggaagccagcgaggcctaccgcgaagcacgtgacgtcgactgccaggccgctggcggcacgctgcagcggctcggccgcctgcagcgcgagcagtgcgtgattccctatgccgacgccggcaaggcctgcagccgtaagagcgactgcacgggccagtgcctggccggagccgaggtggccgccggcagtgccgccaccggtacctgccagcgtgatgtgcgccagaacttcgggtgccgccagcgcatcgatgatggcaaggcgcagggcacgatctgcgtggactga

SEQ ID NO: 495565 - DNA, 546 bp, Stenotrophomonas maltophilia
gtgagcaccccgatccaggacattcccctcaccaccatcgacggccagccgtcctcgcttgccgactaccagggcaaggtgctgctgctggtcaacgtcgcctccaagtgcggcctgaccccgcagtacgaaggcctgcaggcgctgtatgcggaaaagcacgcgcagggcctggaagtgctgggcttccccgccaacaacttccttggccaggagccgggcagcgaggccgagatccagcagttctgccagctcacctacgatgtcagtttcccgatgttctccaagatcagcgtggctggcgaggacacccacccgctgtaccagcagctgaccgccgcgcagccgcagtcgatcggcgaaggcccgctgcgtgagcgcctggccagcaaggagatcccgatccatccggcaccggcggtgctgtggaacttcgagaagttcctggtcggccgtgatggcaaggtcgtcgcacgctttgccccggacgtggccgccgatgacgcgcgcctgcgcgaggccatcgaggccgcgctggcggcctga

SEQ ID NO: 495566 - DNA, 1011 bp, Stenotrophomonas maltophilia
atgaacgtcgtacgcactttccccctgatcctcctggccaccgccctgaccgcctgtgccggcaagcccgcgcgcagcgatgcaccggtcgccagcaccgtggttgcgcccggccccgctgctccggccgcaacggccgataccggcggggtcgacgctgctccggtcgcctccgtggccaaccctgccgcgcccaccgcttcagcgccgacggctgcgccgcagggcgcagaggccagcccaccgaaggccgcagcgtccaccgccgccgccggcgacgatgatttcgacgccctctatggtggtaccggtaacaccggcaacgcggcggcctacgatccgtgggaaccgttcaaccgcaaggtgcacaccttcaacaatgcggtcgaccgcggcgtggcgcgcccgctggccaccgcctatacccatgtggtgccgcgcttcgcgcgcaccggcgtcagcaacttcttcagcaacctacgtgcgccggtgaccatcaccaaccagttgctgcagggccgtggtgccgatgcgtgggacagcctcggccgcttcctgatgaacagcacgctgggcatcggtggcctgttcgatccagccagcaaggcgatggtgccgcgtcgcaatgaagacttcggccagaccctgggtgcctggggctggcgtcgttcgcgctacgtggaactgccgttcttcggcccgcgtaccgtacgcgacgtgttcggcctggccggtgacatcccgttgtcgccgatccggcgcgtcgaggaagacaagatccgcatcggcctgcagggcctgcagctggtcgacacccgcgcacagctgctggcgatcgacgatctgcgcgacaccgcagtggacgaatacgccctggtccgcgatgcctggatgcagcgtcgcaactaccagatcgagaacgatctgcgcagcaagcgcgaccgcggccatgacgatgccaattcgccgatcccggtcgatgcgatgccgatgccgcagtggacccactga

SEQ ID NO: 495567 - DNA, 312 bp, Stenotrophomonas maltophilia
atggcaagtaacgcacttgcgctgctggaaggcgacaccctgcgcctgcgcggggtgcttgaccgtgccgcggtgatcgcactgtggccgcagctgcaggccctgccggccaagctggcgcggctggagctgggtgaggtcgagcgcgtggacagcgccggcctggcgctgctggccgagctggcggcccgtgcacgcaaggcgggccatgcgctggccatttccggcgcgcccgccggcttcaacgagctgagcgcagcctaccggctgtcgcccgacctggatttcaacgctacttctgctgcgagctga

SEQ ID NO: 495568 - DNA, 675 bp, Stenotrophomonas maltophilia
atgaagatgaaactgatcccggccctgctcgcctcggcgctgctggcggctactccattcctcgcccaggcccaggcccaggccaccgctcccgcccccgccgctgccgcggcgcagggccaggccggcaaggtggtgatcgatgccagcacgcgcatcctcaccaccctgcagcagcgccgcagcgagttcagcagcaacccggccagcctgcgcagctacatcgacagcgaactgaaccgcaccttcgatcgcgactatgccgcgcgcctggtgctgggcccgcacgcccgtggcgcctcggatgccgacatcaagctgttcgccgatgccatggccgacagcctgatgcagcgctacggttcgaccctgctcaacatccagggcaagccgagcttccgcctgaagggtgaaagcccgctgccgggcaaccgtggtgtgcgcgtgagcaccgaactggtgcgcgccggcaacgaaccgaccccggtcgaatactggatgcgcaacgtgaacggccagtggaagatcttcgacgtcaacatcgaaggcatctcctacgtgcagaccttccgcaaccagttcgataccccgctgcgccagaagggcatcaagcaggtggccagcgagctgcacagcggcagcatgcaggccgggcccgccggcaatggcaagtaa

SEQ ID NO: 495569 - DNA, 525 bp, Stenotrophomonas maltophilia
atggccatccgcggtcccagactcgaattctccgtcggcgccttcctgctgctggccctggcctcgctgatggtgctggccgtggcctcgaccaaccagcgctggagctggggcagccagggctacgagctgaaggcgcgtttctcccaggtcggccagctgcgcaagcaggcgccggtgaagatcggcggcgtcaccgtcggccaggtcgcctcgatcgacctggatccggtgaagttcgaatccatcgtgaccctgcgcatggacagcaaggtcaaggacctgccggcggacacctcggccggcatcttcaccagtggtttgctcggcgagagctatatcggtctgcagccgggcggtgacccggacgtgctcaaggccggtgacgagatcgtcttcacccagccggcggtggacctgatccagctggtcggcaagtacatgttcagtggcggcgccggtggcggcgcaggccagaagcccaacgatggcgcgcaggcgcctgcaacggaaccgcaaccatga

SEQ ID NO: 495570 - DNA, 750 bp, Stenotrophomonas maltophilia
atgccgttcgtccaagccacccgctcgctcggccgcgccggcctgttctcgctgaccgtgctgcgtggttcgctgccgacccgtgatttcctggccgaactgacccgcgagatctacaagatcggcgcgcgctcgctgccgatcatcgccgtcggtggcgccttcgtcggcctggtgctgacgctgcagggctaccgcacgctgaccaccttcggtgcggccgacgcgctgtcgaccctgctcggcctgtcgctgtaccgcgaactggcgccggtgctgaccgcgctgctgttcatcggccgcgccggcagctcgatcgccgccgaactgggcctgatgcgcgccaccgaccagatcaaggcactggagctgatggcgatcgacccggtggccaaggccgtggcgccgcgcttctgggcggcggtgctgaccgtgcccctgctgaccggcatcttctgttcgctggcgatcagtgccagctacttcgaagcggtacacgtgctgggcctggacaatggcgtgttctggtcggcgctgcgcaacagcgtcgatttctgggatgacttcggcgtggcgatgctgaagtcggcgatcttcggcggcaccgccgcgctggtcgccgcctacgttggtttccacgccgagccgaccatcgagggcacctcggtggcgaccacccgtgcggtggtcaacgcctcgctgctggtactgatgttcaacttcgtgctgtcggcaatgttgttcacctaa

SEQ ID NO: 495571 - DNA, 789 bp, Stenotrophomonas maltophilia
atgtcggcttccacctccagtctggtgcagttatccaacgtccgcatcgaccggagcgggcgcacgatcctgcgcgacgtgtcgctgcaggtgcccaagggcagcatcacggccgtgctgggtccgtccggcagcggcaagtcgaccctgctggcggcactgaccggcgaactgcgcccggtggctggcgaggtcaccctgttcggcaagccggagccgcaggacagcggcgcgctgctggaaatgcgcaagagtgtgggggtactgctgcagggcaacggcctgctgaccgacctcactgtggccgaaaacgtcgcgctgccgctgcgcacgcatacccgtctgccgaccgccgtgctgcgccgccttgtggaaatgaagctgcatgcggtgggcctgctggccgctgccgatgcctggccgcgcgagctgtccggtggcatggcgcgccgcgtcgcgctggcccgtgcgctggcgctggacccgccgctgatgatctacgacgagccactgaccgggctggacccgatcgcctccggcgtgatcatgagcctgatccagcgcctcaaccacagcctgggcctgaccagcatcatcgtcagccaccacgtgcacgagaccctgccgatctgcgaccaggtgatcgccatcgccaatggcggcatcgtgttccagggcacgcccgaggcgctgcagtccagccaggacccgttgctgcggcagttcctgcacggccagcctgatggccccatcccgttcgatgccgcaccgcgcgcgagggtcgcctga

SEQ ID NO: 495572 - DNA, 3345 bp, Stenotrophomonas maltophilia
atgatgagtgacccgggcagcgatttccgcctctaccattccaactccctggacgtgctggccgcgctgctggcgcgcaacgtgcgtgcgccggttgcgggtcagccgctgctggcgccggaggtggtgctgattccgcaggtggcgatgcggcgttggctgcaagcaacactcgctgccgaatatggcgtggccgccaatcttgagttcctgaccccgggcgagttcgttgcccgtgcactcaacgccaatgtgcccggcgaacgcgacgacctggacgcggccggcctgcactggaaggtgtaccaggcactgcgcgacccggcgttgctggcgcagccaccgatgcgcgcgctgcagtcctatcttgccggtagcgatgcattgaagccgtgggcgttggccggtgaactggcgtcggtgttcgagaagtaccaggcctggcgccgcgactggctgctgcgctgggaggccggcgccgacccggccgacccgcaggccatcctctggcgcagcatcgccgctggccacgactaccgcgcgcgccgcatccaggcttacctggaccgcttcgagggcgccggccagcaattgccgcagggcctgccaccacgcatgtccgcgttcgcgacgctcaacatctcgcccgatgtgctgcgggtgatggccacccaggcgcgggtgggcgagctgcacttctatatgcccacgccggtgcagtcgtactggggtgacctgcagacgctggccgagcgcctgcgcagcggcgcgcccgatcccttcggtgaagcggccggtgagaaccgcctgctggaagcctggggcgcggccgggcgcgatttcatggcggtgctgggcggctacgaggtggtgcacccggccggcgagatcgccgcctattccgatccggaggacgacacccggccgacgctggccgaaggtggactgtccgacagcctgctgcatcgcctgcagcgcgatctgttccaccgccgtgcgctgccctcgggcgagctgcgcgacgggctgcgcagcgacgatcccagcctgcaggtgcacgcctgccatacccgcctgcgcgaactgcaggtgctgcacgaccagctgcgcagcctgctgcaggacccgcgcttcgacccgccgctgcaggcgcgggagatcgccgtgcttgcaccggacatcgacccctatgtgccttatctggaagcagtgttcggcggccgtgggggcgaggacgagcacattccctatgcgctggccgacagcagtccgctcgccggcgagccactggccgacgtgttcgtgcacctgctgggcctgccggtctcgcgtttcggcctgaacgaagtgctggacctgctggccagcgcgccgctggccgaagcggccgggctggaggcggtggactttgatcgcctgcatggctggctgcagcaggctggcgcacgctggggcctggatgcgaagcaccgcaaccagcaccaggccccggccgacgacgcctacacctggcagttcgcgctggatcgcctggtgctcggtcatgccaccggcagcgaggccgacctggccggtgttgccccgtggatcgagctggagggcggcgcattggaagccctggaccggctgctgcgcctgttgcgcgtgttggcggtctaccagcgccgcctcggcgaactgctgacgccggcgcagtggcggcaacgcctgctgtcgctgctggacgcgctgctgccgactgcgcccagttcgcccaacagccagcgtgccctggagcgcctgcgcaagctgctcaaccagttcgccgatgatgccgccaaggccggcttcacggacggggtgccgccggaggtcgtgcgcgcgcacttcgccggggcactgggcgaggccgatacgcgcgcgccgctgctgaccggtggcatcagctttggccgcatggtgccgatgcgcctgctgccgttccgggtgatctgcgtgctcggtctcaatgatggcgatttcccgcgccgtgacccggctgccggtctcaaccagctcactgccgagctggacacgccgcgccgccggcccggcgaccgctccacccgcgaagacgaccgcttcctgttcctgcagctgttcgccgccgcgcaggaggtgttctacctgagctacctcggtgccgatccgcgcgatggcagcgcgcgtgagccgtcggtgctggtcagtgaactgatcgatgccgccgctgcgtatcacctcgatccgcctgcggcggtccgcgacttcaccgtgcgccacgcactgcagccgttctctccggcggcgttcggtgacggtgatccacgccgcttcagctatcgccgccaatggcatccggccgccggtcgcctcaccggcgcgcgcggaggcctgcagccgtggttcgatgccgcgttgccgccgctcgacgatgcggtggaagacgacgttgcactcgataccctgcgccgcttcctgtgcgatccggccgggcagttcctggcgcagtcgctgggcctgcgcctggccgacgatgtcgaggaggtcgatgacctggaaccgctggtgctgtcctcgcgcgggccggaaaggcgcagcgtgcaggcggcggtggtacgcgccacgctcagtggcgataccgagccattgtatccgcggctgcgcgcgcgtggcctgctgccgtcgggccccctgggtgagcgccagttcgaggtggagcagttgaagacccgcccgtatgccagtgcattgctgggctggatgcagggcgagccgctggaaagccgccgctatgaagtggagatcgatggcgtgcgcctgcatggccgtgtggccgatcgacaccccgacgggctggtgcgcctgcgcgctggcaccctcaatggcactgcggtgatccgccagggcctggattggctgctggccaacgctgccggcgatgccctgccgctggtgcagttccatgatggcggcgacgccggtcccggcccgcatgtactgccggcactgagtgctcctgctgcacgcgcggcattgcgcgcattgctgcagttgcgccaacgcggactgcgtgaaccgctgcgctttgccccctacaccggctgggtgctgtacaacgcgccggccgaaaagcagcgcagcgaaggctggaagcagtggcacggcagcgaccgcagttggggtgaatccagcagcgacgcctggcagctgctgctgcgcggtgccgatccatttgccaccgacgccggctatgccgatctgctgcgcaacagccaggtggtcttcagcgcggtgcgcgaaggccgcacccttggcgccgatgcacgccaggagggcagcgcatga

SEQ ID NO: 495573 - DNA, 3678 bp, Stenotrophomonas maltophilia
atgagcaccgccatcgtcgatgaggactcccagcgcatggcgggcgatccctatctggccctgccgctggatggtatccgcctgatcgaggccagcgccggtaccggcaagaccttcaccctggccacgctgttcacccgcctggtggtggagcagggcctgcgcatcggccagatcctggcggtgaccttcaccgatgccgccacccaggaactgcgcaagcgcatccgcgagcgcctgtcgctggccgcgcgcctggtcgatctggaaccggccgagggcgaagcaccggacacgaggctgacccgccaggtgctgcagcgccatctgcagggggggaccgagagcgccgccgcactgaagcgccgcctgcaggtggccgccgatgagatcgacctggcgtcgatcttcaccatccacggcttctgcacccgcgtgctgcgcgagcatgcgctggagagcggccataccttcgatccgccggaactactggccagcgaccgtgagctgttggaggaactggcggccgatctgtggcgggtgcatgccaacgacgcggccacgctggagccgctgacctggctgtggtccaacccggacgcgctggccaccgatctgcgcgcgttgctggctgcgccgcctctgcacccgttgccgcggccggtggcgctggccgatccacagccggctttgcaggccgccgccaccgaactgcagcaggcgctgcgcgggcatggcgagcagttcttcatcgacctctgcgatgccgtcgacaacaagtggatcaacggggtgtcctacaagctgggttggctgcactcgctgggccggcagctgctggcctgggccgagcgcggcgacccgcgcgagctgctggccagcgagcgcctgccggcactgctgccggaggtgctaaccgacaagaccaacaagaagttccccgaccgcacgccgtcgtcgccagtgcaggtgccattggcgcgctatgtcgcgctgctggccgaacgcgatgcctggctgcgtggtactgcgctgaatttcctgcacgcgcttcgcgccgaagccatgcagcgcctgcaggcgctgaagcgcacgcgccgggtgcagacctatgacgatctgatcgatggcgtggcactggccctggaaggcccgcagcggctgccgctggtaaggcagctgcgcgcgcagtaccgcatcgcgctggtcgatgagttccaggacaccgatgatcgccagtggaacatcttccacaccgtgttcggcgattcgccggaggtgcgcgaactcggcctggcaccggcgctgttcctgatcggcgatcccaagcaggcgatctacgggttccgcggcggcgacatccacacctacctgaaggccaagcaggtggcgcagcaggcgccggtgctggaccagaacttccgctcgcgaccgtcagtgctgcgcgcgttgcaggcgctgtacgacaacgggggtgaggacgccttcctcgagcgtgacatccagttcgagccggtgcgtcccggtggcgtgcgcaccgatgaggactatctgcacgacggccacgccgccaaggcactcaccctgcgcgtgctgcgcagcgggggtgacaaggcgatgagtgccgatgcctcgcgtgaggcagcgacccaggcctgcgtggctgcgatccaccaggccctggtcgaggcgcgtgcgggcaaagcggtgttgcgtgggcgcccggtgcagcctggtgatatcgcggtgctggtgcgctcgcatcgcgaggcgacgctggtgcagcgcgcgctggctgcggtgggcatacccgcagtggcggcgggcaagcagagcctgttcgccaccagtgaggcacgtgatctgcgcgcgctgctgctggcgctgctgcaaccggcagacgaaggccgcctgcgtgcagcgctggccacggtgttgctgggccagcgggccagtgcgatcgcggcgatggagcgcgagggcgacctgcagcgcgggttccaggcgcagctgctgcactggcgcgagcgctggcagcgcggtggtccgttcgcggtgatcgccgatgtctgtgccgcgcacggcgaacgcctgctggcgctgatcgacggcgagcgccgcctgaccaactacctgcaactgggcgaactgctgcaggaagcctcggcgcaggcgctgggcatgcatggcctgctggactggctgcaggggcagatggccagcgccgaccaggatgacgagcagcagttgctgcgcctggaatcggatgcacgccgcgtgcagatcatcaccctgcacaagagcaagggcctggagtatccgctggtgttcctgcccttcgtcggcatcgacggcggcgcaccgaacaccgcctcgcactgcaccgtgcacgtcgatggccagcgccagctgcactggaagctggacagggacgaggcctgggaagcggccagcacacagcgcgagcgtgagcagcgggccgaggatgcgcgcctgctgtatgtgggactgacccgcgccgagcatgcgctgtggatcgccgtgggtgatctggccgggcttggcaagacgcgcctggcgccgctgctgggcgacctgcaggcgctgcgcgcgcacgccgacgtgcacatcgatgacagtgagacagtggccgcgctgccgcagctggcggccgaagtggaaggggatcttccggcagtgcgtgcactgacccggcgcgtgccgcacgactggtgggtatacagcttcacccagctggcgcatgccgacgcgggcgctggcagtgatattgaagccgccgccaccgagctgccggcgcccgccgccgacgaacccgcgggcccggaactgccgctggagcccgcgctgccggaacccgccgccgtcgaagacagcccgccggtcgacccgcgcttcatgggcagccgcttcggcaacgtgctgcacgaggcgatggagaacgtcgacttcgctgcgtgggggggctggcagccgggcctggaagcgcccgagggccaggccgaggtgctgcgcaaggcgctgcacgatgaaggctatgccgacgtcgacctggacgatggcgtggcggtgctggtgccgttggtcggccacacgctcaccgtgccactgcccgagggcggtgcgctgcacagcctgggcgaaggcgagcggcgcgcggaaatcgacttccatttcgccatcgaaccgaccacggtaccggcgctgttgcagctgctgcatgcacatggggtttccagtgcgcgtcgcggcttcggccagcgccgccgcctggaagggctgatgaccggcatgatcgacctgacctacgtgcgcgacgggcgctggtacgtgctcgactacaaatccaaccggctgcccggctacagtccggacctgctggccattgccatgcgccacagcgagtacgacctgcaggcgctgatctataccgtggccctgcatcgctggctgcgcttccgtctgggcgcggcctacgattacgagcgcgacatggggggcatccgctacctgttctgccgcggcctggatgctgccggcaacggcgtgcatgtggaccgcttcccgttcgcgctggtggatgcactcgacgcactgttcgcaggtggcgaacaggcccaggccgaactggccgcacgtgcccgtggggccagcgcatga

SEQ ID NO: 495574 - DNA, 1881 bp, Stenotrophomonas maltophilia
atgagcctgctgaaggaactgcaccagaagggcctgctgcgcaccctcgatcacgcgttggcgaccagcctgcagcggttgcgcgacgacacgccggacagtgtggcgctggtggccgcgctggcctcgctggcggtgtcgcagggccatgccgggtttgatccggcacaaccgcagcggttgctggacggcgtgcccgaatggcctgccgcgcaggactggctggcgcagctgcgcgcatcgccctgggtagcgacgccggagcaggccgatgccatcgccgaggatgcgccgctggtgctggagaacggcctgctctacctgcgccgctatcgcgagtacgagcggcagttggcggccgggctgcagcgcatcggccggcatccgctgccggcaccggacatggccgcgctggcaccgttgttcgcgcagctgttcccgcaggcactgggcagcgaggatcaccaggcacgcgccgccggcgtgaccctgcgccatccgctggcgctggtcaccggcggtcccggcaccggcaagaccaccaccatcgcgcggctgttgctgctgctggccgcacaggcccggcacgctggccagccgctgcccgaggtggcgctggccgcgcccaccgggcgcgccgccgaacgcatggccgagagcctgcggctggccgtgcagcgcctgcaggagcacggcgtggacccggcgctgtgcgcggcactgcccagttccggcaccaccctgcatcgcctgctcggcgtgatcccggattcgccgcgcttccgccaccacgccgacaatccgctgccggtggacgtggtggtggtcgacgaagcctcgatgatcgatctgccgatgatggccaagctggtcgatgcgatcgccagcggcacgcggctgatcctgctcggcgatcccgaccagctgccgtcggtggaggccggcgacgtactcagtgcgatcctgcgtgccagcggtgatggcatcggcacccgcgccgatgacgcgcaggcgctgcgtggattgctggcgccgtccacgctgcagccccaggccgaaccgaacaccttcgccggccgccgcgtgcagctgcaacgagggtaccggcagagcgatgcactggtgctggccccgttggcagatgccgtgcgcgagggtgacgccggcgccgccctgcagctgctgcgcggcggtgaactggccggcgtgcatttccacgaaggcgaggccgatccattgcgcggccagcgcgagcacctgctgggccactggcgtgcactggccgacgcggccgatccagcgcttgccctgcagcaggccgggcgcctgcgcgtgctgaccgcgctgcgcgaaggcccgcagggcgcgcgtggcctcaacagccgcatcgaacagctgctggccggcaacaccccgggctacttccagggccgcctgctgctggtcaccgagaacagctaccggcaccgcctgttcaacggcgatatcggcatctgcctgcgcgacagcagcggcgcgatggtggcctggttccccggcgacagcgtcgagcagccgcgcgccttccacccggccgcactgcccgcgcacgaaagcgcctttgcgatgaccgtgcacaaggcacagggctcggagttcgatgaagtgtggttgcagctgccacgccaggacagccgtgtgctgtcgcgcgaactggtctacaccggcctgacccgcgcccgccaggtgctgcatgtggcgggcagcgcagaggtgctgcaggccgcattgaaacgccacgccagccggttgggtggcctggcctggcggctgggtgcggaagcggtggccgaagcaccggcgcgcatcgaacagcctaccgtgcagggcaccttgttctga

SEQ ID NO: 495575 - DNA, 399 bp, Stenotrophomonas maltophilia
atgagttacgacatgatggtgttcgaggccagcgccgcaccacgcgaggcggcagctttcatcgcctggttcgaaaagcagacgcagtggaacgagcgccacgagtatgacgacccggcggtcagcagcccggcgctgcaggcgtggttcgcggagatggcgcaggacttcccgccactgaacgggccgctgagcaacgacgatgacgaccgtgccgaggtgaccgagtacagcatcggccagcaggtgatctacggcgcgttttcctattcggtagccgaacgtgcgcacgggcgcgtgcaggacctggccgagaagcacggcgtgggcttcttcgatgtgagtgccgatgaagcggcaatcgtgttcccggatgggctggtgttgatcgcggaatag

SEQ ID NO: 495576 - DNA, 2040 bp, Stenotrophomonas maltophilia
atgaacgcgctgaccgaccgccaggcctggctgttctcgatcaagacctacctggccgcagtggccgcgctgtacatcgccatggccggcaacctgtcgcgcccgtactgggcgatgggcacggtgtacatcgtcagccagccgctgctgggcccgacccgggccaagggcgtgtaccgcatcgtcggcaccttggtggccggcctggccaccctgctggtgctgccggcgctggtggagacgccgctggtgctgagcgcggccatgtcgatctggctggccggctgcctgttcatggccctgctcaaccgcggcccgcgcggctacgcgttcctgctggccggctacaccaccgccttcatcggtttccctgcggtgacttcgccggagaccatcttcgacacggtggtggcacgcagcgaggagatcatcctcggcacggtcgtggcggtgctggccgcttcgctgctgttcccggcctcggtacgcccgatgctgcgcgcgcgcatcggcaactggatggaggacgccgcgcagtggtgccggcagatccttgaacgtggacgcgcgcacgcgccgcgcaaccggctggccgccgacctggtgcagttcgaggcactgatcgaattcctgcgccgcgatgatccgcgccatgccgggtctgcggtgtcgatggagcgcctgcgtgagcgcatgctgctgctgttgccagtgctgtcctcgattgccgatcgcctgagtgcgctgcgcagcgacggccaggccctgcccgaagggctgccggcgctggtcgatgacatccacgattggctggatggcccgaccaacgccagtgaatacgcccgcctgcgcgcgcgcatcagcgcgctgaagccgcaggtggaccgcgacctgcagcatctgcagctggccagcctgctgctgcgcctggaggaactggtggacctgtggcaggactgccgcaccctgcagcacgccatcgaccacggcaccgcgccgctggaccgcgcgcattaccgcatccgtaccgaacgcgtggccgccgacaagcacgtcgactacggcatggcgctgttctccgcgctcagtgccggcgtggcactgatgagctactgcgtgctgtggatcgcgctgggttgggagggcggtggcaacggcgcgatgatggccgcggtgaccgcggcgttcttcgccgcgcaggacgacccggcaccgagcatggtgtcgttcctggtgtgggccatggtcgcctcggtggtggcaggcgtgtacctgttcggcgtgttcccggccgtgcacgacttcggcctgctggcgctggtgctggcggtggcgttcctgccgctggggctgatgctgcaccaccccaagagcgcgctgttcgcactgccgctgacggtgaacctggccgcgctgttgagcctgcagaacacctacagcgccaacatccagaccttcctcaactcgtcgatcgcgatgttcatcggcattggctttgcggtggtgatgacccgcctgttccgttcggtgggtgccgagtggaccgcgcgccggctggtgcggcagggctggactacgctggccgaggccgccgaagggcgcggccagcaggaccgccagcgcttcgccgcacgcatgctcgacctgctgggcctgctcgcgccgcgcctggcggcaaccccggagggcagcgacatcgcctcggtggatatgctcaacgaagcgcgcattggcctgaacatcctgcagctgcgccgcgcgcggctggaactgcccgagcgcagccgcgaagcggtcgagcacattcttgaggagatcgccgcgcactaccggcggcagattgccgcacgcaagccgatggtggcggccgacgcattgcgcgagcggctggatacctcgctgggacgggtcggcagcgtagccgcctgcaaggcacgcgacgaggcgctgatgggcctgatcggcctgcgcttcgcgctgttcccggaggcgaaggcgctggcgccgggcctggccatgagtgcagccgaacagccgtag

SEQ ID NO: 495577 - DNA, 918 bp, Stenotrophomonas maltophilia
gtgaacaagatcgtgaagaagaccctgccggtgctgctcaccagcgcagccgtgatcatcgccctgctggtgctgcgccagctgtgggtctattacatggatgagccgtggacccgcgatgcccatgtcggcgccgacgtggtgcaggtggcgccggacgtgtccgggctggtggaaacggtgcaggtggccgacaaccaggcggtgaagaagggtgacctgctgttcgtggtcgaccgtgcccgctaccgcatcgcgctggagcaggcccgcgccaacctggccgagcgccaggcatcggtggcgcagctgcgccgcgagatcggccgtgaccgcagcctgcaggacctggtcgccgccgaggacgccgaagtgcgccgcgccaagctgcaggccgcacaggctgcgctggccaccgcacaggcggcggtcgacctggccgagctcaacctgggccgcaccgaagtgcgcgcaccggccgatggccgggtcaacgaccgcaccctgcgcgtgggcgactacgtggtagccggcaagccggtgctggcgctgctggataccggctcgttccgcatcgatggctacttcgaggaaacccgcctgcgcggcgtggccccggggcagcgcgtggacatccgcctgatgggcgagtcggccccgctgcgtggccatgtggagagcatcgccgccggcatcgaagaccgctaccgcagcaacggcagcaccctgctgccgaacgtgaccccggccttcgactgggtgcggctggcacaacgcattccggtgcgcatcgccatcgacgaagtacccaagggcgtggaactgatcgccggccgtaccgccacggtgaccgtggacaccggccgccatccgcacaacgacaaggccggcactgcgccgacacaggcgggcctgtga

SEQ ID NO: 495578 - DNA, 210 bp, Stenotrophomonas maltophilia
atgcccggtgaattcagtctccacggagtgttcgtcccgaccctgctcgggctgatgttgttggcctacctggtcaacagcggcctgcacgcgctgctgcagcgtgccggcgcctatcgccacgtatggcacccggcgctgttcaacctggccctgtacgggatcgtgcttggcctgctgttccacctcctgcgttggatgcaatcgtga

SEQ ID NO: 495579 - DNA, 1965 bp, Stenotrophomonas maltophilia
gtgaaacaccgtcatctcctgctggcctcggcaatcgccgccgccacgctggccctggccgcctgcaagaaggaagctgccccaggcaccgataccgccagcagcagcgccccggccggcgaaaccgccgaccagttcgtggcccgcatcaatgccgagttcaaggccgcctacccggagatgacctcggcgcagtggctgtcctccacctacatcaacagtgattcggaacgcatcgcggccaaggccaacgagcgctcgctgacccagctcaacagctggatcgaacaggctgcgaagttcgacggcaagccgatgagcgaggacagcaagcgcgcgatccacctgctgaagctgatgtcgtcgatgccggcaccgcgcgacccggccaagctggccgagctgacccagatcgccacccgcatggaaggcagctatggcgccggcaagtactgcaccgatgccaacgatccgaactcctgccgccagctgggcgagctggagcaggtgctggcacgcagccgcgactatgacaagcagctcgacgcctggcagggctggcacagcaccaccaagaacatgcgcggcgactaccagaagttcgtcggcctggtgaacgaaggcgccaagggcatgggcttcaccgatgccggccagatgtggcgcagcggctatgacatgccgccggagcagatcggcccggaaaccgaccgcctgtgggaacaggtcaagccgatgtacgagcagctgcactgctacgcacgcggcaagctggacaagacctacggcaaggacaaggccgaagtgggcaacggcctgatcgccgcgcacctgctgggcaacatgtggcagcaggactggtcgaacctgtgggaccagctggaaccgtacccgggcgccggcagcctggacatcaccgcggcgctggagaagcaataccagaccaacctgagcgcggcgctggccaaggccggcaaggatgccaacgtggccgcgcagtacaaggcgcagcgcgaggccgaactgcgcaccgccaagcagatgaccgaacgcgcgcaggacttctacgtgtcgctgggcatgccgtcgctgccgcagtcgtactgggaacgcacccagttcatcaagcccgatgaccgcgatgtggtctgccacgccagcgcctgggacatgaacatggaaggcgacgtgcgcaccaagatgtgcatcaagccgaacgaagagaacttcaccaccatctaccacgagctgggccacatctattacgacctggcctacaacccgctgccgccgctgttccagggcggtgccaacgatgggttccatgaagcgatcggcgacaccatcgtgctggcgatgacccccaagtacctcagctcgatcggcctggtcgatgcgccgaccgaaagccgcgaagcggtcatcaacaaccagatgcgcatggcgctgtcgggcgtgtcgttcctgccgttcgggctgatgatcgaccgctggcgctggggtgtgttcgatggttcgatcaccgccgacaactacaacaaggcatggtgggacctgaaggccaagtaccagggcgtggcgcctgccagtacccgtggcgaggagttcttcgatccgggcgcgaagtaccacgtgccaggcaacaccccgtacacccgctacttcctggcgcgcatcctgcagttccagttctacaagggcctgtgcgacgcggccggctacaaaggcccgctgcatgagtgcaccttctacggcaacaaggaagccggccagaaatactgggcgatgctgagcaagggtgccagccagccgtggcaggccacgctgaaggagctgaccggcaccgacaagctcgatgccggcccgatgatcgagtacttcacgccggtcaacgagtggctgaagcagcagaacgaaggccagatgtgcggctggcaggccaacgcggcaccggcggcgaaatga

SEQ ID NO: 495580 - DNA, 393 bp, Stenotrophomonas maltophilia
atgtccaccagctccaagacccgccgcgaccagcgccgtcgccaggaaaagcaggccgccaacaaggccgctgcccaggcctcgccggtggagccgcatgcggaactgcgcgacgcgcagcgcaccctgctggccggtgtcgtgcgccgcgatggcgaatgggtgctgggcatggacggccgtatcgccggccacagtgactccgccgcgcaggtactggcgctgatcatgcaggccggtgaactgcacgagcgcaacggcacgccggtgcgcctgatgtactccgatgcgctgcgcgacgccgcacaggccgaagcgaaggaaaagggccagaccttcgaggagttcaaggcggacctggccgcggcgatggcggcgaagaaggacagctga

SEQ ID NO: 495581 - DNA, 894 bp, Stenotrophomonas maltophilia
atggctgcgcagcagacctaccgcctgttcgaggtggcgctgaaggagcgccgcgttctttccccttccctggaccgcatggtgttcaccggtgccgacgtggcgcggatgacgaccggagggccggaccagcgcatcaaggtgttcttccccttgcccggccaggaggcgccgcaggtccccagcggcgaggactggtacccgcgctaccgggccctgccggacgatcagcgcccgccgatgcgcacctacaccatccgccagctccgtgcagagcagggcgaggtcgatgttgatttcgtgctgcatggcgagaccgggccggcctcgcgatgggccatccatgcacggccgggcgaccgcgtagtgctgttggccccggatgccgactgtgccgacagcagcgagggctgggaatggaagccgccggctggcgttggccaggtgctgctggtggctgacgagaccgcgttgccggcagtggccggcattcttgaggaactggcggccagggtggatccgccgcgtacgctggccctgctggaagtggcgcaggccggtgatgcggttcgcctgaaggcgccggccacggccgagctggtctggttgccgcgcgggcaggcggcgtacggggcgcctctgttgcaggcggtgcaggcgcgcctggccgcctcgagcgtggtcgctggcgaagaactggaagagatcgacgtcgacgcgcagatcctctgggaacaggccgatgccagcgtggccgggccgctgtatgcctgggtggcaggcgaggcgggagcggtgatggcaatccgtcgccatctggtccgcgagtgcgggctggaccgccacacgatcaccttcatgggctactggcggcacgggaaagtgttggactga

SEQ ID NO: 495582 - DNA, 1251 bp, Stenotrophomonas maltophilia
atggccctgccggacgccttctccatgaccgccgctgttgctccttccacccgccgcatggccctgctgctcgccggcctggccatgttcggtccgttctcgatcgacaccatcttccccgcgttcccgcagctggcccagcgcctggcggtggacgaggtggcggtgcagcagaccatcagcgtgtacctgctgttctacggcctgatgagcctggcacacggcccgctgtccgatgcctggggccgcaagcgggtgatcctcggcggcctggtggtgttcgtgggcgcctcggtcggctgtgcgctgtccaccgatctgaccacgctgctggggttccgcgccctgcagggcctgtccgcaggcgtcggcatgatcgtcggccgcgcggtgatccgcgacctgtaccacggtcacgacgcgcagcggctgatgagccaggtgtcgatgctgttcggcatcgccccggcgatcgcgccgatcatcggtggctggatcctgctcagcggtgctggctggccgctgatcttctggttcctggtggtgttcgcactggttctgctggcggccaccgcccgctacctgccggagacccatccgctcgaagcgcgcgttccgttgtcgccgcgggtgctgatgcgtgattacgtgcgcatcggtttcaatccgcgcttcctgcgcctggcgctggccggcagcatcggtttcggtggcatcttcctgtacatctcctcggcaccggtgttcgtgatgcaacacctgcacctgggcgagggcggtttcgcctggctgttcatccccaccatcggcggcatgaccaccggctcgttcctgtccgggcgcatggccgggcacaccacgcccacccgccaggtatccattggtttcggcctgtgcgcgctgtcggtgctgctgaacgtcggctacgtggcgctggcgccgcagttcgtgctgccgtgggcggtgctgccgatcttcctgggtggcatgggcatggcgctgatcttcccgatcctggcgctggcggtgctggacatgtacccgcaccagcgcggcctggcctcgtcgctgcaggccttcgtgcagctgatgatcagcaccgtggtggccggcgtggtgtcgccgctgctcagcgccagcccgctgcacctggcgttgggccaggctgggttcttcggcgccggcttcgtgttctggtactgggaacaccggcgcgaacgcgcggcgcaggcagcctgcacgggtcactga

SEQ ID NO: 495583 - DNA, 2868 bp, Stenotrophomonas maltophilia
atgtcccagaacaccccttccctgcgtgagctcgagcaccacaatgcgttcgtcgagcgccacatcggccccaacgatgccgagatcgcgcagatgctcgacgtcgtcggccacgcgtcgctggatgcgatgaccgatgccatcgtaccggccaagatcaagtcgccggcgccgctggcactgccggaatcgatgaccgaagtgcaggcactggcgaagatccgtgcgatcgccgacaagaacaccgtgctgcgcagcttcatcggccagggctactacggtacccacacgccgaacgtgatcctgcgcaacatcctggaaaacccggcctggtacaccgcctacaccccgtaccaggccgagatctcgcagggccgcatggaagcgctgatcaacttccagaccctgtgcgccgacctcaccggcatggaaatcgccaacgcctcgctgctggacgaagccaccgccgcagctgaagcgatgaccctggccaagcgttcggccaagtcgaagtcggacaccttcttcgtgcacgacgccgtgcacccgcagaccctggaactgctgcgtacccgcgccgagcccatgggcatcgtgctgcgcgtcggcaccccggccgaggcactggaagcagaagccttcggcctgctgctgcagtacccggacaccttcggccagatcggcgactacaaggcgctggtcgaggccgtgcacgcgcgcggcggcctggtggccgtggccaccgacctgctggcgctgaccctgctggccgccccgggcgaatggggtgcggacatcgtggtcggcaacagccagcgtttcggcgtgccgttcggcttcggcggcccgcacgccgcattcatggcctgccgcgacgcctacaagcgctcgatgccgggccgcctgatcggcgtctcggtcgatgcccagggcaacccggcctaccgcctgaccctgcagacccgcgagcagcacatccgccgcgagaaggccacctccaatatctgtaccgcacaggtcctgctggcggtgatggcctcgatgtatgccgtctaccacggcccggaaggcctgacccgcatcgcccgccgcacccaccgcctggcctcgatcctggccgcggcgctgcgcgaggccggcgtgcaggtcggtggcgacttcttcgatacgctgcacatcaccggcgtgcatgccgatgagatccacgccaaggcccgcgccgccggttacaacctgcgtgcgatcgacagcgactcggtcggcatcagcctggacgagaccgccacccgcgccgacgtggtcgcactggccgccgtgttcggtgcgcaggccgacgtcgacgcactggatgccagcaccgccgatgcgctgccggccggcctgctgcgccagtccgcattcctgacccatccggtgttcaacacccaccacagcgagcacgaactgctgcgctacctgcgctcgctggccgacaaggacctggcgatggaccgcacgatgatcccgctgggctcgtgcaccatgaagctcaacgccaccgccgagatgatcccggtgacctggccggagttctcgcagatccacccgctggtgccggccgaccaggcgctgggctacaaggaactcatcgacacgctggaagcgatgctggtggaatgcaccggctatgacgcggtcagcctgcagccgaactccggcgcgcagggcgagtacgccggcctgctggcgatccgcgcctaccaccgctcgcgcggcgaaggccaccgcgacatctgcctgatcccggattcggcgcacggcaccaacccggcctcggcgcagatgtgcggcatgaaggtggtggtgaccaagaccgatgccaacggcaacgtcgacgtcgaggacatccgcctcaacgccgagaagtacagcgaccgcctggccgcgatcatgatgacctacccgtccacgcacggcgtgttcgaggaagaggtggtggagatctgcgagatcatccacaagcacggcggccaggtgtacaccgacggtgccaacatgaatgccctggtcggcgtggccaagccaggcaagtgggggtcggacgtttcgcacctgaatctgcacaagaccttctgcatcccgcacggcggtggcggcccgggcgtcggcccgtgcgcggtcaaggagcacctggccccgttcctgccgggcaagctgggtgacaacggcccggtcggcatggtcagcgcggccagcttcggcagcgcctcgatcctgccgatcagctggatgtacatcgcaatgatgggccgcgacggcctgcgcaaggccacccaggtcgcgcagctcaacgccaactacatcgccaagcgcctggccccgcacttcaagaccctgtacaccggccgcaacggcctggtggcgcacgagtgcatcctggacgtgcgcccgctggagaagaccagcggcatcggtgccgaggacgtggccaagcgcctgatcgacttcggcttccatgccccgaccctgagcttcccggtggccggcacgctgatggtggagccgaccgaaagcgaatcgctgcacgaactggatcgcttcatcaacgcgatgatccagatccgcgaggagatcaccgcgatcgaagacggccgcctcgaccgcgaggacaacccgctgaagaacgcgccgcacactgccaccgcagtgaccgccagcgagtggacccacgcctacccgcgcgaactggccgccttcccgctggccagcctgaagcagagcaaatactggccgccggtggcgcgtgtcgacaacgtgtacggcgacaagaacgtgatgtgcgcctgcatcccggtcgatgcctacaaggatgatgaagtcgaggcgtga

SEQ ID NO: 495584 - DNA, 411 bp, Stenotrophomonas maltophilia
atgctgcgcagccgtcccttcctgatgttcaccggccaggccgaggccgcgctggccctgtacgccgaagcctttgccgatttccggctgctggccctgcaacgccatcccgagggggccggcgccggcgtgccggggcaggtccgccaggccatcttcctgctcggtggcacccactacctgtgcttcgacagcctggacgtgcacgatttcaccttctcgccgtcgatctcgctgttcgtcgagtgttccggtgccgagcagttcgagcgcgcggcacgcgtgctgggtgagggcggccattggttgatgccggtgggcgactatgacttcagcaatcgctacggctgggtgcaggaccgctttggcgtgtcgtggcagttgagcctggggcagatgccggacccgtga

SEQ ID NO: 495585 - DNA, 1368 bp, Stenotrophomonas maltophilia
atgcccaactcgattccgaccgcttcgccgtcccgcctcggacattcgctcaagccccgccagctgatcatgatgggcctgggcagcgccatcggcgccgggctgttcctcggctcgggcgtgggtgtgcaggcggccggtccggcggtcctggtgtcgtatctggtcgccggagcgctggtgatcatcgtgatgaacgctctgggcgagatggcggcggccaaaccgaccagcggcgcgttctcggtgtatgcagccgacgccatgggcgctaccgccggtgccaccgtgggctggctgtggtgggtgcagctggtgatcgtgatcgccgccgaagcagtgggtgcggccgggctgctggccacggtctggccggcgataccggtaccgatggcggcgttggcgttcatgctgttcttcaccgcgatcaacctgctcggagtgaagaacttcggcgagttcgaattctggttcgccatcctcaaggtcgcggcgatcctggcgttcatcgccattggcgtggcgctgctgatgggatggctgccgcaggtgacctccccgggcctgagcaacttcaccgaacacggtggttttgcgccgaagggcctggccgggatcggcgcggcgctgctggtggtggtgttcgccttcggcggcaccgagatcgtggccgtggcggcggccgaaaccgaagaccccgagcgcagcattgcccgtgccatccgcaccgtggcctggcgcatcctggtgttctacatcggctcgctgagcgtgatcatcgccgtggtgccgtggaccagcgaggcgctgaagtcgccgttcgccgccgtgctggacatcgcccgcatcccgggcgctggtaccgccatcacgctgatcgccgtgatcgcgctgctgtcggcgctcaatgccaacctctacggcgcctcgcgcatgatgtattcgctggcgcagcgtcgcgaagcgccggccgtgcttggctggaccgacccgcgccaggtgccggtgatcgccgtgctggccagcgtgctgttcggctttgcggccacggtgatggaactgctgttcccggaccgggtgctgccggtgctgctgaacatcgtcggttccacctgcctgctggtgtggacgctgtcgctggtctcgcagctggtgctgcgtcgtcgcgcggatcgtctgggtacccgactgccgttccgcatggccggtttcccgtggctgacctgctgtgcactggcgatccttgcgctgatcttcggcctgctgctgagtgagtcgcacacccgcctgcagttcctgtcgatggtggcgttgactgccacgatcgccgccagcagtgccatcgcgcggcgcatgcgccaggcgtga

SEQ ID NO: 495586 - DNA, 723 bp, Stenotrophomonas maltophilia
atgcgagtcgagcccgccgacatcgaagccctgttcgacgccatcccggatgtgctgttcttcatcaaggaccgccaggggcgttacacccacgtcaaccagaccatgctgcggcggctgggtctgcgcgcgcgcaaggacgtgatcgggcgtacggcggccgaaatctacccgaccggcctcagtgcggactacgttgaccaggacgcccgcgtgctgtccggtgaggtgatcgagaacctgatggagctgcacctgttcgccaaccgcgaaccgggctggtgcctgacctgcaagcgcccgctggtggtcgacggggccatcgagggcctgatcggcatttcccgcgaccttggccagaaggacagcctcggcacccagtacgagcagctgcggctggcgctggcccacctcaacgcgcactacgccgagaacgtgcgcatgcagaccctgctggacatcaccggcttttcgctgtccaagctggagcgcagcttccgcaaggtgttccagatgaccccgcagcaggtgctgacccggctgcggatccagatggccatgcacctgctgcatggcgacgacagcatcgcctgcatcggccaggcctgcggtttcagcgaccagagtgccttcacccgcaagttcaaggctgaaaccggtttctcgccgcgtgcctatcgtgcccgtatcggtgggaacgtcggcgagccggcgctggcctga

SEQ ID NO: 495587 - DNA, 2091 bp, Stenotrophomonas maltophilia
atggccgccagcaagccgaccggcaagcgcgcaaccgtccctgccgaaagccaccgccggggcgatggcgatgaactgcaccagcaggccgggggcagccatccggcaatgaccaccgaccagggcattccggtggcggacaaccagaactccctgcggcagggacctcgggggcccacgctgctggaggacttcatcctgcgcgagaagatcacccacttcgatcacgaacgcattcccgagcgcatcgtgcacgcacgtggcagcgcagcacacggctacttcgagctgacccgatcactggcagcccatacccgcgcacgcatcctgaccgaggtcggcgtgaagacgccggtattcacccgcttctcgaccgtggccggtggcgcaggctcggtggataccccgcgcgacgtgcgcggctttgcggtcaagttctacaccaaggagggcaactgggatctggtcggcaacaacatcccggtgttcttcatccaggacgcgatgaagtttccggatctggtgcacgcagtgaagatggagccggaccgcgccttcccgcaggccgcgtcggcccatgacacgttctgggacttcatttcgctgatgcctgaatcgatgcacatgatcatgtgggcgatgagcgaccgcgccatcccgcgttcgctgcggatgatcgaaggcttcggtgtgcacagcttccgcctgctgaacgaggccggcgagtcgacgttcgtcaagttccactggcggcccaagctgggcattcagtccacggtctgggacgaagcgttgaaactgcaatcggccgacaatgacttccatcgccgcgacctgttcgaggccatccagcgcggcgactttcccgaatgggagctggcggtgcagctgttcaccgaagaagacgccgacgcattcccgttcgaccacctggatccaaccaagatcattcccgaatcgctggtgccgttgcaggtgatcgggcgcatggtactggaccgctggcccgacaacttcttcgcagagaccgaacaggtggcgttctgcccggccaacgtgccgcccggcatcgacttcagcaacgacccgctgctgcagggccgcctgttctcctacctggacacccagctgctgcgcctgggcggcccgaacttccaccagatcccggtgaatgcaccgaagtgcccgtttgccaatcatcagcgcgacggccacatgcagatgcaggtgcccaagggccgcgtcgcctacgatcccagctcgctgcaggacgacaccccgcgcgagacgcctgccggattccgcagccatgccagcgccgacgatggccgcaagggccgcacccgcgcggagagtttcgccgaccactacagccaggcccggatgttcttccgcagcctggaaaagccggagcaggcgcacctggcatcggcgctggtgttcgagttgtccaaggtggaaacgctgaaggtgcgggtgcgcaccgtcagccacctgcgcaacatcgatgacgcgctggcgcagcgcgtggccgatggcctggccctgcctgcgctgcccgacccggccccaaccgccacgccggtgcgggacatgccacccgctcccgaggtgcgcgtgatcgggcgtaacaagcccaccctacagggtcgctgcatcggcatcctgttcgacgaaggctccgacgcgcgcgtgattgccagcctgagcaaggccgtccggaaggcaggtgcagacgtgaagctggtcgcgccaaaagtgggaggcgccacgctgagcgatggcgcattgcaggcggcagatgggcagctggcgggcaccccgtcagccgtgttcgatgcagtagccgtggtgctcagccttgaagccgcgaaggccttgtcgaaagagagtgcagccgtcgaattcgtcagccaggcgtgggcacacctgaaggccatcgccagcgacgcgggcggccaggtgctgctgaaggcggcgcgcgtcggcaacgacctcggcatcatcgaagcagaagacgccaaggcattcctggcggcggccgccacccgccagtgggcgcgcgaacccaagctgcgcctgctggcctga

SEQ ID NO: 495588 - DNA, 504 bp, Stenotrophomonas maltophilia
atgccccgtggtgacaaatccgcatataccgaaaagcagaagcgccaggccgagcacatcgagcaaagcgaacgtgatcgcggcgcgagtgaaggcaccgccgaacgcattgcctgggccaccgtgaacaagcaggacggcggcggcaagcgcgccggcagtgcccgcaagggcgcgaagaaggcgaccagcaagaaggctgccaagaaggcgcctgccaggaaatcggccacaaagaaggccgcaaccaagaggacggcggcgaagaaggcacctgcgaagaaggcggtggcgaagaaggctgtggcgaagaaggcaccggctcgcaagaccgcgacaaagaaggccgcaaagaagacggcgaagaaggcagcggtaaagaaggcgggtacggtcgccgcgcgtagcgccgccgcgaagaaggcagccaagacgcgggccgcgaagaagaccgtgcgcaaggcggcggcgaagaaggccgcgcgcacgcgtgcacgcggctga

SEQ ID NO: 495589 - DNA, 702 bp, Stenotrophomonas maltophilia
atgaacgccgtgatgctcccgatcgtgatgctgcccgggctggatggcagcggcctgctgtcgacatgcttcgtggaagcgatgcaggaccagggggttaccgtgcaggtgctgccgctgcccatgcacgggccacaggactacgttacattggcgtcgatcctgcgcccgcagcttcccatctctccctttgtgctgctggctgaatcgtttgccgggccgctggctatcgaactggcggtggcttcaccgccgggattgcgcggattgatactgagtacgaccttcgcgcggcgaccggtgccgctgccagcggcgagcgcacgcttgcttgcccctgcatggccaccgccgccgctggcgttgctggcccggcttctgctggggcattggcggacacgcatgaaccttcgcgagctgcgacatgcgatcgctgcggtaccgaccgcgatcctgcggcagcgcgctgcggcgacactgcagatcgatgtccgcgcgcagttgccgaagctcacgctgccgacgttatgcctgcatgcacgacaggaccacctgttgtggccgcccagcgtggccgagctgcaggtcttgttgcccgatgcccggcacgtatcgctggaagggccgcatctactgctgcaggcccgtgccgaggcagccgcagccgaagttgccgcatggatgagggcgctcccctcctga

SEQ ID NO: 495590 - DNA, 288 bp, Stenotrophomonas maltophilia
atgcgcaagccacgctggctcagctggaccggcattgccctatgcgcgctctatctcgcgctgaccacctggctggtgctcgatgcccggtccaacagcgaccccaagagcgcctacatcctcatgcaactgccggtgatgctgcagaccgcggcactcaacgtcatcgacgtgggacgctggctttccggaatgacctggatcaccgtctaccttctggtgattcctcccacgcttggcgtgctgtacgtgcttggggccatgctcggcagcgtcctggagcaatga

SEQ ID NO: 495591 - DNA, 2124 bp, Stenotrophomonas maltophilia
atgaactacttgaggaacgtcagggttgcctggcgtcttgggctgggctttggcctgttgctgctgctggtcgccgccgtggtggccaccggcgccactgccagtgtcgtgcagaagcgcgcgatgcagcaggtggtcgacgtcagcgtggccaaggtgcgcctgctgtcgcagatgctcgatgccaacaaccagatgatggtcgtgcgccgcgaaatgctgatccgtcagggcgaagaccgcggcagcgacgagaagcgcatcgccgacctggtcaagcgctatgaggccagctggaccgcctaccaggcgctgcccagcgatgctcagggcaagaccatcgcggaaaccatcgcggccaagcgtgccgttgcgcgcccgctcaacaagcagaccagcgaactgatggagcagggtgattaccctggcgccgtggcgctgacgctgggcccggtgcaggaagcggccaacggctggaacaaggcgctgtccgatggcgtggacttcgaggagaaggaaagccgtgaggctgccgccgaagcgatccgcctgggcgaacgcagcctgctgcagctgctggtgctgggcggcgtcgcgctgcttgccggcatcggcgcctcggtgatgattggccgcagcctgaccggcccgctggcgcgcgcggtgaacctggccgagcggctgtccaagggccagctggaccaggagttccgcctcggtggccgggatgagctgacccagctgggcgaggcgatggccagcgtgcggcagagcgtgcaggcggcgatcggcgcgcagctgcagatggctgagcagcacgaagcgggtgcgatccgctatcgcatggacgacagtgccttccccggtgatttcggccgcatggtgcaggccaccaacagcctggtcgaatcgcacgtgcaggtggagctgctgatggccgaagtgatgcagcgttacgcgatcggcgacctcagccgtgacctgccggactacccgggcgagaagggcacgctgacccgcactctggccgcggtaaagcagagcctgatggcgatcaacgcgcagatcgatgaactggcccgtgcggctcgcgccggcgacttcagcatgcgtggcgatgctgctgcgttccagtatcagttcaaggcgatggtcgaacacctcaacggcatgatggccagttcgcaggccagcattgccgatgtttccgacgtgctgcgcgcgatctcgcacggtgacctgaccgcacgcatggacggtgagtacgacggcgtgttcgcgcgcatgcgcgacgacgccaataccaccaccgcgcagctgacgggcattgtgcggggcatccaggtggctgccgacagcatcaacaacgcggcccaggaactggccgccggcaacaacgacctgtcgcgccgcacggagcagcaggcggccaacctggaggaagctgccgcgtcgatggaggagctgacctccaccgtgcgccagaacgccgagctggcgcgtcaggccgacagcgaagcgcatgccgccggtgccgccgtacgcgagaccgagcaggcgatggcgcagatggcctcggtgatgggtgagatcgatcagtcctcggcacgcatctcggaaatctccaccgttatcgacggcatcgcgttccagaccaacatcctggcgctgaacgctgcggtggaagccgcgcgcgcgggcgagcagggccgtggttttgccgtggtcgccagcgaagtacgcacgctcgcgcagcgcgccggcgtcgcggccaaggagatcaaggagctgatcgaagacgccgctgccaaggtgaagagtggcctggcggtgaccgttgaatcggaagcagcgatcgcgcgcgtggcccaggccagctcgcgcaccacccagctgatgagcgacatcgcagcggccagcaaggaacaggcggccggtatcgagcaggtcaaccaggtggtggtgcagatggaccaggtgacgcagcagaacgcggccctggtggaagaagccactgcggcgagccgcgcgctggaggagcaggcacatgcgttgaccacgtcggtggcggtgttcaaggtggaaggcgcgacggtctctgctgtgccccgtcgcgcggcctga

SEQ ID NO: 495592 - DNA, 963 bp, Stenotrophomonas maltophilia
atgccctcatctgtgtcccgatccaccctgctcgcactctcgctgctggcgtcgccggccttcgcgcaggtgccgccgcccaacctgcccgcccccattgccgagaaggccgacccggacaccgcagtgcgctccgcactgcatgcccaagtgctgctggatcgcgcgaatttctcgcctggccagatcgatggcgaagtgggcagcaaccagcgacgcgcggtggcgggcttccaggccgcgcatgggctgaccgtgacgggtgagctggacgacgccacctggaaggctctgcaggctgatacggtggggccgctggccagctacacgctgactgccgaggatgtcgccggcccgttccagctcataccgaaaggacctgccgcacaggccaaactgaaatcgctgggtttcagcagtatggaagaagccctgggcgagcgcttccacgcctcgccggagttgctgaaggtgctcaatcccggcgtggatctgaccaaggctggcagccgcatccaagtgcccaacatcgcaccagcggcattgccgaaggcggcgaagatcgtggtcgacaaatccgactccaccctgcagttgctggatgcgcaaggcaagctgatcgcgcaggtgccggtgtcgtcgggcagccagcacgacccgttgccgatcggcgaatggaagatcctgggcgtgtatcgcgacccgccgttccactacaacccgaagttgttctgggatgcgcgcaagggcgaaaagaaggcgacgctgccgccgggcccgaacaatccggtcggccgggtctggatcgacctgtccaagccgcactacggcctgcatggcacgcccgaacccagccacgtgggcaagaccgaatcgcatggctgcgtacgcatgaccaactgggatgcggtgcgtgtggccgacgcagtggatacttcggtgcccgtggtgatgcaggagtaa

SEQ ID NO: 495593 - DNA, 678 bp, Stenotrophomonas maltophilia
atgcgtctttcgcagctgatcgtattgggcgtactgctgggactgggggcaggttggtggctgcgtcgcgatgggagtgagccggtagccgcctcgctgccggcagcgccatcggcggtgtccgccgcgccggtggtcgaaccagcgccacgcgcaacggccccacccgccaccaccgcgccgccggccgcgcaggctgcggatgcaccgtccggcctgctgctgccggtgcagggcatcctggcctcgcagctgcgcgataccttcaccgatgcacgcagcgaaggccgcgtacacgatgccatcgacatcctggccgatgccggtactcccgtactcgcggtggctgatggcacggtggaaaaactgttcgacagcgaacgcggcgggctgacgatctaccagttcgagcccagcggacgttggtgctactactacgcgcacctgcagcgctatgccgatggcctggccgagaaacaggcgatcaagcgcggggatgtgatcggctacgtcggcagcaccggcaatgccagcgccgaggccccgcacctgcacttcgaagtgcatgtcttggggccggagaagcagtggtggaagggagagtcgatcaatccctatcccttgctgaagtcggcggcaccgatgcccggcgctgctggcgccgcaacgccacagtga

SEQ ID NO: 495594 - DNA, 765 bp, Stenotrophomonas maltophilia
atgcccggcgttggtgacaggaaaagccccgcgcacgcggggctttttcgttactgtgtggccaggccagcggggaagcgacgcgatgaccaggatgtcagcgtgaaaggcgagacggtagtgcgggtcaccctgtgggtgtcgtggagcctgtggtgcatggcctgcctggttctggcgcttggcgccatcgccaactgcctggcctcgcgtacccagaccctgcctctgctgctgagcccgggtgcgacggccgaggtgacggtctaccgcctcatcgatgatcaactgcggctgcacctgcgttatgccgcggacggtacagaggctgaccctgaagtgctgctgcgcatcgagactcccaccgaacatggagacttccgcgcaggggagcgttggggagtggccgggcagggcatcgaccgcgcgctggtatcggttgagtccagcggcctcatggcctcctactttggttacggtcgcggcgacgcattgccacgcggccgctcatggctgcgggtaaccgtgctggaggtggatccggcgctggcgggacgcactgcagacatcgagctgcagccgccgctgggtctgctgaagctgaccgacctggactacctctggctgtggccgttctttttctggaagatggcggcgctgttcctgctgattccgggggctgcgttgactgtcttcactgtggcgttgcggcgccagcagcgccgggcatcggtgccgccgacttcagcaagggatagggattga

SEQ ID NO: 495595 - DNA, 1293 bp, Stenotrophomonas maltophilia
atgggtcagtctgtcgtagtgttgggtgcccagtggggcgatgaaggcaagggcaagatcgtcgatctgctcactgaggaaatcggcgccgtcgtgcgcttccagggcggccacaacgccggccacaccctggtcatcaatggcaagaagaccgtcctgcacctgatcccgtcgggcatcctgcgtgacgacgcgctgtgcctgatcggcaacggcgtggtgatctcgccggctgcgctgcagaaggaaatcgccgagctggaagcctccggcgtggaagtgcgttcgcgcctgaagatctccccggccgcgccgctgatcatgccgtaccacatcgccctggaccaggcgcgcgagcgcgcagccggtggcaaggcgatcggcaccaccggccgcggcatcggcccggcctacgaagacaaggtggcgcgtcggggcatccgcatcgccgacctgcattacccgaagcagctggaagaactgctgcgcaccgcgctggattaccacaacttcgtgctgaccaagtatctgaacaccgatgcggtcgacttccagaagaccttcgacgaagcgctggccttcggcgaatacgtgcagccgatgaagtccgacgtggccggcatcctgcacgacctgcgcaagcagggtaagcgcgtgctgttcgaaggtgcgcagggcgcgctgctggacatcgaccacggcacctacccgtacgtcaccagctccaacaccaccgtcggtggtgcgctggccggttccggcgtcggcgctgattcgatcgactacgtgctgggcatcgccaaggcctacgccacccgcgtcggcggtggcccgttcccgaccgagctggacgacgaagtcggccagggcattcgtgaccgcggcgccgagtacggtgcgtcgaccggccgtccgcgtcgttgtggctggatggacatcgtcgcgctgaagcgcgccgtggccatcaacggcatcagcggcctgtgcatcaccaagctggacgtgctggatggcatggaaaagctgaaggtctgcatcgcctacgaatacaacggcaagcgcaccgagtacgcgccgctggacgcgcagggctgggaagaatgcaccccggtgtacctggagttcccgggctggagcgagaacacccacggcatcacccagtgggacgatctgccgccggccgcacgcgcctacctgcgttcgctggaagagctggccggctgcccgatcagcatcgtctccaccggcccggaccgcgaccacaccatggtcctgcaggatccgttcgcctga

SEQ ID NO: 495596 - DNA, 870 bp, Stenotrophomonas maltophilia
atggagggcccagacacggaaaaagccgaacggggaggcccgtccggcttttgtgcattatccgggtttccggggtccgctgccacctttccgacggacggcttcaccggccggtcagccgccccgctcggtcgtgccggccgctggccggcaatgccaaccaaggttggcatctaccagagcctggccacgcaagtgcaggccggtcagctgccccgcccggtcgtgccggccgctggccggcaatgccaaccaaggttggcagctaccagggcctggccacgcaggtgcaggtcggtcagctgccccgcccggtcgtgccggtcgctggccggcaatgccaaccaaggttggcatctaccagagcctggccacgcaggtgcaggtcggtcagccgccccacccggtcgtgccggccgctggccggcaatgccaaccaaggttggcagctaccagggccaggccacgcaggtgcaggtcggtcagctgccccgcccggtcgtgccggtcgctggccggcaatgccaaccaaggttggcatctaccagagcctggccacgcaggtgcaggtcggtcagccgccccacccggtcgtgccggccgctggccggcaatgccaaccaaggttggcagctaccagggccaggccacgcaggtgcaggtcggtcagctgccccgcccggtcgtgccggtcgctggccggcaatgccaaccaaggttggcatctaccagggcctggccacgcaggtgcaggtcggtcagccgccccgcccggtcgtgccggccgctggccggcaatgccaaccaaggttggcatctaccagggcctggccacgctggtgccggtcggtcaactgccccgcccggtag

SEQ ID NO: 495597 - DNA, 186 bp, Stenotrophomonas maltophilia
atgaaagatctgttcgccgccgtctgcctggtcgcggtgctggaaggcctgttcctgttcgtcgcgccgttcgcctggaagcgcatggccgaacgcctgctggacctgcccagcccggccctgcgcagcttcggcggactggtgctgctggccggcctgagcctgctgtggtgggtgcggcactag

SEQ ID NO: 495598 - DNA, 864 bp, Stenotrophomonas maltophilia
atgaagagtcctatctggatcgccgtgatcgtggcggtggtgctgggcctgctcggctcggtgtatgtggtccgtgaggaccagaccgccatggtgctgaacctgggcaaggtggtgcggtcggacatcaagccaggcctgcactttaaggtgccggtggtggaaacggtgaaggttttcgaccgccgcttccaggtgctcgacaccgcgccggcgcgctacttcaccgccgagcagaaggacgtcagcgtcgacttcttcgccatcggctacatctccaacgtgggtgactacttccgtgccaccggcggcgacccgcgcgtggccaacgcccgcctggcgccgatcatcaccgattcgctgcgtaaccagatcaactcgcgcaccctgcagcagctggtgtccggcgaccgcagtgagctgatcgccgagcagttgaagggaatcaacgaggccgtggccggcctgggcatgcagatgatcgacctgcgcatcaagcaggtggacctgcccaccgacagccaggtgatcaacgacgtgtacgagcgcatgcgcgcccagcgcaagcaggaagccgccaagctgcgcgcggaaggcgaggaacagtcgctgaccatccgcgcccaggccgaccgtgacagcaccgtgctgatcgccgaggccgagcgcgatgcacagcgcctgcgcggtgagggtgatgcggaagccacccgcatctacggcaaggccggttcggctgatccgtcgttctacgcgttctaccgtagcctggaggcttaccgcggctccatgaccgacggcaacggcgtgatcgtgctcgacaagaacgacccgttcctgcagtacctgaagaacgaccgctga

SEQ ID NO: 495599 - DNA, 1134 bp, Stenotrophomonas maltophilia
atggcctggaatacacccggcggcaacaagggcggacaaggccccgaggacaatcgacgcgggccgttcgggtcgcgcggcggtggcaatggtggtggctggggcggactgcccgggccgctgaaggacctgttcgacggcggcatcgtgcgttgggtggtggcggccgtggtgctgctggtgctgttctccagcttccagctgatcggtgaacagcagcgtggcgtggtcctgcgcttcggccagttctcgcgcatcctgcagcccggcccgaacttcaagctgccgtggccgatcgagtcggtcaccaaggtcaacgccaccgagatcaagactttctcgatccaggtgccggtcctgacccgcgacgagaacatcgtcaacgtctcgctgaacgtccagtaccgcatcgacgatccgcagcagtacctgttcggcacggtcgatgccaaccaggtgctggagcagtcggcgcagagcgcggtgcgcgaggaagtcggccgcgccgacctcaatgccgtgctgaacaaccgtggcccgctggccgtggccgccgaggagcgcctgcaggcgctgctgaaggcgttcaagaccggcctgaccgtgaccggcctgaccctgcaggacgcccgtccgccggaggaagtgaagccggccttcgacgaggtcaatggtgcccagcaggtcaaggaacgcctgatcaacgaagcccaggcctacgccgccaaggtcgtgccggaagcccgaggccaggcctcgcgcgcccgtaccaccgccgaaggctacaagcaggcggtggtgtccaaggccgagggtgacgcgcagcgcttcagcctgttgcaggcccagtacaaggacgcgccggaagtgacgcgcaagcgcctgtggctggagaccgtgcagcaggtgctgagcgagaaccgcaaggtgatcggcggcgatggccgccagctgatctacgtgccgatgaccggcgacacccgtcccaccacgtcggccccggccgcagtggcaaacccggacgtggtcatgccgtcgctgccgggcgcagcggtggaagcttcccgtgatccgggccggccggtgggccgcccgaccgggcgaccgagcggccgtgaggagggcagccgatga

SEQ ID NO: 495600 - DNA, 996 bp, Stenotrophomonas maltophilia
atggcccccaccaccccgttcaccgccttccgcatcgaaaacgacgacgccggctatcgcagcggcctgacccggctcggtgtcgacgacctcaaccccgggcaggtgctgatccgcgcccactggtcctcggtcaactacaaggatgccctggccggcaccggcaaggggaagatcctgcgccgcttcccgctgatcggcggcatcgacgtggccggcaccgtggtcgccagcaccgacccggcctggcgtgaaggcgacgcggtgctggccaccggctgcggcctcagcgagacccgtgacggcggctacagccagtatgtgcggctggagtcgcgtgcggtgattgcacagccggccgggctgagcccgcgcgaggcgatggtgctgggcaccgccggcttcacggcggcgctggcgctgctgcgcatgcaggacaaccgccagaccccggagctcggcccgctggcggtcaccggcgccagcggcggcgtcggtgcgctggcgctgtcgatcttcagccgtgccggctacaccgtgcacgcggtcagtggcaagccggaccagaccgacttcctgcgcgacatcggtgccagcgaggtgctgccgcgcgaggcgctggccgacaccggcccgctgcagtcggcgcgcttcggcgggggcctggacaatgccggcggcgccatgctcgccagcctgctggcgcagaccgtgccctacggcagcgtggtcagcgccggcctggcggccagcccgacgctggacatgacggtgatgcccttcatcctgcgcggtgtgtcgctgctcggcgtctcttcggccaatgcgccgcgccggctgcgtgaagaggtgtggtcgcgcctgggcggtgagtggaagccgcagcacctggaccgcatctgcaccgccgaggtcggccttgatggcctccgggcagtgttcgagcggatgctggcgggtggatcgctgggccgcacggtggtgcggatcgactga

SEQ ID NO: 495601 - DNA, 372 bp, Stenotrophomonas maltophilia
atggcacgcattctgatcgtcgacgactcaccgtcgcagctgttggggatacagcgcatcgtcgagaagctcgggcaccagatcctgaccgccaccgatggcgccgccggggtcgaaaccgccagggccgagctgcccgacctggttttgatggacgtggtgatgcccaatctcaacggcttccaggccacccgtaccctcgcccgcgacgaggcgacccggcatatcccggtgatcctggtgaccaccaaggaccaggacaccgatcgcatgtggggcatgcgccagggcgccaaggcctacatcaccaagccgttctcggaagacgagctgtccgaggtgctggagcgggtgttcgccggccagggctga

SEQ ID NO: 495602 - DNA, 888 bp, Stenotrophomonas maltophilia
atggaattcaaggattactacgccaccctgggggtggaaccgagcgcgggcgaggcggagatcaagaccgcctaccgccggttggcacgcaagtaccacccggacgtcagcaaggaggccggggccgaagacaagttcaaggcggtcaacgaggcctacgaggcgctgcgcgatccggaaaagcgcgcagcctacgaccagctgcgcgcgcagggctatcgcccgggcgaggagttcaacgtgccgccgaactacggcggcgccggcggtttcaatttcgaggaagtattcggcggtggtggccccaacggcggcttcagcgacttcttcgaaagcctgttcgcgcgccagcgtggcggtgccggtccgggcccgggcttcagcagccagggccacgcacccaaccgcgacacccgcgccaagctgtcggtcccgctggaagcggcctacagcggcgacagcctgcgcatcaccgtcaacggcaagcagctggacgtgcgcgtgcccaagggcatccgtccgggccaggtgatccgcctggcagggcagggcaaccatggcggcaacctgctgctggaagtggagtacgccgcgcatccgcagttcgaggtcgatggccgcaacatcctctatacgttgccggtcacgccctggcaggccgcgttgggcaccagcatcagcgtgccgaccctgggcggtgcggtggagctgaagatccccgccgactccgatgccggccgcaaactgcgcctgcgtggccggggcctgccgggcagcccggacggcgaccagatcgttgaaatcgagatcgtggccccggccgcgaccgacgaggcgcagaagaaggcctaccgcaatctggccaaggccttcggcgaggccatttga

SEQ ID NO: 495603 - DNA, 483 bp, Stenotrophomonas maltophilia
atgaccatccatgtcggcgaccacattccggaagtgaccctcaagcgcatccgcgagggcatcgaaacacttgatacgcattcgctgttcgacgcccgcaaggtcgtcctgtttgcggtgcccggcgcgttcacccccacctgctcggcccgccacctgcccggctacgtcgaaaaattcgaggccttccgccagcgcggcatcgatgtctactgcgtggcggtcaacgacccgttcgtgatgaaagcctgggccgccgaccagaaggtgcccgacggcctgctgatgctgtccgacggcaatgctgagctgacccgcgcgctcggcctggagctggatgccagcgcctcgggcatgggcatgcgctcgcgccgcttcgcgctgtacgtggtcgatggcgtggtgcgtgcggcctggatcgagcagccgggccagttcgaggtgtcttccgccgagtacgtgctggagcacctgcctacctga

SEQ ID NO: 495604 - DNA, 576 bp, Stenotrophomonas maltophilia
atgtccagcaagccagccaaagccagcaagcccgccgccgggattcccggcatcagtgaccgtcagaccctgcgcgagcgtgcccggcacaacatcgaagacggcgcgatcaccgacagctacagcgccgaccgcaaggtggtgatcaagctgctcaacgatgccctcgccaccgagtacgtgtgcgtgctgcgctactaccggcactatttcatggccaagggcatgctggccgacgcggtcaaggccgagttcctcgagcatgcacagcaggaacaggcgcacgccggcaagctggccgagcgcatcgtccagcttggcggcgagccggacctgaacccggatacgctgaccacgcgctcgcatgccgaatacaaggaaggcagcgacctgcgcgacatggtgcgcgagaacctggtggctgaacggatcgccatcgacagctaccgcgagatgatcaacttcatcggcgaccgcgataccaccaccaagcgcatccttgaagagatcctggcgcaggaggaagaacacgccgacgagttcgccgacctgctggacgggtggatcggggagtag

SEQ ID NO: 495605 - DNA, 2382 bp, Stenotrophomonas maltophilia
atgaacaacacgatgccgatccggctggcggccctgcgccgccggctgcagccgctgtggccctggctgcgctggggtacggccgccacgctggtgctgctgctggtgctggatttcgccttcccgccaccgctgccgaagcagcgtgataccagcaccctggtggtggctgccgacggcacgccgctgcgtgcattcgccgatgccgagggcgtgtggcgctacccggcttcgatcaacagcgtctcgccgctgtacctgcaggcgttgctgacctatgaagaccgctggttctggcggcatccgggcatcaacccgctggcgatcctgcgtgccagcggccagctgctgcgtggcggccgcatcgtttccggtggctcgaccctgaccatgcaggtcgcccgcatcctcgatccgcatacgcgcacgccgtggggcaagctcaagcagatgctgcgcgcggtgcagctggaagtgcacctgagcaagcagcagatcctggccctgtatctggagcgcgcgccctacggcggcaccatcgagggggtggaagcggccagctgggcctacctgggcaagccggcggcgcagctgtcgcatgccgaggccgcgttgctggcggtgctgccgcaggcgccgagccggctgcgcccggaccgtcatccggaagcggcgcagaaggcgcgcgacaaggtgctgtcccgcatgaacgagctgggcgtgtggacggcggacgaagtggaagacgcgcgcatcgagaacgtggtggcgcgctcgctgcgcccgccgctgcacgccgcgctgctggcgcagcgcctgcactcggcgcatccgggccaggcacgcatccagagcagcatcgacatcggcctgcagcgcacactggaagaacgcgtggccagctatttctcgacgctgcctgaacgcacctcggccgccctgctggtggtcgacaaccagaccctgcaggcgcgtgcctatgtcggcacgctggcgttcggtgaccggcagcggctgggccacgtggacatggtgcaggcctggcggtcgccgggctccacgctcaaaccgttcctgtatgccatggcgctggacgatggcctgatccattcggaaagcctgctggtcgatgcgccgcagagtttcggcagctaccgccccggcaacttcgacatggccttcaatgggccgattggtgcctccagcgcgctgcggctgtcactcaacgtgccctcggtggacctgctgcagcgggtcggtccggcgcgcttcgccgcacgcctgtcgcactccggcatccagctgcgcttcccgccgggcagtacacccaacctgtcgctgatcctgggcggcaccggcgcacgcctggaagacctggtcggcgcgttcgccgcgctcaaccgcaacggcattgccggccgcgtgcgttacgccgacgacgagccgatgatcgagcggcgcctggcctcgccgggtgccagctggatcgtgcgcgagatgctggaatcgaatccgcggccggggtatagcgtcgggacgttcgatgtcggtggccgcccgcgcgtggcgtggaagaccggcaccagttacgggtaccgcgatgcgtgggcgatcggcagcacccgccactacaccgtgggcgtgtgggtggggcggccggacggcacaccgctaccgggccagtacggcgcggtcaccgcgctgccgctcatgttcgaggtggtggacagcctgccgcgccagcgcggtgattcagctgctgcaccgatgccggccagtgtcagccaggaggatgtctgctggcccaccggcgaacgtgccgagggcctgccagcggcgctgtgccagcggcggatgtcggcctatctgctggacggtgcggcaccgccgaccttccccgagcgcgaggcgcggcgctggcagccagggcggcagcgttacctggccgacgcgcggaccggtctgcgtgtatccgctgattgccgtttgccgcatcaggaagtcgcgcgggagatcgcgcgttggccggcgttgttgtcgccgtggctgccgaaggccacgcgcgaggcttcgcagctgccggcgctgtcgccggactgccgcgacgacgggcgtgaggccagcgtcgcgctgcacgtggacggggtcaatgacggcgccacgctggcgcgcgcgccgaattccgagcacggcgtgcgcctgcagctgcgcgcgctgggcagcgagcaggcggtggactggctgctggatggacgctggattgcacagacccacggcgcgcagctgatgcagcgtgagttcgccgatccgggcgcacacaccctgaccgcgctggcagccgacggcgcgtggacgcaggtgcggttcaacgtcctgcgatag

SEQ ID NO: 495606 - DNA, 4908 bp, Stenotrophomonas maltophilia
atgagcggtccggcacggcggaagcggtggggatgggcggcggccgtactggcaggaggcctgttgctggggctggccggctgccgcaatgacagcgggcagctgcccaaggccagtggtgaagccatcaccaccaaggccgagcaggtgaaggaattcaccctgctgcgtgcctacccggaccagaagaatgacggcctgtcgctggcgctggagttctcgcgcccgctggtcggcacccaggatttcgacaaactcgttcgcttcgaagagaaggtcggcaccgaggacagcagctggaccctgtccgatgacggcctgaccctgcgttacccgttcgtcgaggccggcaaggagttcagcctggtggtctcgccggacctgctggccgccgacggcagccggctgggcaaggaactgaagcagaaggtgttcagcggcgagctgaagccggtggtcggtttcgcctcgcagggcagcgtgctgccggccaaggacagccgcggcctgccggtggtctcggtgaacgtgccggaggtcgacgtcgagttcctgcgcgtgcgcgagaaggacctgccgaccttcttcagccagtaccagcgcggcggccgccgtggcagctgggagctcagcagcgactacgagcgcagcccgatcaacaagctggccgagccggtctacgtcaaccgcttcatcctgggtggcaaacagaacgagcgggtgctgacctacctgccgacccaggacatcaaggaactgcaggagccgggcctgtacttcgccctgctcaagcgcaccggtgactacgagggcgagttcgataccgcgttcttctcggtcagcgacatcggcctgcatacccgcgcctacaaggacaagctgttcgtgcacaccgccggcctcaaggacggtgcgccgctgaagggcatcgacctgcgcgtgctcgacgccaagggtgaggtggtgctgaagggcagcaccgacggcaacggcaatgcgctgctgaactacaccctggatgccacccacgtgctggtcgccagcagtggcaaggacaccagcttcctgccgttcaaccagccggcgctggacctgagtgagttcgccgtggccggtcgtgacaacgcctggttcgacgtctacgcctggtccggccgcgacctgtaccgcccgggcgagaccgtgcgcctgtccgcgctgctgcgcgacaacgacggcaagccggtcaaggcacaaccggtgttcctgcgcctgaagcagcccgacggcaagaccttccgcgagacccgcctgcagccgggcgaccagggctacatcaacttcgagcaggtgatccccgccgaggcgccgaccgggcgctggcaggtcgagttccgcaccgacccggccagcaaggaagcgatccagggcatgaccctgcgcatcgaggagttcctgcccgagcgcatgaagctggacctggacagcgcgcagaagacgctgaagccgggcgagggcctgcgcctgcaggccaacggcgcctatctgtacggcgcgccggccgatggcaaccgcttcactgcgcgcatggcggtggctgccgagcagaagccggtggagggcctgccgggctatttcttcggtgacccgaccctgcagctgccgcgcgaggccaaggacgtgatcgataccacgctgccggccaatggccagctgcgtgaggatgtggcgttgccggaagaggcggccaaggccaaggcaccgatcgccgtggtgttgtccggcagcctgtatgaaaccggtggccgcacggtcacccgtaccctgaagcgggtgatgtggccggccaacgcgctggtcggcgtgcggccgctgttcaaccccgacgatggtgctgattccaacggcaacgcacgcttcgaactgatgcgcgtggatgccgccggcacaccgcagccagccaagggcctgaagatcaccctggtgcgggaactgcgcgactaccactggaccttcaacgacaaccgctgggattacgatttcacccgccgtttcgagaacaaggaaacccgcaccgtcgatgctggaagcagtgcggtcgccttcgatttcccggtggagtggggcgagtaccgggtggacgtgttcgatccgtccaccggactgaccagccgctacccgttccgtgcgggctggagctggggcgatgacaaccgtggcctggatgcacgcccggacaaggtcaagctgggcctggacaagaccggctacaaggccggtgacaccctggaagtgacggtgaccccgccgcacgccggcaagggcatcctgatggtcgagaccgaccgcatgctgtatgtgcaggacatcgaggccaagccgggctcgaccttcaagatcccggtcaccgccgactgggaacgccacgacgtctacatcaccgcgctggtgttccgcggcggcagcgcgccgagcaagatcaccccggcccgtgccgtgggcgtggtgcatgtgccgatggaccgcaagggccgaaccgtggccgtcggcctggtcgcgcccaagcagatgcggccggaacaggacctgccggtaacggtcagcgcaccgcagctggccggcagggccgcgcacgtgaccgtctcggcggtggacgtgggcatcctcaacatcacccgtttcccggtgcccgacgccggcgcgcacttcttcgcccagcgtcgcctcggtatcgatgcctatgacatctacagccgggtgatcgagagcttcgatggtggcagcggcaagctgaagttcggcggcgacatggcgctgcaggcgttgccgcaggccaagcgcccgaccgcgcgcgtgcagaccgtggacctgttctccggcccggtgcagctcgatgccaagggcaatgcccgcatccgcctgaaggtgccggacttcaacggcaccctgcgcgtgtcggcgctggtctacagcgatgaccagtacggcaagcgtgacgtggaaaccatcgtgcgcgccccgatcctggccgaagccagcatgccgcgcgtgctggccccgggcgaccgcagcaccgtgaccctggacgtgcagaacttcaccggcaagccggggcagttcaacgtcaaggtggaaagcgagggcccgctgaacctgggtgagggcagccgcagcgtgcagttgaatgccgatgccaagaccacgctgagcttcccgttgtcggctcgcgagggccacagcgtggccaaggtgcgggtgcgggtggacggcaacggcttcaaggctgatcgccgctacgacctgccggtgcgtgcggcgtggccgcaggtgctgcgttcgcaggtgcgcacactcgatccgctggccgcggtcagcctcgacaacagcctgaccgatggcctgatggcagagtcggtgaatgcccgcctgctggtcagcccgctgccgccgatcccgttcgccagtgcactgcagggcgcgctgaactacccgtatggctgtgccgagcagaccaccagcaagggttacgccgcgctgatcctggaccaggcgacgtcgtcgatgctcggtgccgacggcctggatgccaagacccgtagagagcgcatggaaggtgcgtttggtcgcctggcgtcgatgcaggtggccaatggcaacttctcgatgtggggtgacgacggctacgtgaacccgtggctgaccccgtacatcaccgagttcctgcttgatgccaaggacgccggcttcgccgtgcccgacaacgtgctgcagaaggcgctcaaccggctcagcgaggatctgctgtccggcggcaatcagttctatggccaggaggatcgcgagaagctgaagttcgccaaccaggcgtattcgggttacgtgctggcccgggtcaaccgtgcgccgctgggtaccctgcgcacgctgtacgacaacgagcgcagcaaggcggtcggtggcctgtcgctggtccacctgggcgtggcgctgtcgctgcagggtgatgccaagcgtggccaggccgcgctggcggcggccttcgccaagtccagcagtgaacgtccgtcgtacttcggcgactacggcagtgcgatccgtgatgacgcgctgatgatcgcgctgacccatgaaaacaagctggccaagccggcctgggatgcgcgtgcggtcgatctcggccgtggcctggatgcgcgccgcaacgccggctggatgtggctgagcacgcaggaacaggtggcgattgcccgcctcggcaaggcgctggccgccaaccagaaggcgctggtggccggtgagctggtgatcggtggcaacaccgaagccatcggcgagcgcaagctgttcggccgcaacttcagcgccagtgagctggccagcggcgtgcgcttcaccccgcaggggcagccgccgatgttcgccagcattgatgtggccggcatcccgcgcagcgcaccggcaccggacaacagtgtgctgggcgtcgagcgcagttactacggcaccgatggcaagccgtggtcgccgcgcccgctgaaggaaggcgaagcgctgatcgtgcgcgtcacggtgactgccgacaccacgatgcccgatgcgctgctgaccgacctgctgccggcgggcctggaaatcgagaacttcaacctgggcgacgccaagcagtgggccgacgtggtggtcgatggcataaccatcagcgaccgtggtgaggccgccgacaccaagcacgaggagttccgcgatgaccgctatgtggccgcgctgaagctctcgcgtggcagcaaggccaacgtgttctacctggtacgcgcggtgacgccgggaacctactcggtgccgccgccgctggtggaggacatgtaccggccgcagctgcgcggcgtcggccgcagcaacccgaccacgattacggtggtacagccgtga

SEQ ID NO: 495607 - DNA, 1461 bp, Stenotrophomonas maltophilia
atgtctgacagccacaccccatccaacgagcgtgcagcgtgggatgcgctgctggtggacatcgtcgattacgtacgcgacgcgcgcatcgactcccccctggccttccagaccgcgcactactgcctgctcgacacgctgggctgcgggttggaagcgctgtccttcccggcctgcagcaagctgctcggtccgctggtgccgggtatcagcgtggtcaacggggcgcgcgtgccgggtacgcactacgtgctggacccggtgcaggccgccttcaacctgggcgcgatggtgcgctggctggatttcaacgacacctggctggccgccgaatggggccacccgtcggacaatctgggcggcatcctgtctgtctgcgattggctggggcgcaacgcgcaggccctgcatcgcccagcgccgaccctgcatgacgtgctgctggcgatgatcaaggcacacgagatccagggcgtgctggccctgcagaattccttcaaccgggtcgggctggaccacgtggtgctggtcaaggtggccaccaccgccgtggttgcgcagctgctcggcctggatcgcgaacgcatgctcaatgcactgtcgctggcctgggtcgatggccaggcgctgcgcacctaccggcacgcgcccaacaccggctcgcgcaagagctgggcggccggcgatgcgaccagccgtggcgtgcgcctggcgctgatggcggccagtggcgagatgggctatcccagtgtgttgagcgcgccgacctggggttttgaagcggtatcgatgcagggcaaggcgctgacgctggagcgaccgctgggcagctacgtgatggaaaacgtgctgttcaagatcagctacccggccgagttccatggccagaccgcggtggaggcggcgatcacgctgcatcagcagctgcgcgcgatggggcgtcgggtcgaggacatcgcgcacatcgccatccgcacccaggaagcctgcatccgcatcatcgacaagcaggggccgctgcacaacccggccgaccgcgaccactgcgtgcagtacatggtcgccatcgcgctgctgcatgggcggctggtggcccaggactacgaggacgacgttgccgccgacccgcgcatcgacgcactgcgcgcgaagatggcctgtcacgaggatccgcagctcagcgccgactacctggacccggacaagcgcagcatcgccaacggcctgagcgtgcgcttcagcgacggcactgagctgcccgaggtactggtggaatacccgctgggccacgcgcgccgacgcgaggagggcatcccgttgctgatggacaagttccgccggcacctggcccatcgcttcccgaccacccagcagcagcgcatcctggccgcatcgctggatccggtggcgctggcggcgatgccggtgaccgactatgtggacctgtacctgccggggtag

SEQ ID NO: 495608 - DNA, 1179 bp, Stenotrophomonas maltophilia
atgaccttcctcccgcaactccgtattcccgccacctacatgcgcggcggcaccagcaagggcgtgttcttccgcctgcaggacctgcccgaagccgctcaggtgccgggcgccgcgcgcgatgcgctgctgatgcgcgtgatcggctcgcccgatccgtatggcaagcagaccgacggcatgggcggtgccacctccagcaccagcaagtgcgtgatcatctccaccgcctcggtgccggaccacgatgtggactacctgtacggccaggtctcgatcgacaccgccttcgtcgattggagcggcaactgcggcaacctcagtacggcagtgggtccgttcgcgatcaccaatgggctgatcgatccggcccgggtgccgcgcgatggcctgtgcaccgtgcgcatctggcaggccaacatcggcaagaccatcatcgcccacgtgccgatgcgcgatggcgaagtgcaggagatcggcgatttcgagctggatggcgtgaccttcccggccgccgagatccagctggagttcatcgatccgtccgatgacggcgatgcgggcgcgatgttcccgaccggcaacctggtcgacaccttggacgtgccgggcgtcggcagttttgaggtgaccatgatcaccgccggcattccgaccatcttcctcaatgcggccgacctgggctacaccggcaccgaactgcagcctgcgatcaacgaggacaagggggcgctggagcgcttcgagaagatccgcgcctacggcgccttgcgcatgggtctgatcaggaacctggaagatgcggccacccgccagcacacgccgaaggtggccttcgtggcgccggcacaggactacgtgtcctccagcggcaaggccattccggcctcggccatcgacctgcacgcgcgggcgttgtcgatgggcaagctgcaccacgcgatgatgggcaccgccgccgtggcgatcggcacggcggcggcgattccgggcacgctggtcaatcgcgcggccggtggtggtgaacgcgaagcggtgaccttcggccacccttccggcacgctgcgcgtgggtgcgcaggccggccttgttgacggccagtggacagtgaccaaggccatcatgagccgcagcgcccgcgtattgatggaaggcaaggtgcgggtgccggccgaataa

SEQ ID NO: 495609 - DNA, 288 bp, Stenotrophomonas maltophilia
gtgaaggcgattgaatggcggccaagggccgaagccgacgcagccgatgccgcgctgtggtctgcacggcaaggtgggctggtactgggtcgccgctttctcgccgagttggaggccacgcttcaacgcatcgcggtgtttccaggctcggcttccacccggcacgccgacctcgcagcacagctgccggtgccgttgcggttcatgctggttccgggcttcgaacgctacctcgtctattacctcgatctaccggaccgcgtggacatcatgcgtgtggtgcgttga

SEQ ID NO: 495610 - DNA, 258 bp, Stenotrophomonas maltophilia
atggccaccatgaacatttcgctgaccgacccgctcaagcagttcgtggacgaggaagtgcgtgaaggcggctactccagtacgtcggactacgtgcgtgacctgatccgccagcgccagcgcagcaaggccgaagagctgctcaagcagttgatagccgaggggctggcttctggtccaggcgttgcggtgacggccgacacattcgagcgcatgcgtcgcgaactaaccgaaaggatggagcgtgaaggcgattga

SEQ ID NO: 495611 - DNA, 2619 bp, Stenotrophomonas maltophilia
atgaataccgattaccgcaagaacctccccggcagcgcgctggactatttcgacgcgcgcgccgccgtcgatgcgatccagcccggcgcctatgccaccctgccgtacacctcgcgcgtgctggccgagaacctggtgcgccgctgcgatccggccacgctcggcgattcgctgaagcagctgatcgagcgccgtcgcgacctcgacttcccgtggttcccggcacgcgtggtgtgccacgacatcctcggccagaccgcgctggtggacctggccggcctgcgtgatgcgatcgccgacaagggcggcgacccggccaaggtcaatccggtggtgccggtgcagttgatcgtcgatcactcgctggcggtggaatgcggtggctacgatccgcaggcgttcgagaggaaccgcgccatcgaggatcgccgcaacgaagaccgtttccacttcatcgactggaccaagcaggcgttccagaacgtggacgtgattccgccgggcaacggcatcatgcaccagatcaacctggagaagatgtcgccggtgatctacgtgcaggacggcgtagccttcccggatacctgcgtgggcaccgacagccacaccccgcacgtggacgcgctgggcgtgatcgcgattggtgttggcggcctggaagcggagaacgtgatgctgggccgcgcgtcgtggatgcgcctgccggatatcatcggcgtcgagctgaccggcaggccgcagccgggcatcaccgccaccgacgtggtgctggcactgaccgagttcctgcgcaaggaacgcgtggtgggtgcgtatcttgaattcttcggcgagggggcgtcggcactgaccatcggtgaccgcgccaccatctccaacatgtgccccgaatacggcgccaccgccgcgatgttctatatcgacgggcagaccatcgattacctgcgcctgaccggccgcgaggaatcgcaggtggcgctggtggagaactatgcacgcaccaccggcctgtgggccgatgacctggccaccgcgcagtacgagcgcgtgctgcgcttcgacttgtccagcgtggtgcgcaacatggctggcccgtccaacccgcacaagcgcgtggccactgccgagctggccgagcgcggcatcgccgacgaagccaagctggcagcgggcagggccgagcaggcgcagggcctgatgcccgacggcgcggtgatcatcgccgccatcaccagctgcaccaacacctccaacccgcgcaacgtgatcgctgccgcactgctggcgcgcaaggccaacgaacgtggcctgctgcgcaagccgtgggtgaagtcgtcgctggcgccgggctcgaaggcggtgcagctgtacctggaagaatccggcctgctgccggacctggaaaagctcggcttcggcatcgtcgccttcgcctgcaccacctgcaacggcatgagcggcgcgctggatccggccatccagcaggagatcatcgatcgcgacctgtacgccacggccgtgctgtcgggcaaccgcaacttcgatggccgcatccacccgtatgcgaagcaggccttcctggcgtcgccgccgctggtgatcgcctatgccatcgccggcaccgtgcgcttcgacatcgagaaggacgtgctgggcgtggatgccgatggcaacgaggtgcgcctgaaggacatctggccgagcgatgccgagatcgacgcggtggtgaaggcctcggtgaagcccgagcagttccgccgcgtctacaacccgatgttcaacgtgcgcgtggagcatggcgcggcggtcagcccgctgtacgactggcgcccgcagagcacctacatccgccgtccgccgtactgggagggcgcactggccggtgagcgcacactgtcgggcatgcgtgcgctggcggtgctgccggacaacatcaccaccgaccacctgtcgccgtccaacgcgatcctggcgtccagtgccgccggcgaatacctggcgaagatgggcctgccggaagaggacttcaattcctacgccacccaccgcggtgaccacctgaccgcacagcgcgccaccttcgccaacccgaagctgttcaatgaaatggtgcgcaacgacgatggcagcgtgaagcagggttcgctggcgcgcgtggagccggaaggcaaggtgatgcgcatgtgggaagcgatcgagacctacatggaccgcaagcagccgctgatcatcatcgccggtgccgactatggccagggcagctcgcgtgactgggccgccaagggcgtgcgcctggccggtgtggaagcgatcgtggccgaaggcttcgaacgcatccaccgcaccaacgtgatcggcatgggcgtgctgccgctggagttcaagccgggcaccacccgcctgaccctgggcatcgacggtaccgagaccttcgacgtgatcggcgagcgcaccccgcgcgccgacctgaccctggtcatccaccgccgcgacgggcaggacgtgatcgtgccagtgacctgccgcctggacagcgacgaggaagtggcgatctacgaagccggtggcgtgctgcagcgcttcgcccaggacttcctggaaggtgccaaggtggcgtga

SEQ ID NO: 495612 - DNA, 1158 bp, Stenotrophomonas maltophilia
atgaacgatacgaccgcaaccccgaccttcaagccgaagaagtccgtcgccctgtccggcaccgcggccggcaacaccgcgctgtgcagcgtgggccgcagcggcaacgacctgcactaccgcggctatgacatcctggacctggccaacaccagcgagttcgaggaaatcgcctacctgctggtgcacggcaagctgccgacccgcgccgagctggtttcgtacaaggccaagctgaagtcgctgcgtgggatccccgccgcggtgaaggccgcgctcgaagagctgccgccgtcggcgcacccgatggacgtgatgcgcaccggcgtgtccgtgctcggctgcgtggcaccggagaaggacgaccacaaccacccgggcgcgcgcgacatcgccgacaagctgatggcctgcctcggttcgatgctgctgtactggtaccactggagccacaacggccgcgccatcgatgtggaaaccgacgatgattcgatcggcggccacttcctgcacctgctgcatggcgaaaagccgcaggattcgtgggtgaaggcgatgcatacctcgctgatcctgtacgccgagcacgagttcaacgcctcgaccttcacctgccgtgtcatcgccggtaccggcagcgacatgtacagcgcgatctgcggtggcatcggtgcgctgcgtggcccgaagcatggcggcgccaacgaagtggcgttcgaagtgcagaagcgctacgacaacccggatgaggccgaggaggacatcaaggcgcgcgtcgagcgcaaggaagtggtgatcggtttcggccacccggtctataccgtctccgatccgcgcaacaaggtgatcaaggacgtggcccgcgagctgtccgaagaacagtcgagcatgaagatgtacgacatcgccgagcgcctggaatcggtgatgtgggacatcaagaagatgttcccgaacctggactggttcagtgcggtcagctaccacatgatgggcgtgccgaccgcgatgttcaccccgctgttcgtgatcgcgcgcaccgccggctggagcgcgcacatcatcgagcagcgcatcgacggcaagatcatccgcccgagcgccaattacatcggtccggaagaccgcgacttcgtcgccatcgacaagcgcgtctga

SEQ ID NO: 495613 - DNA, 939 bp, Stenotrophomonas maltophilia
atggtgcttgcgcttccttatccgtacttcaacctggatcgtcgcatgaccgcttctgcccctttctccgccggtgcccgcttccgtgaggcgctggctgccgaatcgccgctgcaggtgatcggtgcgatcaacgccaaccacgccctgctggccaagcgcgccggcttccgtgccatttacctgtccggtggcggcgttgccgcaggctcgctgggcctgccggacctgggcatcaacaccctggaagacgtgctggtggacgtgcgccgcatcaccgatgtctgcgacctgcccttgatggtcgacatcgacaccggcttcggcccgagcgcgttcaatatcgcgcgcaccgtgaagtcgctgatcaaggccggcgcggccgcctgccacatcgaggaccaggtcggtgcgaagcgttgcggtcaccgtccgggcaaggagatcgtctcgcagggtgaaatggtcgaccgtgtgaaggccgctgccgatgccaagaccgatccggacttcttcctgatcgcgcgcaccgacgccatccaggtggacggcgtggacaaggcgatcgagcgcgccatcgcctgtgtcgaggccggtgccgacggcatcttcgccgaggccgcctacgatctggatacctaccgccgcttcgtcgacgcggtgaaggtgccggtgctggccaacatcaccgaattcggcgccaccccgctgttcagccgcgatgaactggcctcggccggcgtcgccatccagctgttcccgctgtcggcgttccgtgccgccaacaaggccgccgagaacgtctaccaggcggtgcgccgcgatggccaccagcgcaacgtggtggaaaccatgcagacccgcgaggaactctacgaccgcatcggctatcacgccttcgagcagcagctcgatgcgctgttcgccgccaagaaataa

SEQ ID NO: 495614 - DNA, 1584 bp, Stenotrophomonas maltophilia
atgtatctgccccgctcccccctgcgccatgccgatgccgaccccggccgtccggtgatctggacggtcagcgtctcgcggctgaccggcctgctcggcgacgtgatccccgagttcgaccgccgcgcgcgtatcgaacagatcaacctcggcttcgaggaagcggtggaggtgatcggccaacgcctgcgccgcgagcactgcgacgtggtcatcgctggcggctccaacgcggcctggctgcgcggccggctggaactgccgctggtgccgatccaggccaacggcttcgacctgatggaagcgctggcccgggcacggcgtatcgccagccgcatcggcctggtcacccacgccagcgacgtaccggtgttcagcaacttccagcagagcttcggcctggatatcgagcatcgccgcttcgtcacccgcgaggacgcccgcgactgcatcgccgacctgcgcgccaacggcatcgaggtgatcgtcggcaccggcatggccatcgaccacgccgaacaggccggcctgcccggggtgctgctgtattcggccgactcggtgcggcaggcgttcgaacatgcgctggaactgacccagaccctggcacgttccggcagcaaccgcgctgcaccgcgccggcgcccggcagcgcgtgccgatgcgcatgaactgctcggcgacagcgacgcgatggcgcaggtgcgcgcgcagatcgcgctgtatgccccacatgacagcaccgtgctggtcagcggcgaaaccggcaccggcaaggagctggtcgcacgccagctgcacgccgccagcggtcgtcgcggacgcttcgtcgcgctgaactgcggcgcgatcagcgaatcgctgctggaagcggagctgttcggctacagcgatggcgccttcaccggcgcacgtcgtggcggccgcgttggcctggtggaagctgcagatggcggcaccctgttcctggacgaaatcggcgaactgccgctgccgctgcagacccgcctgctgcgggtgctggaggaacgtgaagtgctgcgcgtgggtgccaccgaaccgacgccggtggacctgcgcgtggtcgccgccaccctgcagtcgctggagcagcgcgcggcgaccggcagcttccgccgcgacctgtattaccgcctggccgcgctgcggattgccctgccctcgctgcgcgcccgacgcggtgacatcccgttgctggcgcagcatttcttccgccagctgcgtggcatcgacgcgccattggatgaggcggcgctggcggtgctgtgcgcggccgagtggccgggaaacgtgcgcgagctgcgcaatctggtcgatcgcctgcgcatccactggcagcccggtgaagggctgatcgatacggcgcggctgctgcagctggcacccgagttggtgcatgaaggtgtcgcggcgttgccgctggaaagcaacggcaggcgcccaccgcgggctacgctggaagcactgttgcgggaacaccggcatgatcgcgagggcatggcgcaggcgctgggcgtgtcacgcaccacgctgtggcgctggctgcgcgcggaggacctgtaa

SEQ ID NO: 495615 - DNA, 453 bp, Stenotrophomonas maltophilia
atgccctcctggcgttgcctgtttgccgtgccgccaccacgccgcggcgtggaagcgttgttgttgctgctcgcccgcatcgtcgccggggtgatgttctgtgtttccggctggaacaaggtgttcaccgacgccgggcgcgagcgcatggtgcatacgctggtcgacgccggtatcccattcccggtgttcagtgcgccggtactcggtgcgatcgagtggattgcgggtggtctgctggtgctgggccttttgagccgcccctcagccctgctgctggcggcgatctgcgtagtggctgcgctgaccgatggcatcgcgcgcattccggcagggcttggcgtgctggattggctgagctggttcttctacctgagcgaagtgccgctgggcgtactgctgctgtggattgccgcagtgggtagtggacggttcgccatcgaagcgcgctga

SEQ ID NO: 495616 - DNA, 600 bp, Stenotrophomonas maltophilia
atgagcgacctgtacgccgaagccctgtccacgtttgccggcctgttcgacgaggccaaacagagccgcgaggtcgagccgaacgcgatgaccgtggccaccgccgatacgcagggtcgcccctcggcgcgcaccgtgctgctgaaggcgttcgatgagcgcggctttgtgttctacacccacctggacagccacaagggccaggagctgcaggccaatccgcaggccgcgctgctgttcctgtggcgcagcctgcgcgaggccggcatccaggtgcgcattgaaggccgtgtcgagcaggtcgccgatgccgaagccgacgcctatttcgccagccgcccgcggatgagccagatcggcgcgtgggcctcgcagcagtcgaagacgctggcaacgcgcgaggaattcgatgcgcgcgtggccgaggtcgaagcccgcttcgagggcaaggacgtgccgcgcccggagggctggagcggcctgcgcgtggtgcctgaccgcatcgagttctggtatggcgcgcagttccgcctgcacgagcgctggtgctatgaagccggcgccgaagggcgctggagcaagcgcctgctgtacccgtaa

SEQ ID NO: 495617 - DNA, 828 bp, Stenotrophomonas maltophilia
atggccgctgctgcgtatatgccccaggtgaaaggattccccgaaacattggccgaacaggcgctggatgatgcgctgggcagcggcgcagcggttccagtattggcgatcagcggcctgcaggggagcggcaaatcgacgctggcggcgcaggtggtggcccgtgcccaggcacgcggcctgaacgcagccacgctgtcgatcgatgatgtctacctgacccgcgcacagcgccaacggctggcccgccaggtgcacccactgctgatcacccgcggcccgcccggcacccacgacctgccgctggcccatgcggtattgaacgccgtggccgcacgccagcccttcgcaatgccgcgcttcgacaagctggccgacgagcgcctgcccgaagcacactggccgcagctgcagcaaccgctggacctgctggtattcgaaggctggttcctgggcacgcccgcgcaggatgacgacgcgctggacagcccgttgaacgcactggaacgcgaagccgacgccgatggccgctggcggcgctggtgcaaccaggcgctggcccgtgactacccggcgttgtggcagcgctgcgaccgcctgtggttcctgcagccgccggatttctcggtggtaccacgctggcgctggcagcaggagcagaacctgcaggccgcgcagccgggccggcacggcatgagccggccacagctggagcgcttcgtgcagtactacgagcgggtcagccggcaggcattgagcgccctgcccgccctggccgaccacgtggtggtgctggacggccagcgacaggtgcaggacgtgcgctga

SEQ ID NO: 495618 - DNA, 204 bp, Stenotrophomonas maltophilia
atgacggtcgccaaggtcatcgaaatcactgcgtcctcgccgaaaagcgtggaagacgccgtgcgcagcgggctgaagaaggtctccgagacggtcaagggcatccagggcgcctgggtgaacgagaccaaggtggtcaccaatggcagcggcgagatcaccgaatggcgggtcaacctgcgggtgactttcctggtggaatag

SEQ ID NO: 495619 - DNA, 543 bp, Stenotrophomonas maltophilia
atgaatcctgctccgaacctgatcctgatcggcccgatgggcgccggcaaaacctgcatcggccgccgcctggccgagcgtttcacgctggacttcgtcgatgtcgaccaggccatcgtcgatgccgccggcgccagcattccgaccatcttcgagcactccggcgaagccggcttccgcagccatgaacgccaggcgcttgcgcgggtactggaaggccgtggccagctggtctccaccggtggcggcgccgtgctggatccggacaatcgtgcactgatcgcccggcgcggcttcgtggtctatctgcgggtcagcgtggccgaacagctcgagcgcctggcccgcgacaagggccggccgctgctgcagcgcccggaccgcgagcaggtgctgcacgatctggccgcacaccgcgacccgctgtaccgcgaactggccgacctcaccctcgacaccgacccgtataccgctgccgatgcgaccgcccaactggtggtcaagctggccacgcaatggcagcgccaggacctgaccgcatga

SEQ ID NO: 495620 - DNA, 1113 bp, Stenotrophomonas maltophilia
atgacctcccccgccctgctgcaggtcgccgttggcggcgaccgcccctactccatcaccatcggcgccggtgcccaggccgatggcaccgcgctggcctcgcacgtgcgcggccgtcatgtgctgctgctcagcgacagtgaagtcgccccgcgctatctggcgccggtgaagcagacgctgctggccgctcgccccgacctggtcatcggcgagcacgtgctggccgcgggcgaagcctccaagacgctggccgagttcggccgcgcgatcgaagcgctggccgcgctcggcgccacccgcgacgcctgcgtcttcgccctcggcggcggcgtggtcggtgatctcgccggtttcgctgccgcctgctggatgcgcggcgtggactgcgtgcagctgccgaccaccctgctggcaatggtcgattcgtcggtgggcggcaagaccgcagtcgacattccggccggcaagaacctggtcggtgccttccatccaccgcgtgcggtcatcgccgatacccgcgtgctggccaccctgccgccacgcgagctgcgtgccggcctggccgaagtggtgaagtacggcgcgctgggtgatgccgtgttcttcgagtggctgcagcagcatgccgatgcgctgctggccggcgaggatgcggtgctggccgaggccatcgcgcgcagctgccggcacaaggccgccatcgtcgagcgcgacccgttcgaaaagggcgagcgtgccctgctcaacctcggccacaccttcggccacgccatcgagaccgaacagggctattcggccccgggccgcgatgcactgaaccacggcgaggcagtggcggtgggcatggtactggcggcgaagctgtccaccgacctgggcctggccgacgatgccgaccgcgcgcgcctgcaggccctgctggaacgcctcggcctgccggtggcgatcccgggcgggctggagccgcaggccctgctcggccgcatgcgcctggacaagaagaacgtggccggccgcctgcgcctggtgttgtggcgcgggatgggccgtgccgaagtggtgccggacgtggatgaggcggcggtgctgaaggtgctgtcggtccggtag

SEQ ID NO: 495621 - DNA, 240 bp, Stenotrophomonas maltophilia
atgcacgtttacctgcaacatcccgacgccggtgcgcaggcaccgcgcttcctgcgcctgagcctgctgccggacctgttcggcggctgggagctgctgcgcgagagcggccgtgtcggcagccgctcgcagctgcggcgcgagctgttcctgcaggccgacgacgcccgccacgccttcgagaaggcccgtgatgccgaactgcatcgcggcttccagatcctttcgcacggcgactga

SEQ ID NO: 495622 - DNA, 1074 bp, Stenotrophomonas maltophilia
gtgaccagccctctccgcaacgatcgcctgctgcgcgccctgcgccgcgaaccggtggactgcacccccgtctggctgatgcgccaggccggccgctacctgccggaataccgcgcgacccgggccaaggccggcagcttcctggccatggccaagaccccggagatcgcctgcgaagtcaccctgcagccgctgcgccggttcccgctggacgcggccatcctgttctcggacatcctcaccattcccgacgcgatgggcctggagctgtacttcgtcgaaggcgaaggcccgaagttccggcacccggtgcgtgacgaagccgccatcgcccggctggcggtgccggacatgcaacaggacctgggctacgtgatggatgcggtacggctgatccgccgcgagctggacggccaggtaccgctgatcggcttctccggcagcccatggacgctggcctgctacatggtggaaggcggcggcagcaaggatttcgcgcgcatcaaggcgatggcgctgaaccatccgcaggcgctgcaccgcctgctggaggtcaccaccgaggcggtgatcgcctacctcggcgcgcagcgcgcggccggtgcgcaggcgctgcaggtgttcgacacctggggtggcgtgctgtcgccggcgatgtaccgcgagttctcgctgcgctacctgcagcgcattgccgaggggctggagcgcggcgaaggcagcgagcgcacgccgctgatcctgttcggcaagggcaccggcctgcacctggaagcgctgtcgcagaccggcgccgatgcactcggcctggactggacgctggacctggacgaggcgatgcgccgcaccggtggccgcgtcgccctgcagggcaacctcgacccgaccacgctgtacgcctcgccggatgcgatcgccgcggccgccgcgcgcgtgctcgacacctatgccgccggcaacggcggctcgcgcgagggccatgtgttcaaccttggccatggcatgtcgccggacatggacccggcgcatgtacaggtgctggtcgacgcagtgcacgcgcacagccaacgctga

SEQ ID NO: 495623 - DNA, 1443 bp, Stenotrophomonas maltophilia
atggcggcccccacgctgcaccggccgcaccccatgtccacatcgccatcgacctacaaccgccagcgtcccctgctgtggctggtgtccctggcgatcttcatgcagatgctggactcgaccatcgtcaacacggcgttgccggcgatggcggccagcctgggcgagagcccgctgcagatgcagtcagtggtgttcagctatgcgctggcggtagccaccttcattcccgcctcgggctggatcgccgaccgctacggcacccggcgcaccttcctggtggcgatcatcctgttcaccctcggctcgctggcctgcgcgctggcccagcacctgcaccagctggtcggtgcgcgcgtgctgcagggcatcggcggtgcgatgctgctgccggtcggccggctggcggtgatgcgctcggtgccgcgcgaggatttcctgcgcgcgatgagcttcatcgccatccccgcgctggtcggcccgctgatcggcccgacgctgggcggctggctggtcgagatcgcctcatggcactgggtgttcctgatcaacctgccgatcggcgtgatcggtttcatcgccgcgatgaagatcatgcccgaccattacgccagccaccgcacccgcttcgacctgcgcggctacgtcatgctggccttcgcgatggtggtgctgtcgctggcactggacggcatctccggcctgggtacaccacacgcactggtgatgctgatgaccgtggctggcctggccgcgctggtgggctactggctgcacgccgccaactcgaccgcaccgttgttctcgctggccctgttccgcgtgcccagctaccgcatcggcattctcggcaacctgttctcgcgcatcggcagcagcgcgatgccgatgctgatcccgctgctgctgcaggtcggcctcggcctgggcccgatgcatgccggcctgatgatggtgccggtagcggccgccggcatggtctccaagcagctggcggtgaggctggtcgagcgcttcggttaccgccgcgtgctgatggtcaacaccgtgctggtcggcctggcgatggccagcttcatcctgatgacacccggccagcacctggcctggcgcctgctgcagctggcgttcttcggcgcggtcaattcgctgcagttcaccgtgatgaacaccgtgaccctgcgcgatctggaccgtgagttcgccagttccggcaacagcctgctgtcgatggtgatgatgctggccgccggtttcggcgccgcagccgccggcagcctgctggccgcgttcggcacccacctggacagcaccgacgccactgcggcgttgcatgccacgttcctgtgcgtgggcgcgatcacgctgacctcgacgatgatcttctggcagctgcccgacaccaagcccgaaccgcggcaggtcgagcacgtcgcggagtga

SEQ ID NO: 495624 - DNA, 3528 bp, Stenotrophomonas maltophilia
gtggtgtatctgcgggcggcgatgctgctgctggtcctcctgtgcggcgcgttgcccgctgcggcacagccggtgcctccgagcccgcggcaggtgacggtgttcgatggcctgccgtccaataccgtcaaccgcatggccgaggaccggtacggctacctgtggatcgccaccaacgatggcctggcccgctatgacggccgcacctaccgcgtgtggcgttccgaggatggactgcgtgacaaccgcatctggacggtgctggtcgatgcccgcaaccagttgtggataggcaccgagaacgctggcctggtgcgcatgtcggccgaccgccggcagctgcacttctacgaccgcagcagccagccgttgatgggcaccaacacggtctggagcctggccagcacgcctgatggctcgatctggttcggtacccacgaaggcggcctgtaccgcctggacagccaggaccgcctgcagcgcttcctgcccgagccgaacaatccgcgcagcctgccttcgtcgtcggtgccctacctggccacgctggccgatggcagcctgtggatcggcaccaagcatggcgtggcacgctggaccgggaccgacttcgagcgtgtcggtacggacatcattcccagcctgctgatcaacgggctgaccgccgagcccgatggcagcctgtggatcagcacgatggccggggccaccgtgcgccgcccggatggccgcttcgaggcaccaccgtggaagctgccgccaggcaagcaggtgctgggcatgatgctgcgcgacgagcagggcggacattggctggatacgcgcaccggtctgggacgtgcggtcgacggccagtaccagaccgtgccgctgtacagcgcgatcgcacgcggtccggtgcggccgaactggaccggtgcctatgaggaccgcgaaggtggcatctggctggccagcaccaatgccgggttgtggcacctgctgccacgctggtggcagttctcggtgctgtcgcggctggaggacgaccccagctcgctgcgcaatgcgctcgtgctgggcaccagcccgtccagcaatggcggtgtctggaccgtgggcagccatggcgcgctggaccgcttcgatccgaagaccggcaggatcgagcagcaccgcacctgggtcaacggcatgcactggctgacctcggtgcgcgaggaccggcgtggccaggtctggatcggatcgaccgatgcactggtgcgctacgacccgcaacggcgcgaactgcgtcgttggggccgtgatgccggtgccgatgcggcgatggaaggggtcatcgaagcgatgatgacctgcgacggcgacagcctctggttgatgctgcccgctggcctgcagcaacgtgatctcgacggacgcctgcggcgccagctggacaatggccagcgcggcctgcagcagggccagctcaacctcgatgtggaatgcggtccgcaggaccatatctggctggccagcagccgtggcctgctgcagtggctgccggaaagcgaacgcttccagccggtgccgggtgcgccggcaacggccatccatgcgttgcatgtgggccgtgacggccaggtctggttgtccgaggacgggcgcctgtcgcgataccgctggagccaggggcggctggaacggcaggcggtggtcggtgccgaacagggctatccggcgatctccgcctctggactggtggtggatgcgcagggcgtggcctgggcgaccagcgcacgcggcctggtacgtgtcagtgccgatgggcagagcgtgcgcctgtacggcgtgcacgacggcctgccaagccaggaattccgcgagcacaccttgatcgcagcggccgatggccacctggtggccggaacggcggcaggcgcagtggtgttcgacccggagcaggtacggccttcggtacgtcgcgcgccactggtgatcgagcgggtggaagtgcgccgcaacgaacaggtgctggacatgacccacgatgcgccgttgcagatcgccgatggcgatcgcgacctgcgcatcgtcgcgcgattgctgtcctttgccgactcggcgtccaatacctaccgttaccgcctggccggctacgacccggattgggttgaagtcggtccggcgggcgagcgcctgttctcgcgcctggcgccgggcagctaccggctggaagtgcaggcacgctcggccgaccatgtgtggtcgcgtgtgcagagcctggaattccgcgtgcagccgccgtggtggcgcagcctgtccggcctgctggtgctggcgtcggtcgggttgctgctgaccagctggttcgcctggttgtaccgacgccgcctgcagcggcgccacgcctaccagctggcgctgcacaagcaggaactggccgagcaggcctcggcggccaagacccgcttcctggccaacctcggccatgagatccgtacgccgatgaccggcgtgctgggcatgagcgagctgctgctggcctcgccactggacccgcagcagcgcggctacacgcagtcgatccggcatgcgggcgagcacctgctgcatctggtcaacgatgcgctggacctggcgcggatcgagtccgggcgcctggagctgcagtcgcagtcgtttgcgttgaatggcctgctgcaggatctggcggcgctgatgggcccgctggctgcacagaagggcctgcgcttcgtcctggacaaccagctgccgccgggcctgcaggcgaccggtgatgccatgcgcgtgcggcagatcctgctgaacctgctgtcgaacgcagtgaaattcaccagccgcggcaccatcaccctgcatgcacgttgcgatggcgagctgcgcgcgctgcatttcgaggtacgtgataccggcccgggcatcagccaggaacagcagcagcgcctgttccgacgcttcgagcaggccgatggtgcacgtacggcagcgcagtacggtggcagcggcctgggcctggcgatctgccgcgagctggcacaagcgatgcaggggcggatccaggtggagagccagctgggccggggcacctgcttcggcgtcaccctgccgttgccactggtggtggacggtgacgccgaggtgtccgccgaggggcatcgcgacgatgcggcgaacatgccaccgctgcgggtgctgctggtcgaggacgatgccaccgtggccgatgtggtgcgggggttgttgagcgcacgcggccacgaggtggtgcatgccggccatgcgctggcggcgctgcgcgagatcagtgccggcgatttcgacgtcggcctgctggatctggacctgcccggcctgagcggcttcgaactggcccagcacctgcgtaaccagggctacatgctgccgctgctggcggtgaccgcgcggactgatccggaccttcagcagcaggtggaagcggccggcatcggcggcttcctgcgcaagccggtgaccggtgaactgctggtggaagcgattgccagggtgatgggcagatag

SEQ ID NO: 495625 - DNA, 339 bp, Stenotrophomonas maltophilia
gtggccgaggtcatcgccggcctgctgcgggtgcgcgggcatgaggtggtccacgtgctgcatggcctgggtgcgctgtcggagatcgccaccgatggtttcgacgtcggcctgctcgatctcgatctgcccgcgctggacggtacggccatcgcccgccagctgcgcaccatgggctatgaactgccgctggtggcagtgaccgcccgttccgatgcctacgccgaaacccaggtgctggccgccggcttcgatggcttcctgcgcaagccggtgaccggcgacctgctggtggcggccatcgcccaggcgcgtgcgaaacggcaggcaactgcgtga

SEQ ID NO: 495626 - DNA, 3249 bp, Stenotrophomonas maltophilia
atgacgagcggctggcgccggtggtgccgtggcatcgcaggtatgggactgctgctgatggcgatggccacggcggctgcgaccctggacatggcagaaacaccgcgcctgcgccgcttcggtgccgccgaaggcttgccgtcacgcatggtggtggcgctggccgaggatcgccagggccacatctgggccgccaccgatggtggactcgcccgttatgacggcaacagcctgcgggtctgggagcacgatccggaacagccgggctcgctgcccggcaacgagatcgagaccctgctgatcgatccgctggaccgggtctgggtgggcatcaacggcaagggcgtggcccgcctggatgccgaccgcgagcgcttcctcaccttcgacacggtcaattccacctgccaggggcagttctgggcgctggcctatgtcgacgacgccttgtggatcgggaccaacaaccatggcgtctgccggcttggcgaggacggcagcgtgcgcctctacacccatgacccggcgcagccggggggcctgcccagcaacagcatcttcaccagcctggtcgatgcgcagggccgcctgtggctgggcaccgaagcgggcgtggcgcgttggaacggcagcggattcgagccggtggccgcgcgggaactgggcacgctgagcgtgctccggttgagccgggatgcggagggttcgatctgggtcggcagccagaacgatggcctgtaccgcatcgatgggcaggaccgggtcagtcgtccgcgatgggccgacagcgcccagctgcgctcggccctggtcctggccgatcgccaggggggctactgggctggcacctccgatggcctgttgcggggggatgcggcggcgctgcgccggctggagggcgaccgcggcagcggcttcctgaccgcgcacagcggtgtgctcgatctgctgcaggaccacgagggcggattgtgggtggcgctgctgacccagggcctggcctatctgccaccggactggcggcgcttctcgatctggaaccagctcgacggcaagccgctggacagccagtacctgttgagcgcggccagcgatgggaagaactactacgtcggctcggcgcgaggggtgtaccagctcgatgcgcagggcaccctgcgcctgctggccagcgaccggcagctcggcagcggcgtggtgtggtcggtgctgccgcgcccggatgggcgcctgtggctgggacgcggcggccgcatcaccgtctacgatccggctaccggcgcgctgcgcgatctgcggatcgatggcagtgccgacctgcgccagcgcatcgacctgatgcggcaggcgcctgatggcacggtgtgggtgtcggtgatgggcctggacctgcagcagcgcgatgcagagggccggctgctgcaccgctatccgctggagcatttccgcgggaccgccgatgcgccgatcgagcagatccgcttcgacgcccatggccggccctgggtgatgggtgacatgggcatctggcgcgagcaggctggacgcttcgaggcagtaccgggcgtttcgcgcgggcccatctacgacctggtgtggatcgatccgcaacagttgtggctggggcgccaaggcgcgttcgagcgctaccagtgggatggcctgagcctgcgcctgatccagcgcatcgacggcagtgcaggcgtgccgccggtcaccatgggcgggctggcgctggccggcaacggccagctgtgggcgacgacgccgcgcggcctgctgcgttgggacccgaaaacgcggcgcctgcagcagttcaacgagcgcgatggactgtccgatgcggagttcaccggccggccaccggcagtgaatgcagatggtcgcgtgctggccgtcacccagaccgggttggttgccttcgatgtgaatgccgacgacacggtgctgccttcttcatcgctggtgatcgccgaagtgcgcgtacgccgcgacgacgcgcgcggctggcaaccgttgccgctcaccggcaccctgttgctgggaccggatgaccgcgatctgcagatcgatgcgcggctgctgtcctatgccagcccgcagggcaaccgttaccgcttccgcgtgcagggctatgaccaggactgggtggagcaggggggcgatggccagcgcaccctgtcgcggctgccgaccggcagctacgtcatcgaggtgcaggcagcgaccgcccggggcgcgtggacgccttcgcagcagttgcaggtgaaggtgctgccgccgtggtggcgcagcggcatggcgatcttcggctacatcctgctggggtcgctgctgctggtggtcctggtctggtcggtccgcgcgcggctgcgccgtcgccagcaatggcagctgacggtgcacaagcagcagctggccgagcaggcctcgcaggccaagagccgtttcctggccacgctgggccacgaagtacgcacgccgatgaccggcgtgctgggcatgagcgaactgctgctcgcgactccgctggatccggtgcagcgtggctacgcggggtcgatccagcaggccggcagccatctgctgcggctggtcaacgatgcgctggacctggcccgcatcgaagccgggcggcttgagctggatctgcgtccgttcgacctggaggaactgcttgaccaggtgcagggcctgatgcagccgatggcgcagcagcgccagctggaattccggcgcggtgaaaacccggcagggccggtcagtgtcagcggcgacgagatgcgcgtgcgccagatcctgctgaacctgctcggcaacgccatcaagttcaccgagcgcggccacgtcggcctggccgtgcgcctggaagagaagggcggcctgtgtttcgaagtgcatgacagtggcccgggcatcaatgccgagcagcagcagcgcctgttccatcgttttgaacaggccgacggtccgcgcaccgcgtcgcgctacggcggcagtggcctgggactggcgatctgccaggaactggcggtggcgatggggggggcgtatcgaagtggacagccagcctggcaagggggcgcggttccgcgtgcgcctgcccctgccctggacgcgccaggccgccagcaccgcgggcgaggtggcggccctgccggaactgccgccgctgcgcatcctgctggtcgaggacgacgccacggtggccgaggtcatcgccggcctgctgcgggtgcgcgggcatga

SEQ ID NO: 495627 - DNA, 645 bp, Stenotrophomonas maltophilia
atgcgtccctgcctggccctgctgccgatgctgctcgccaccgcccctgcctgggcggccgccgacacctatcgcctcgatccggtgcacacgcgggtgctgttctccatcgatcacgcgggctactcgcaggccatgggcaccgtgtccggcagcgagggccgcgtgctgttcgatcccgacaactggcgcgacgccaccctggaagtggacattccagtgtcgcgtctggaccttggcgacgccaagtggaaccaggccacgctggcccgcagcctgctcgatggcgagcgattccccagcgcacgcttcgtctccagccgggtcgaaccgatcgacgccaagcgtgcgcatgtgatcggcacgctgaccctgcgcggggtcagccacgaagtcaccctggacgtgaccctcaacgcgctcaagcgctacccgctccctccattccgacgcaccgccgggttttccgccagcacgacgctgagccggcgcgcgttcggcatcaccgcctggccgggggtcatcggtgatgcggtacaggtgcggatcgaggccgaagccaccctcgaccgcagcgacgccccgggaactcccgctcccgttccacactccgaccagacgacggcccccaaggacccttcatga

SEQ ID NO: 495628 - DNA, 573 bp, Stenotrophomonas maltophilia
atgaccgccaagaacacccccgccgcgtggggaagtgtcagccagctcctgcactggttgatcgcactgctgatcctcgccctgggcgtggtcggcctgaccatgggcgaactgcccaagacgcccaagtacttctgggtctacaccgcgcacaagtcgatcggcatcaccgtgctggcgctggtgctgttccgtctcggctggcgcctgtatgccggtgcgccgaagccggtgccgggcgtgcccagctggcaggaacgcatcgccagtgccacccacgtgctgctgtacgtgctgatgtttgccattccgctgtcgggctggctgtacgattcggccagtggcctgcgcccgttccgttggttcggcctggtcgacgtgcccaagctgagcggccccgacccgcaggtcgtcgcggtgtcccatgccctccacgaatacggcttctggctgttgatcgcggtggtgctggcccatgccggcgctgccttctaccaccacctgttccagcgcgatgcaacgctgtcccgcatgttgccgcgcggctggctcgcctcccctcagaaggactga

SEQ ID NO: 495629 - DNA, 573 bp, Stenotrophomonas maltophilia
atgaacctgaaactgaccactccggccgccgtggctgccgccctggccggcatgctggccaccgccccggcgctcgctgcggagtatgcgcaggcccccggtgccggctcgatcctggtgttcgccagcaagtacgacggcgaagtgttcaccggcagcttcccgggcttcgccaccaagctcagcttcgacccggccaacccggccgccggttcgctggatgtagtgattccgctggcaggcgccaggagcggcaacagcgaccgtgactcgaccctgcagggcgccgacttcttcaatgtcggcaagttcgccaccgcgcgttacaccgccaagggcttccgcgccgtgggcaacgaccagttcgccgccgatggcaccctggaactgcgcggcgtcagcaagccggtcaccctgaccttcagctggaagccgggcacccagccggtactgaccggcaaggccacggtcaagcgcctggacttcggcgtcggcggcggtgactgggccgataccaagaccattccggacgacaccgcgatcagcacgatcgtgaagttcgacgcgaaataa

SEQ ID NO: 495630 - DNA, 231 bp, Stenotrophomonas maltophilia
gtgctgaccctgatccagcgtgacgattgccacctgtgcgacctggccctggccgagctggccaaggcgcgggcgccggagttcgaatcggtgttcctggatgaccagccggcgctggaagcgcgctatggcacgcgcgtgccggtgctgcgcgacgagcgcggcgagcgcgagctggactggccgttcgatgcggccacggtgcaggcctggttggccgtcgatcagtag

SEQ ID NO: 495631 - DNA, 1383 bp, Stenotrophomonas maltophilia
atggctgtcagcacgttcgacgttttcaagatcggcattggcccgagctcctcgcacaccgtcggaccgatgaaggccgccgagcgattcatccatcgctggctgctcgacccgggccgcctgcacgaggtcgcgcgcatccgcgccgatgtctacggctcgctggccttgaccggccgcggccatggcaccgacaaggcgatcctgctgggcctggaaggccaacggcctaacctgatcgacccggacatcattccggccaccctggagcgcatccgcagcagcaagcgcatccagctgatgggccagcacgagatcgccttcgacgagaagcgcgatctcggcatgaacaagcgccagaagctgccctaccacaccaacggcatgcgcttcaccgcgtacaacgccgacgacgaagtgatcgccacccgcgattactactcggtcggtggtggcttcgtggtcaaccaggacgacgcggccgatgaccgcatcgtgcccgatgaaaccccgctgccctacccgttcaagagcggcgacgagctgctggcacagaccgcacgcagcggcctgagcatcgcccagctgatgttcgagaacgaaaagtgctggcgcagcgaagacgagatccgcgcccagctgcgcgagatctggagcgcgatgcagtcgtgcgtcacccgcggcatccgcgaggagggcgtgctgccgggtggcctgaaggtcggccgtcgtgcaccggcgctgtaccgcgagctgtcgtcgaagccggaagcagcgatgcgcgatccgctgacgacgctggactgggtcaacctgtacgcactggcagtgaacgaagagaacgctgccggtggccgcgtggtgaccgcaccgaccaacggtgcggccggcgtactgccggcggtgctgcattacttcgaccgcttctgccccggcgccaacgaacagcgcgtgttcgatttcctgctgacctcggcggcgatcggcatcctgtacaaggaaaatgcttcgatttccggtgccgaagtgggctgccagggcgaagtgggcgtggcctgctcgatggcggccggtggcctggtcgcggcgctgggtggcaacccgagccagatcgagaacgccgcggaaatcggcatggaacacaacctgggcctgacctgcgacccgatcggcggcctggtgcagattccctgcatcgagcgcaatgcaatgggcgcggtgaaggcgatcaatgcctcgcgcatggcgatgcgtggcgacggcaagcacaaggtgtcgctggacaaggtcatcaagaccatgcgcgataccggccgcgacatgcaggacaagtacaaggaaaccagccgcggtggcctggcggtgaacgtcatcgagtgctga

SEQ ID NO: 495632 - DNA, 996 bp, Stenotrophomonas maltophilia
atgcgcgtgatcgctgccgccctgcttgcctgccttccgctggccgccctggccgcccccacctacgggcctcggctggagggtttcgactacggctatccggtgaagaccttcgcgctggaatcgcagcggcagccgctggagatggcctacctggacatcgcgccgaagaaggcacccatcggcgtggtggtgctgctgcacggcaagaacttctgtgccgccacctggaaggaatcgatcaagccactggtcgccgccggctatcgggtgatcgccccggaccaggtgggcttctgcaaatccagcaagcccgagcgttaccagtattcgttcgcgcagctggccgccaacacccatgccctgctgcaacagctgcagctgggtgacgtcccggtgcacctggtcggtcattcgatgggcggcatgctggcggtgcgctacgcgctgatgttcccgcaggacctgcgcagcctgtcgctggtcaatccgatcgggctggaggactggaaggcgctgggcgtcccctggcgcagcgtcgacgcgtggtacgccggcgaaatgaacatcagctatgacagcatccgccgctaccagctggaggtgtactacgacggcaaatggaaaccggcctacgaaccgtgggcgcggatgcagtctggcatgtacgaaggcccgggcaagcaggccgttgcatggagccaggcgctggcctcggacatggtgttcaaccagccggtggtctacgaactgaagcacctgcaggtgccgaccacgctgttcatcggccagaaggaccgcaccgcgatcgggcgcgacctggcgccgcctgcggtgaaggcgacgctgggcaattatccggtgctgggcaaagcagcggccgcagcgattcccggcgcgacgctggtcgagttcgccgaactgggccattcgccgcaggtgcaggaccccaagcagttcaacagcgcgttgttgaaggccctgaagtcccgctga

SEQ ID NO: 495633 - DNA, 1068 bp, Stenotrophomonas maltophilia
atgagcgcactcgccgctgacattcctgcgctgggggcgggacgcctggcgctgctcggtacgggcacggtcggttcggccttcgtacagcgctaccaggcgctgcaggcacgcgggttggaactgcccagcgtgcaatggctggccaactcgcgcaccgcgctggagatcgatcgcgacctggcgctgcccttggaactggcacgtcgagccccccgcgatggccacagttcgccaccatgggcgagcgccgaagggctggagcgtggcgacgtggtggtcgatgccacggccagtgaagacgtggccgcccgtcacgtgcaatggctggcgcgcggcgtgcatgtggtgaccgccaacaagctgggccggggcgcgcagctcgcccgcgcgcaggccattgccgaaagctgtgccgacagtggcgcgcgttatggcgacagtgccaccgttggtgccgggctgccgctgttgagcagcctgcgcgcgctggtggccggtggcgatcacatccatgccatcgagggcgtgctgtccggctcgctggcgtggctgttccatcgctatgacggccagtcgccgttctcggcggcggtgcgcgaggcgctggcggccggttataccgagccagacccgcgcctggacctgtccggcgaggacgtgcgccgcaagctgctgatcctggcgcgcagcagcgggctggcgctggatgcgtcgcaggtacaggtggattcactggtgcccgaagcgctggcagcgttgccgctggaggatgccgtggctgccttggagcagctggatgcgccgctgcaggcgcgttggcagcaggcacgtgacaacggccgcgtgctgcgtttcgttggccgtgttgacagcgaaggtgcgcaggtgggcctgcgcgaactgccggccgatcatccgttggcgcagggtgccggcaccgacaaccgcgtggccatccacagcgatcgctaccgccgccaacccttgttgatccagggaccgggtgccggcgcggaagtcactgcggccgcgttgctggatgacgtgctgcggatcgtgggttga

SEQ ID NO: 495634 - DNA, 1236 bp, Stenotrophomonas maltophilia
atgagcctgcacgccaacgagccgtcctgtagtcgtaccactgccgccgtccgtgccggcatcgatcgggacaccgcgcatggcgcggtcacgccgccgatcgtgctgtcgtcgaacttcagttttgaaggcttcggcaacaagcgccagtacgattacacgcgcagtggcaacccgacccgcgacctgctgggtgaagcgctggccgaactggaaggcggcgccggcggcgtcatcaccgcgaccggcatgggcgcgatcaacctggtgctgaacgcgctgctgcagccgggcgacaccctggtggtgccgcacgatgcctacggcggcagctggcggctgttcaacgcgttggcaaagaaggggcacttcgaactggtcaccgccgacctgaccgatccgcgagcgctggcgcaggcgctggccacgcagccaaagctggtgctggtggaaaccccgtccaacccgctgctgcgcatcaccgacctgcgcttcgtcatcgatgccgcgcacaaggccggtgccctcgtggtggtcgacaacaccttcctgtcaccggcgctgcagcggccgctgtcgtttggtgcggacctggtgctgcattccaccaccaagtacatcaatggccacagcgatgtggtgggtggggcggtggtcgcgcgcgatccggcgctgcacgagcagctggtgtggtggggcaacgcgctgggcctgaccggttcgccgttcgatgccttcctgaccctgcgcggcctgcgcacgctggatgcgcgcctgcgcgtgcaccaggaaaacacggcgtcgatcgttgccctgctggaccagcatccggcggtcggcgcggtgtactacccgggcctggccgatcacccgggccacgccatcgccgcgcgccagcagaatggcttcggcgcgatgctgtcgttcgaactggcgcactgcgccggtgatgatccgcatgcggcggtgcgtgcatttgtggacgggctacgctgtttcaccctggccgaatcgctgggcggcgtcgaaagcctgatcgcacatccggccacgatgactcatgcggcgatgaccgccgaagcgcgtgcagccgccggcatcagcgaagggctgctgcgcctgtcggtcggcatcgaggccgagcgtgacctgctggccgatctcggcgccgcgctgcagcgcgccgaagcggtgatcgatgcggccgcccgccgcaaacaggtggtggacgcatga

SEQ ID NO: 495635 - DNA, 1032 bp, Stenotrophomonas maltophilia
atgagcttcgccgccagtaccgccattcgccccgaaccctttgtccccgtcagcgtgccggtcgaagaccgcgtgcatgccgagcgcggtgagttcgccgcggtgctgtcgatgcgccacgccggccccagcccggtgcgcctgcgctatgagtgggtcggtccggccaatgcaccggtggtggtgctggccggcggcatttccgcccatcgccacgtggcgtccaacacgcagttcagcgagaagggctgggccgaagacctggtgggcagcggccgcgcgctggatccgcagcagctgcgcgtgctggccttcgacttcatcggcgccgacggtgcactggatgtgccgatcgataccgccgaccaggccgatgccttggcgctgctgctggaccatctcggcatccgcacgctgaaggccttcgtcggctattcgtatggcgcgctggtcggccagcagttcgcgatccgtcatcgtgcccgcgtgcgccagctggtgctggccagcggtgcgcaccgaccgcatccgtatgccgccgcctggcgcgcattgcagcgccgcgcggtcgcgctgggccagctgcagtgcggcgaagaccacggcctggccctggcccggcagttcgccatgctcagctaccgcaccccggaagagttcggcgagcgctttgatgctgcgccggaggtcatcaatggccgcgtgcgcgtggctgccgaagactatctcgacgcggccggtgcgcagtacgtcgcgcgcacgccagtgaccgcttacctgcgcctgtccgaatcaatcgacctgcaccgcgtcgatcccaccgcgatcctgccgccgaccgtggtggtggccgtggagggcgaccgcctggtgccgctggccgacctggtcggcctggtcgaagggctgggcccgcgcggcagcctgcgcgtgctgcgctcgccctatggccacgatgccttcctcaaagaaaccgatcgcatcgatgcgatcctcgccaccgccttccgcacttctggagagtccgcatga

SEQ ID NO: 495636 - DNA, 885 bp, Stenotrophomonas maltophilia
atgtcgcgcctgcccctgtcctgcctgctgctgcctctgctggcgagcgcgaccgcacacgccggcgactggcgccagggctggggactggctcccccttccgccccggccacccgcgcaggcagtgccgagggcgccgcccccatggcccaattgcgcctgcagccggtcggtacgcaatggcaggcccggatcgacaacgggctggcagggccgctgcagatccagctgcgcgccgcccccgggcacccggtcgaaggcctcccggtcgagtcgctgatccagggcgacagcagcctggtagtcggccacctgcccgccccgatcgatggccgcatgctggatctgcgcctgcagtcggtgccgggcaacccggccgcacaggccgaagatgtcgcctaccgcctgccattcgatgcggcgcgcctgcgcgtggaccaggcgccgcagggacgattcagccatgacgacgaggagaaccgcgacgcggtcgacttcgcactgccggagggcaccctggtgctggccgcgcgcgagggtacggtgatgcagatccaggatggcttccgtggcaacggccaggaccgcgaacgcgatggtgcccgcgccaacttcatccgcgtgctgcacagcgacggcagcatggcgctgtacggccacctgcaggccggcggcatgcgcgtgcgtcgtggccaggcgataggggccggccagccgatcggcctgtctggcaacagcggctacagcagtgcgccgcacctgcacttcgtggtgcaggtcaaccgcggcatgggcctgcgctcggtgccggtgcgcatcttcgccgagcagggccagctgcagttcgcccgccagggcgaggccgaaggcggtaccgggcgctga

SEQ ID NO: 495637 - DNA, 1605 bp, Stenotrophomonas maltophilia
atgtccgaagtcgccaacgaagcgtcgcgtcgccgcaccttcgccatcatttcccaccctgacgccggcaagaccacgctgaccgaaaagctgctgctgttcgggggcgcgatccagatggccggttcggtcaagggccgcaaggctgcccgccacgccacctccgactggatggcgctggaaaaggagcgcggcatctccgtcacctcctcggtgatgcagttcccgtatgaaggcaagatcgtcaacctgctcgacacccccggccacgccgacttcggcgaagacacctaccgcgtgctgaccgcggtggactcggcgctgatggtgatcgacgtggccaagggcgtggaagagcgcaccatcaagctgatggaagtgtgccgcctgcgcgacaccccgatcatgaccttcatcaacaagctcgaccgcgagggcaaggacccgatcgagctgctggatgaagtggaaaccgtgctcggcatccagtgtgcgccggtcacctggccgatcggcatgggccagcgcctgaagggcgtggtccacctgctgaccggcgaagtgcacctgtacgaaccgggccgcaacttcacccgccaggactcgaccattttcccgtccatcgatgctcccggcctggccgagaagatcggtgcacagatgctggccgacctgcgcgacgagctggaactggtgcagggcgccagccacccgttcgacctgcaggcctaccgcgagggcaagcagacgccggtgttcttcggctcgggcgtcaacaacttcggcgtgcagccgctgctggacttcttcgtcgaacacgcacccgcaccgcaggcgcgctccaccaccggccgcgagatcgccccggaagaaaacaagctgaccggcttcgtgttcaagatccaggccaacatggacccgcagcaccgcgaccgcgtggccttcatgcgggtctgctcgggccgcttcagcgccggcatgaagaccttccacgtgcgtaccggcaaggaaatgaagctggccaacgcgctgaccttcatggccagcgaccgcgaaatcgccgccgaggcgtggccgggcgatgtgatcggcatccacaaccacggcaccatctccatcggcgataccttcaccgaaggcgaagcggtcaccttcaccgggatccccaacttcgccccggaactgttccgccgcgcccgcctgcgcgatccactcaagctcaagcagctgcagaagggcctggcccagctgtccgaggaaggcgcgacccagttcttccgcccgctcaccagcaacgacctgatcctgggtgccgtcggcgtgttgcagttcgacgtggccgcctaccgcctgaaggacgagtacggcgtggaagccaccttcgagccggtgagcgtgaccactgcgcgctgggtccactgcagcaacgagaagaagctggaagagttccgcgagaagaacgcgctgaacctggcgctggatgccgccgggcacctggtctacctggcgccgacccgggtcaacctgcagctggcccaggaacgctcgccggacgtgcgcttctcggccacccgcgaagcggcgcataccgtttcggcaggctga

SEQ ID NO: 495638 - DNA, 639 bp, Stenotrophomonas maltophilia
atgtccacgacgtccattgcttcgatccgtgaagaaatcgccagcgccctgacccatggcctgggcgcggtattcgccctggcagccagcgcggtgttgatcaccctggcggctatctacggcgacggctggcagctggccagcgcgatcgtattcggtatcgcgctgttgctgctgtacaccgcctccacgctgtaccacgccatccagcatccggtcgccaagggccggttgaaggtgttcgaccattgcgcgatctatgtgctgatcgcgggcacctataccccgttcaccctgatcggcctgcgcggtccatggggctggggcctgttcaccgcgatctgggcgctggcgctgggcggcgtggtgttcaagctgttctacaccggccgcttcaaggtgctctcaacggtgatctacatcgccatgggctggctggtggtcgtggcgatcaagccgatgtgggcctcgatcgatggcggcaccctcacctggctgttcgccggcggcctgtcgtacacgctggggacctatttctaccaccgtgaatcgatcccgtactcgcatgccatctggcacctgttcgtgatcggcggcagcgtctgccacttcgtcgcggtcaccatgcaggtgctgtaa

SEQ ID NO: 495639 - DNA, 1974 bp, Stenotrophomonas maltophilia
gtgaatgctgccgcctcccctgccgcaaagcgcacgccccgctggcgcctccgccgccccggcccacgaggccggcgctggctcacgatcctgatcttcctgctggcggcgatcctggtactgatcgcgttgtgggactggaactggttcaaggggccggtggagcgcgcggtgcaggcacgcaccggccgcgtgctgcacatcgggaaccttgatgtcgacctcggccgcaccagcacgatccgcgccgatgcggtcaccttcgccaatgccagctgggcgaaacaacccgatatggccagcgccgaccgcgtcgagatcgacgtacgggtctggcccctgctgcgcggcagcgtgcagctgcccgaagtgcgcctgacccggccggacgtgctgctggaaaccgccccgcgcaaaggcgaaccgggcaactgggatttcctcggtgacagcgccggcgggaccagcccccagctcaaacggctgcgcgtcgatgacggtcgcctgcagttcctcgatgcgctcggccgcaccgatatccgcgtggacgtgcgcagcggccagccgaaacaggccgacgcggcgccaccgctgctggtgcagggcaagggacgctggcagggcaatccgttcaccctgcgcggtggtactgaatcaccgctggagctgaccgacagcggccacccgttccgcatccacctcgacggtcgcgctggcgccacccacgccgtcgccagcggcacattgaccaatcccttccagctgcgcgtgttcgacctgcagttcgcgctcagcggccaggacctggccgacctctaccccttgctcggcatcgccattccgccgtccccaccctacgcgttgaatggtcggctcaagcgtgaccacgacctctggcgttacgagcagttcaccggcaaggtcggcgacagcgacctcggtggcaacctgcagttcgaagtgggaggcgcgcgcccgcgactgaccgccacgctggaatccagacgcctggacttcgatgacctggccggcttcgtcggtgcgccaccgaagaccggcggcggcgaaaccgccaatgcagagcagaaggccgaggccgcacgggtcgccgcgcgtgcgcgtgtgttgccggacacgccctacaacctcggcaagctgcgtgcgatggatgccgacgtgcgttggaaagcccaccgcatcaacgcgccgtcattgccattggacgacatggatgcacacctgttgctggatgacggtgtgctgcggctggacccactgaacttcggcgtcgccggcggcgacatccgcagcacgatccgcatggacgcgcgccagccgcagatcagtaccgcgctgaaggccagtgtgcgcggcgtgcagcttggccagttgttccccgacgccaagctggccgaacaggccaagggcggcatcggcggcgaggtggacctgagtggccgcggcaattcgatcgccgcgatgctcggcagcagcagcggcaaggtcggcctggcaatgggccgtggccatgtcggcaacctggtgatggaactggccggcctggacatcaccgagtcgctgaaattcctggtgaccggcgacaagcagatccccctgcgttgcgccttcgccgacttcggcgtgcgcgacggcctgatgaccagccaggcgttggcggtggataccaccgacacgatcctcatcggcgaaggcacggtcagcctgcgcgacgagagcctggacctgctgttgaagccacgcccgaaggacaagagcatcctggtgctgcgctcgccactgcacatcgccggcactttcaaggacccgtcgttccgcccggacttcaaggcgctgggcatccgcggcgcggtggccctggcactgggcagcatcgccccgccggcggcattgctggcaaccatcgaactggggccgggcaaggatgccgactgcggggggcagtatgcgaagtag

SEQ ID NO: 495640 - DNA, 1377 bp, Stenotrophomonas maltophilia
atgaggaagtggagcagggcgctgctgccggcgatgttcggcatgctggccgccgtcgtggtgcaggcggctgattaccgcacgcagtatgccgagcaatggccgctcacattgtccagcgcgcagtccggtgcctaccgcatcgtgctggagccggcgatctaccgccgtgccgtgagccccgacctcagcgacctgcaggtgttcaatgcagccagccagctgctgccgtcggcactgctggcgccggaccagccgctggcgcaaccgccggtgcagcgtgagctgccgtggttcgtgctgccgccgctggccgatgcccagcgcaacgatctgcagctgctgaccgagcgtgataccgatgggcgcgtgcgccgggtcgaagcacgggtgagtggcggggcgacggcgaacgggcagggcggctggctgatcgacgccagcatgctcggccagcagccgctggcggcgctggtgctggactgggccgacagcggccagccgctgcaggcgcaggttcagctggatgccagtgatgacctgcagcactggcgatcgatgggtcgcgacgtgccgctggtggatctgcagcgcgccggcaagcgcctgctgcagcgccgcctgcaggtggacggcactgcacactacctgcgcatcctggcgcagggcgactcgcggttgccgaccctgcgcggcgtgttggcggaactgccgccagcgccggccacgctgccgtgggaatggctgtcgctggagccgacgtcgaagggcaagggcgaatacaccttcgagatggatggccggttcccggtggcgcgcgccgatgtggccagcaccgacaacagcctggtgcaatggacgctgttcagtcgtgatgacgagagtgccgagtggcagcgccgcagcgcgccgtggatcgcctaccaggtgcaacagggcacgcagggccagcgccagcagtcggcggcgcagccgctgggcggcgtgcaccgcgaccgctactggaagctggtggcgaatccggcggaatctgccactgcgccgacgctgcgcctgggctaccaacccgaagtgctggtgttcctgagccagggtgcggcgccctacgcactggcggtgggcagcgcgaccgcgcgccgcacggacgcgccgatcggggtgttgatcgaggaacttcggcagcgcaacgatccgtcgtggcagccgacgctggcgcgactggaaggcagcccggaaccgctggcgggcgatgcggcgctgaaaccgcagcacgattggaagtcgtggttgctgtgggcgttgctggggctgggtgtgttggtcgttggcggcctggcgctcagcctgcttcggcagaagccgacgccttcggcgtag

SEQ ID NO: 495641 - DNA, 1005 bp, Stenotrophomonas maltophilia
atggcaatcaaggttggtatcaacggtttcggtcgcatcgggcgtaacgtcctgcgctcggcggtgctgaacttcggcgacgacatcgaaatcgtggccatcaacgatctgctggagccggactacctggcgtacatgctcaagtacgactccgtgcacggccgcttcaaggccgacgtggcggtgcagggcaacgacctgctggtcaacggcaagaagatccgcctgacccaggaacgcgacccggccaacctgaagtgggatgaagtcggcgctgatgtggtgctggaagccaccggcctgttcctgaccaaggaaaccgcgcagaagcacatcgatgccggcgccaagaaggtcatcatgtcagccccgtcgaaggacgacacgccgatgttcgtgtacggcgtgaacgacaagacctacgccggccaggcgatcatctccaacgcttcgtgcaccaccaactgcctggccccgctggccaaggtcatcaatgacaagtggggcatcaagcgcggcctgatgaccaccgtgcatgcggccaccgccacccagaagaccgtcgatggcccgtccaacaaggactggcgcggcggccgtggcatcctggaaaacatcattccctcgtccaccggtgcggccaaggccgtcggcgtggtcattccggaactgaacaagaagctgaccggcatgagcttccgcgtgccgacctcggacgtgtcggtggtcgacctgaccgtcgagctggaaaaggaagccacctacgccgagatctgcgccgaagtgaaggcacagagcgaaggcccgctgaagggcatcctgggctacaccgaagacaaggtggtggccaccgatttccgcggcgaaacctgcacctcggtgttcgacgccgatgccggcatcgccctggacggcaccttcgtcaagctggtgacctggtacgacaacgagtggggctactcgaacaagtgcctggaaatggccaaggtcatcgccgccaagtaa

SEQ ID NO: 495642 - DNA, 630 bp, Stenotrophomonas maltophilia
atgcgcaagacctcccccctgatcgtggccagcctggccgccgccctgtcgctcgccgccgccccggccatggcgcagtccaagggcgactggaccgtctcggccggcgtgcaccaggtggcgccgaagtcgaacaacggctggctggccggcggcaccctgaaggtcgacgtcgacaatgacgtcaagccgaccatcaccggcgagtacttcatcgccgacaacctgggcatcgaagtgctggccgcgctgccgttcaagcacgacatcaacatcaacggcctgggccgcgtcggcagcaccaagcagctgccgccggtggtcaccctgcagtaccacttcaacagcaagggcaaggtgtcgccgttcgtcggcgccggcctgaactacaccaccttcttcagcgaagacactacgggtgcgctggccggcagcaagctgaagctgcaggattcgtggggcctggccgcacacgccggcgtggacttcgcgatcggcgagaagggcgccctgcgcgtggacatgcgctggatcgacatcgacagcaaggtgaagttgaacggcgagaagatcggcacggtcaacatcgatccgctggtctacggcgcttcgtacgtcttcaagttctaa

SEQ ID NO: 495643 - DNA, 819 bp, Stenotrophomonas maltophilia
atgaaagccctgcactccctgttcctcgccgccgccctggcgccggccctgctgtccgtctccgcccctgcccatgcctggggcgcgcaaggccaccgccttgtcgccgaagtcgccgacgcccgcctcacccccgccgcccgcgccgaagtggaccgcctgctggccaccgaaccggacgccaccctggccagcatcgcgccctgggccgaccagctgcgcgccaaggacccgggcctgggccgtcgctcggccggctggcactacgtcaacattgccgaagacgactgccactacgaagcaccgaagcactgcaggaacggcaactgcatcgtcgaagccctcaaggcgcagagcgccattctgggcgaccgcagcctgactgacggcgagcgcctgcaggcgctgaagttcgtcgtgcacctggtcggcgacatccaccagccgatgcacgccggctacgcccacgacaagggcggcaatgatttccagctgcagttcggcaaccgcggtaccaacctgcactcgctgtgggacagcggcatgctcaacacccgcaagctggacgatgccggctacctgccggtgctgcagagccagcgcgcaccgaagctggcgcgccagtccaacccgcagcgcgaaccgcaggcctgggccgaggccagctgccgcatctccatgcaagctggcgtttatccggcctcgcgtaaaatcggtgacgagtacaccgagcgctaccggccgctggccgaagcgcagctgcggctggccggtgaaaacctggcgcagttgctgaaccgcgtgctcggcacgcgctga

SEQ ID NO: 495644 - DNA, 801 bp, Stenotrophomonas maltophilia
atgccggtccaggtgcagtcgttcttccaccgtgacagcaacaccttcagctacctggtcagcgacccggccagcggcgaggcggcgctgatcgatccggtcctggactatgacccggacaccgacgccagcagcgaatcaccgctgcgcgcggcattgcaggccatcgaacaacagggcctgcagctgcgctggctgctggagacgcatgcccacgccgaccatgtgtcggccgggcgccggctcaagcagcgctttccgcaggccacgctggccatcggtgaaggcatccgtgcggtgcaggcgacgtttgcgccacgctatggcctgcagcttccgggcgccgatgaaatcttcgaccacctgttcagtgacggcgagaccttcactttgggcgaactgcgctgccaggtgatcgccgtgcccggccacaccagcgacagcatcgcctacctgatcgacgatgcgctgttcactggcgactcgctgttcatgcccgacggcggcactgcccgctgcgacttccccggcggtgatgccgcacagctgtaccgctcgatccagcgcctgctggccctgccggatgccacccgcgtgttcgtctgccacgactacggcccgggcggccgcgacttcgccaacgaaaccaccatcggtgaacagcgcgcgcacaacatccacgtgcacgacggcgtggccgaggcggagttcgtcagcgtgcgccaggcccgcgatgcgacgttggaagaaccgaagctgatgcagcctgcggtaaaggccaatatccagggcggggcctga

SEQ ID NO: 495645 - DNA, 564 bp, Stenotrophomonas maltophilia
atgaagtccatgccgctgatcatggcggcagcgctgctggtggggtgtgcgagccaggaccgcctgaccacggtggatacccgcagcgaaaatgtcggccaccagcgcctgcagccgcaggcgggcagcggcggtggacagctgcaggtgtattcgctgggtgcgaccgaaggctaccggatgccccagctgtacgcggcaccagacccggaggttggcgatcgtgacccgcgcgcggaactggcgccgaccacgatctgcctgcaggtggtggttgatgccaatggcgccgtggagcgaagcctgccattgaccgatcgtccggagtgcgcggcaggtgctgcgggcgagaatgcgcccctgctgcaggctgcccaggaagccgtggcgatgtggaagtactcgtccgcagcggtctgccacttcgcggcgggcaaggtgcctgccgaccgcggtgactgccggggcgccgagcgcgtcgagccggtagcggtcaccctgcagtacgccttcacgttcgagatcgtgaagggccagcacgtggtgcggatgcagggaaaatga

SEQ ID NO: 495646 - DNA, 1242 bp, Stenotrophomonas maltophilia
atgactgagctgctcgacggactgtggcgggccagcttgtggctggccgtgggtgtggtcctgctggcggtgctgcgaccgctgctggtgcggttggggggcgctgggctggcctaccgcagctggtggctgctgccgctgctgctggtggccctgacgctgccattgccacaggttgcggtgttgcagcaggtacccacgctgccgctgaaagtgatgcccggtgccctcgatgccatgagcgggccctcgttgccatgggccgggctgttgttcgcgctgtgggcattgggtgcgggcatccgcctgttgcgcgacctgcacgcacaacatcgtttcgaacggagcatgggcccactgacgccgcgcaccgatggcagctggcaggccagcggcgatcccggcttgcccgcgctggttggcctgtggcgcccacgcatcgtggttggtcccgacttcgacctgcagttcaccgcacaggaacagagcttgatcctgcagcacgagcgcagccatcaccgtcatggcgatcactgggccaacggtgcgctgctgctggtgcgcgcggtgttctggttccacccgcttctgccgtgggctgcgggccgcttcctgcgcgaccaggaactggcctgcgatgcccgcaccatggccccgcagccggcgctgcgcggcctctacgccagcacgctgctgaaggcgcagctggtccacccggttgcgcccgcggtctgccattggcgcagccaacccgtgttgaaggagcgtatcgccatgttgaagcagtccaagcggaaggcattgccgtgggtgtccgggcaggtgctggtggtcgggttgtgtgtgggcatgggcgcggtggcatgggccagccagggcggcgcggttgggagcccggggatcggtgtcgagccgttcgagcacgctgaagaagatgcagccaaggctgggctggaccgtccgatccagatcgacaggatgccaccgccgtcctatccgaaatccgcgttcgagcagcgccaggtaggcgtggtgaacctgcgcgtggaggtggatgcgcaggggcgtcccagcgatgtccgcgtgctcagtgccaccaatccgggcgtgttcgatgcggtgtcgatcgctgcggcacgcagctggacctatcggccggcgatgaagaacggtaagccggttgcagcggcggtgaagattccgatcacattcgccatggacaacaccgaggacacccaatga

SEQ ID NO: 495647 - DNA, 366 bp, Stenotrophomonas maltophilia
atgaccccgatcagcgaagccgaagccgtcgtgatggaggtgctgtggcagcaggcaccgcgtagtgccgatgacgtggtggccgcgctggcccatcgcgactgggccgagccgaccatcaagaccctgctcaaccgcctgctgaccaagggcgcgatcactgccgagcgcgatggacggcgttacctgtaccggccgctgctgcagcgacaggcgtgggtggaggcgcagagccaggacttcatcggccgtgtcttcgaagggcgcgtggcgccgctggtcgcgcacttcagtgaacggggccagctgagcgcgcaggacatcgccgaactgaagaagctgatccaggagctggaccatgactga

SEQ ID NO: 495648 - DNA, 558 bp, Stenotrophomonas maltophilia
atgaaagcactgccgaagaaggatttcccggtcgagcaggcccgccgcttcctcgaacccggcccgatcgtgctggtcagcacggcatggcgcggccagcgcaacctgatgacgatgggctggcacatggtcatgggcttctcgccttcactggtcgccacctacctgtgggacgcaaaccacagccacgcgttggcgcgcggcagcggcgagtgcgtgatcaacgtgcccggggtggagctgctcgataccgtggtggacatcggcaactgcagcggccgcgaggtcgacaagttcgcccgtttcgggctcgacgcactgcccgcgcgtgaggtcggcgcgccactggtcggccaatgccattcgtgcttcgaatgccgcctgtacgacgacagccaggtggcagcgagcaatctgttcatctgggaaatcgtgcatgcccatgttgcgccccggccgaaactgccgcgcacggtgcattaccgcggcgatgggcagttcatggtggccggcgcggaagtctcgcgtcgacggcggttcaagcccgacatgctgtaa

SEQ ID NO: 495649 - DNA, 1953 bp, Stenotrophomonas maltophilia
atgaccgaacacctcaccgacctggacgccgccgtcgactggttgtttgcgcgcgtggacgggccgctgcggatcggggcaccgctggcactgggcaagccgcatcggctgctcaatgccctctacgcacgcgtcgaacatgatccttcgcggccgctgcagctgtataccgcgctgtcgctgaatccgccgaaggcgcggggcaacggcctggaggcgcgcttcctggcgccgttcgcgcagcgccatttcggcgacgacttcccgcgcctggcctatgccgatgcgatcgcacgcgacgcgttgccggcacatgtgcaggtggaagagttctacatgcaatccggcgccctgctcgggtcgcgccaggcgcaatccagctataccagcctgaactacacccacgccgccgatgcggtggcgcagcgcgcgccacaggtgatcgtgcagaaagtggcgatgcgcccgaacgaccgccggctttccctgtcgtgcaacaacgacatcacccaggacacgctggacgcgatgaccgcacgtggcctgccgcgtccgctgctgattgccgagatcgatccccagttgccctacctgggcggctcggccacggtcgatgtctcgttcttcgatctggtgatcaccccaccgccgccgtacccggcgctgttcgggctgccgcggcagccggtcggcgatgtcgactacgccatcggcctgtacgccagcacgctggtgcgcgatggcggcacgctgcagatcggcatcggtacgctggccgacgcgctcagccatgcgctggtgctgcgccacacagacaacgcgcgctaccgccgcgtgctgcacgcgctggatccgcagctggccagccacccgctggtgcaggagatcggcggcgtgggcccgttcgaagtgggcctgtacggctgcagcgagatgctcaacgagggcttccgcaggctggtgcagaccggggtgatcaagcgcaaggtacacgatgacctggcgctgatgcagcgcatcgagaacggcagcacgctgtcgatcgaccacgccaccctggcggccgaaggtgagtacctgcacggcgcgttctacctgggctcgccggaattctacgagtggctgcgcacgctgccagaggacgagtgccgtgcgatcggcatgcgccgcatcagcgagatcaaccagctgtacggcggcaacgaaacgctggaacgcctgcagcgccgccatgcgcgcttcttcaactcctgcatgatggccaccgcgctgggcgcggcggtgtctgacgcgctggacgatggacgcgtggtatccggtgtgggcggccagtacaacttcgtggcgatggcacatgccctgccggaagcccgcagcgtgctgatgttccgcgccgcgcgcgatgacaagggccgacgcgaatccaacgtgcgctggaactacgggcacaccaccattccgcgccacctgcgcgacatctacctcaacgaatacggcattgccgacctgcgcggactgaccgacgaggactgcgtgcatgcgatgaccgcaatcaccgaggccccgttccagggcggcctgctgcagcaggcgcacgcttcgcgcaaactgctggcggtcgcgcaaccggatccgcagcggcagcagcgcaatacgccgcaggcgctgacagcggcgctggccccgttccgcgccgatggcagcctgccggactatccgctgggcagtgacttcaacgagatcgagcaggtgctggtgaaagcgctggcgtggctgaaggccaatacgcagacccgcggcgacaagctgcgtaccgtctgggcagcactacggcaaccggccggcgacggcgatgcggtgtacctgcagcgcatgggcctgcaggcaccgaaggatttcgccgaacgcctggacgcgcgcctgctgcggctggcactggcgcgcaccgcctga

SEQ ID NO: 495650 - DNA, 1998 bp, Stenotrophomonas maltophilia
atgacgcagcctacccgtcgccagttggccaacgccatccgcttccttgccgccgatgcggttgaaaccgcaaagtccggccaccccggcatgcccatgggcatggccgacatcgccgaagtcctctggaacgactacctccgccataacccgagcaacccgcactggttcaaccgcgaccgtttcgtgctgtccaacggccacggttcgatgctgcagtacgcgctgctgcacctgagcggctacgacctgccgattgagcagctgaagctgttccgccagctgggcagccacaccgccggtcacccggaacgccacgagaccccgggcgtggagaccaccaccggcccgctgggccagggtttcgccaatgccgtgggcttcgccctggccgagaagctgctggcacagcgcttcaaccgcccggagctggaagtggtcgaccaccgcacctgggtgttcatgggcgatggctgcctgatggaaggcgtgtcgcatgaagccgcttcgctggccggcacctggggcctgcacaagctggtctgcttctgggacaacaaccacatctcgatcgacggcaatgtcgagggctggttcaccgacaacaccccggagcgtttcgaggcctatggctggaacgtggtgcgcgacgtcgatggccatgacccggacagcatcaaggccggcatcgaggccgcgctgtcgcagagcgacaagccgaccctgatctgctgccgcaccaccatcgggtttggttcgccgaacaaggcgggcaaggaatccagccacggtgcaccgctgggcaaggacgagctggaagccacccgcaagcagctgggctgggaatacggtccgttcgagatcccgcaggcgatctacgacggctggcgcgccaatggcgccggcaccctgcgccaggccgagtgggaacagctgttcgacaagtacgccagccagtacccggctgaagcagccgaactgacccgccgctcgcatggcgaactgccggccgacttcgttgccaaggccgatgcgtacatcgcccaggtggccgcggaaggcccgacgatcgcctcgcgcaaggcctcgcagctggccatcgaagcctatgccccgctgctgccggaaatcgtcggcggctcggccgacctggcgcactccaacctgaccctctggaagggcagcaaatcggttgccagcgacgacgccaacgccaactacgtgtactacggcgtgcgcgagttcggcatgaccgccattgccaacggcctggccctgcacggtggcttcattccgttcgacgccaccttcctggtgttcagcgattacgcccgcaatggcgtgcgcatgagcgcgctgatcccggcgcacgccatccacgtctacacccacgactcgatcggcctgggcgaagacggcccgacccaccagccggtggagcacctggcctcgcttcgctacatcccgaacaacgacgtgtggcgtccgtgcgatgcggtcgagtcggcggtgagctggaaggccgcgatcacccgccaggacggcccgagctgcctggtgttcagccgccagaacctgccgcaccagccgcgcagcgccgagcagatcgcgcagatcgagcgcggcggttacgtgctggccgatgccgccggcaccccggatgtgatcctgatcgccaccggttcggaagtctcgctggccaccgaagccaaggcccagctggacgcggctggtctcaagacccgcgtggtctcgatgccgtccaccgacgtgttcctgcgccaggatgcggcctaccgtgaatcggtgctgccgaacgccgtgcgcaagcgcgtggccgtggaagccggcgtcaccggtttctggcgccagttcgtcggcctggacggtgccgtgatcggtatcgacaccttcggtgcctccgccccggccgaccagctgtacaagcacttcggcatcaccaccgcccacgtggtggaagccgccaagtcgctgtaa

SEQ ID NO: 495651 - DNA, 1320 bp, Stenotrophomonas maltophilia
atgacagcagctgctgccgacaagaagaagttgcccctgcattggaagatgggcatcggctttgcgatcggcctggtcctgggactgatcgtgcacgccctgggcggcagcgtcgatggtctgcaggctggtgccaagtgggtaatggactacgtcaccaccccggcgtcgggcctgttcctcaacctgatcttcatgctgatcgtgccgctgatcttctcggcgctgatcatgggcgtgtcggagatgggcgacatccgcgccctcggccgcatcggctggaagaccctggcctacaccgtgctgctgtccggcatcgcggtgggcatcggcctggtgctggtcaacctgctcaagccgggcgcgggcgtcgatccgcagactgcggcactgatgctctcggagaacgccgagcgcagcaaggaaatcgtcgctggcatccacggcacgccgaagggcatggacatgctgctgtcgatcgtgccgagcaacgtgctgcaggccgcgtcggacaacggcgcgatcctgtcgctgatgttcttcgcgctgatgttcggcatcggcatggtgctgaccgacaatgaaaaggttgccccgctgcgccgcgccatcgaaggcgtgttcgaaatctcgatgaccctgatcaacctggtcatccgcctggccccttatgcggtggcctgcttcatgttcaacctggccgcgctgttcggcttcgagctgatcatccgcctgggtgcctatgtgggcgtggtggtgctggcgctgggtctgcacatgatcgtgacctacggtaccgcggtgtggctgtccggccgctcgccgctgtcgttcttccgcgatacccaggaagcaacggtgatggcgttctccaccgcctccagcaatgccaccctgccgaccgcgctgcgcgtggccgaccagatgggcttgccgcagcgcgtgtcgcgcttcgtgctgaccgtgggtgccaccgccaaccagaacggcaccgcgctgttcgagggtgtgacggtgatcttcctggcccagttcttcggcgtggacctgagcatcggccagcagatcatggtgatggcggtctgcatcctcggtggcatcggcactgccggcgtgccgtcgggctcgctgccggtggtggcgatgatctgcgcgatggtcggtgtgaacccgctgggcatcggcctgatcctgggcgtgaatcacttcctggacatgtgccgtaccgcgctgaacgtgaccggcgacctggccctgaccacgctggtggccaagggcgagtcgcacgatggcccggcgctgggtccgcagcaggactga

SEQ ID NO: 495652 - DNA, 1716 bp, Stenotrophomonas maltophilia
atgacgcggtcgatcaacatgcacgggcactggcctcgacaggtactggcggcgctgctgttgtggctgccgctgctggcctgggcgcagccgcgcgcgtggctggaccgcgaccgcatcgcgatgggcgacacggtcacgctcaatatcgagagcgaccagggcgcccctgacttcacgccattgcgcaccgacttcgacctgagcgggcagaccagcagccgccaggtggaatggagcaatggcagcatgcagcagcgcaacctgtatggcgtggcgctgacaccacgacgtagtggtgcgctggtggtaccgggcctgcaggtgggcagtgtgcgcaccgcagcgctgacgctgcaggtcgatgcggccgccgtggcggggcccgacagcaatgcgatggccttcatcgaaaccgttgtcgatgacgatacgccgtatgtgcagcagagcgtgggcgtggtggtgcggctgtacttcgcctcgcagctggcctccggcgagctggtgctggataccccggcgggcgcgtcgttgcagcgtgtgggcgacgaccgcaccgatgtacgccaggtcaacgggcgccgctacaacgtggtcgaacggcgtttcctgctgatccccgagcgcagcggcgcgttgcgcctggccggtgcccgtttcagtgggcgcagtgcgggtggcttcttcgacgacttcttcggcggtggcgatggccgcatgaatgccaccggcgcagaccgcacgctgcaggtgcaggcacagccggcgcaggccccgcagccgtggctgccactgcagagcctgcagctgcgctacaccagtgcgccgaccagtgcccgcaccggtgaggccgccaacgtggtggtcgaagcggttgccgaaggcgcgacgcgcgcgcagttcaccgacctgccggtgccggatgtcggcgccaatgcgcaggtgttcgccgaaccggcacagtacgaagagaccttcaacggcagcacgccgcgcctgaagatcacccgccgctattcgatcgtgccgcgccagccgggttcgctggtggtgccggggccgcgcctgccctggtgggatgtgcgtaacggcaaggcgcaggaggcgaagctgccggacctgacgctggccgtcgcggccggcaccggcaccggcactgcctcaccggcgccattgccgccgatcgacaccgatgccgcgctgccgggcgccgatggccgggacagccgcatcgccgcgaccgatccgcgtgccagcggcctgtccgagcgtccgtggccgtggatggcggcggccatcggcctggcgttgctgtggctgctgactctcctgtggggctggcagcgaggtcggcgcccgcgcgcagtggcgccagtagcgggcaaggcctctgtgccgactgcggcgggcgggcgtgccggcctggcagaactgcgccgcgcgctggatggcgagggcttcgaccaggtggaagcacagctgtgtgcgatggctggtgtggaacgcatcgagcaggtcatcgcgcggcttggggatgcagcccagcgtcaagtgctacaggacctgcagcaggcgcggtggggcgggcagggggatctggcgccgctgcgcacgcgcctgcgcgaggtcttccgtgacggaccgcactggtcggcggctgcgggcaccgccgacactgacctggcgccgctgtatccgccgcggcgaacctga

SEQ ID NO: 495653 - DNA, 1839 bp, Stenotrophomonas maltophilia
atgatcgcgtttgcttcgaatctccccgattggagcgcattgcacttcctgcgaccggagtggttgtgggcgctgctggcgttgcccctgatcctcgcgctcgcggtgtaccggcagcgacgcagtgatgcgtggcggcaggcggtggacgcacacctgttgccacatctgctggccgcgggcgcgaagcggcgagtgcgcctgccatgggcgctgctgctgggctggacactggcatcgctggccatggccgggccgagctggcgccagcaggcacaaccgatgttccaggccagcgcaccgctgctggtggtgctggacctgtccagccggatcacggcaaccgatcttccgccgtcgcgcctgctgcaggcgcgggcgaaagtgggcgaactgctgcgcgcgcgccagggcgggcaggtggggctggtggtgtatgccgatgatgcctacaccgtggcgccgctgaccgacgacggcagcaatgttgcgttgtatctggatgcgctgtcgccggacgtgatgccgcgtgatggccagcgtgccgaccgcggcatcgactgggcgacacgcttgatgcggcagatcggcgcgttgcaggggcagatcctgctggtcagcgatcaggcggacagcgaagctgcactggcggcggcgcaggcacgcagcctgggcctgcaggtgtcggtgctgggcctgggcacgcctgccggtgcggcgtaccgcgatggcaatgggcagatccgccaggccgcgctggatgagggcagcctgcgtgcagtcgccactgccggtggcggccgctatgcgcgcatctctgccgatgacggcgatctgcgtgcgctcggtgtactcgacgcgcgcgacggcacggcggcgcagcggccgggcgaaggcaagcagtggcgtgacgaaggcttctggttgctgccgccggtgatgctgctggcattgctggccttccgccgtcgcgcggtgctggccgcggtgctcgcggtgggtctgctgccatggatgaatgacgcgcaggcgcaggcccctgcgacgcctgtctcgcagccggcgcagggcacgctgtggaagcgcagcgaccagctgcagcatcaacgcctggccgagggggttcaggcctaccgcaagggcgacttcgccactgcacgcagacagttcgaaggcatcgacagcgatgccggttggtacaacctggccaacacgctggcacgcgaaggcaactacgacgacgcgattgccgcctacgaccgcgcgctggcgctgcatccgggcatggccgatgcggtggccaaccgtgccgtggtcgatgccgcacgcaagcgcaggccatccgggggcggccaaggccaagatcagcagaagccaccgcagaacgggcagcagaaacaaccgcagggcccgcagggccagcagaacccacaggggcagccgaagcagggccagcagcaatccggccatggccagccgccgtcgggccagcagggccagcccaaggcgggtgacaacaacgcgcagtcggagcctcagcctggcgaacgtggccgcgatggccagcaggcaccgccgcaggtggaagatgccaaggcgcaggcgcaggccgacgaacagcaacgccagcgcatgcagcaggcgatgcagcaggcacgcgagggtgaggccggcaagggcggcaagccagtgccgggtggtgagggccgcacgccgcgccagcgcgaggagcaacaggcggtggaggcatggatgcggcgtgtgccggatgatccgggcgcattgctgcgggccaagttccagctggaaaacgaacgcaggaagagggaagggcgatga

SEQ ID NO: 495654 - DNA, 1005 bp, Stenotrophomonas maltophilia
atgaacctctggacgacctattggccatggccggacctgcagctggcatggccactggcattgctcgcgctgccgttgccgttgctgatgcgctggtggaagcgccgtgcagaaccgggcgccgcgctgcgtgtgccctacgccgccgccgagctcgaagcgctgtccggtgggggccgcgtcgacgtgtcgtggctgcgcacgctgctgctatggctgggctggtgcgcgctgtgcatcgcgctggcacggccgcagcagctgggcgaagccatcacgccgccgcagcagggccggcagatgatgctggcgatggacgtgtccggcagcatgggcgagggtgacatggtgctgggagcccaggcggttgatcgcctcaccgcggccaaggccgtgctggccgacttcctggatcgtcgtgccggcgaccgcgtcggcctgctgattttcggtgatcgcgcctacacgcttacgccgcttaccgcagacctggccagcgtgcgcgatcagctgcgcgacagcgtggtcggcctggccgggcgcgagaccgccatcggtgatgccatcggcctggcggtgaagcgcctgcgcagccagccggagggacagcgcgtgctgatcctgttgaccgatggtgtcagcaacgccggtgtgctggagccgctgcgcgccgcggaagtcgcgcgcgccgaaggcgtgcgcatccacacggttgcattcggcggcgatggcagcatgcgcctgtttggtatcccgatttccaccgaccaggatccggtcgatgaggccaccctgaagaagatcgccagcatgaccggtggccagttcttccgcgcgcgtgacaccgcgcagctggccgggatctacgccgagctcgatcgcctggagccggtcgccgcgaaggggccgagcctgcgtccgcgcgaagaacgctatgcctggccgttggggctggcgttgctgctgggcgtgctggcctggctgtggccggagcgtcgccgatga

SEQ ID NO: 495655 - DNA, 450 bp, Stenotrophomonas maltophilia
gtgagcgccgcgctgccgctgcgcgatgtgcagttgccaccggcaccttcatggtggccgcctgcccccggttacctgatggtcggcgcggcggtggtgctggtgctgttggtgatcgccgtgctgatgtggcggcgtcgccgtcgccgccagcgttggttgcagctgttcgatagcgaactggcagccaccaccgacgctgcggccgaactggcggccattgccggattgctgcgccgtgccgcacgccgtgcaaagccgggcagtgaatcgctgcgcgatgatgcctggtggcagcgtgtagacccgcagggcacgttgcccgatgcgcgtcgcagcctgctagccgaaggcgcgtatcgcccacgcgtcgacagcagcgacgtggcggccgtgcgcagttgggcccgcgagcgctatctggcgatgctgctggagcgccgccgatga

SEQ ID NO: 495656 - DNA, 930 bp, Stenotrophomonas maltophilia
atgaccgatccatcgctggaacaggcaccgtccgcgctcgaaggtgacgggctgcgcccgcagctggccgaactggtcgcgctacggcggctggcacagcgtccgccgccgccgcgccgtggccgcaccggcaacgcgggccaggcaccgtcccaactgcgcggccgcggcatggaatacgccgagtcgcgcgaatatgtggctggcgacgacgcgcgccacatcgattggcgcgtgactgcgcgcaccggccgcgcccataccaaattgttccaggccgagcgcgagcgggtcagcctgatcgtggccgatacgtcgccggcgctgtacttcggcacgcgcgtgcgcttcaaatcggtacaggccgcccgtgccggtgcggttgccgcgtggtcggcgcagcgccgcggcgaccgcgtgggtgcgctgcgcggcagtgaccgcgaagcgccgattgcccctgcgggcgggccacgcggcgtgctgcgcgtgctcgacgcgctgacccgctggtatgcacagccgccggtcgacgatctgggcctggcgcgtgcactggatcatgccggtcgcgtgctgcgcccgggggcacgcatgctggtgctggccgatccgcagcaggccatccgtattccgcccgcgcgctggagcgcgctggcccagcatcacgatctcagcctggtgctgctggttgatccgctggaactgcatcccccctcggcggcgctgcagttccagaccgcacagcagcgcatcggcctcgacctgcgccgcagtgaagtgcaggcgcattggcaggcacacttcgtcgaaccgctgcaggaactgcggcgccagctcggcgcacgccgtgtcgatgtgcaggtgctgtccacggatgcgcccagcgacgcgtggctggcgccatcaccgaccgaggtgccggcgtga

SEQ ID NO: 495657 - DNA, 1026 bp, Stenotrophomonas maltophilia
atgaacctgccaccgccgatgcccgaaaccgtctcgccgccgcccgcgccggccacctcccgcctgcatgcggcgttcacccagctgcgcgacgcgctgtcggccgagatcgtcggccaggcggcactggtcgaacgcctgctgattgcattgttggccgacggccatctgctggtggagggcgcgccgggcctggccaagaccacggcgatccgtgcactggcctcgcgcctggaagcagactttgcccgcgtgcagttcacccccgacctgctgccggccgacctcaccggcaccgagatctggcgcccgcaggagggccgcttcgagttcgtgcccggcccgatcttccacccgatcctgctggccgacgagatcaaccgggcaccggccaaagtgcagtcggcgctgctggaggccatgggcgagcgccaggtcacggttggccgccatacctatgcgctgccgccgctgttcctggtgatggccacgcagaacccgatcgagcaggagggcaccttcccgctgccggaagcgcagctggaccgtttcctgatgcatgtgcgcatcggttacccggaccaggccgccgaatcggagatcctgcggctggcccgtgagcgtgcccgtggtgcattgggcgaggctgcgccggcgccggacaagatgccgatgcaggacgtgttcgacgcccgtcgcgaagtgctggacctgcacatggcaccggcactggagcgctacctgatcgaactggtgctggcctcgcgcgatcccgcgcgctacgacgccggcctcggccgccgcatcgcctggggggcaagcccgcgcggttccatcgcactggagcgctgtgcccgtgcgcgggcgtggctggccggccgtgacttcgtcacgcccgacgacgtgcgtgcagtcgccgccgacgtgctgcgccatcgcgtgctgcccagctatgaagccaccgccgagggctgggacggcgagcgcctggtgcaggagctgctggcccgggtgccggcaccctga

SEQ ID NO: 495658 - DNA, 1971 bp, Stenotrophomonas maltophilia
atgacctttcaccaagccaaggggctgcgtcccatccggcgctctaccttgaaccgtgtcagcgcgctgggagtcgcgctgatgctggcctgcgctccggcgctggctgccgcaccggcggaaaagccggtgggcgccaccgtggcaccggccgccgcgccggggggcctgtcggtggccaagatcgatttcaagcgtggcgatgacggcgccgggcgcctgatcgtgcagttcgacgggcagggcgcgatccctgacctgcgcacgcagggcaacagcgtggtggtcgacgtcggcaatgcccgactgccggccaacctgcagaagccgatgaacgtcaccgacttcgccacgccggtacagcgcatcgacgccaagccgtcgggcgccggcacccaactggtgctgagcaccggtggcgcggtggagtcgctggcctaccagagcggcaacgaatacgtggtcgagatcagcccgcgccaggcccaggccgccgtgggtgcggtcaccgccggcagcgtcacccaggcggccaaggccgtcggccagcgcggcttcaccggcaagccggtgaccttcaacttccaggacgtgccggtgcgcaccgtgctgcagttgatcgccgaggagtccaacctgaacgtggtggcgtccgactcggtgcagggcaacgtgaccctgcgcctggtcaatgtgccgtgggaccaggcgctggacatcgtcctgcgcgccaagggcctggacaagcgtcgcgacggcagcgtgatctgggtggcgccgcaggccgaactggccaagttcgagcaggaaaaggaagacgcgcgcatcgccatcgagaaccgcgaagacctgcagaccgactacatccagatcaactaccacagcgccacgcagatcttcaaagcgctgaccgaggccaagggcatcggcggcagcggtggtggtggcagtggtggtggttcgggcagctcctcgcaggaagacagtggcttcctgtcctcgcgcggccgcatcgtggccgacgagcgcaccaacacgctgatgatcagcgacatcccgaagaagatcgcgcgcatgcgcgagctgatcaacgtgatcgaccgcccggtcgaccaggtgctgatcgaaagccgcatcgtcatcgctaccgacaccttcgcccgcgagctgggcgcgaagttcggtgtcagcggcagccgcgacaacgtgtacttcagcggtagcctggatgccaatgcgaagacccgtgagtcgcaggttgcgaccgacctggccaatgccaaggccgagcgtgactgggtagccggtggccgggtcggcccgccgccggtgaagtccggctcggcgatcacccgtggcctgaactggaacctgccggtggctgccgccagcaacccgggttcgctggcgctgtccatcctcaatgccggttacctgctggacgtggagctgtcggccatgcagcaggagtcgcgaggcgaggtgatctccaacccgcgcgtggtcaccaccaaccagcgcgaagcgatgatcaagcagggcaaggaaatcggctacgtcaccatcagcggtggtggcgctggcggcgtcgcgaccccgaacgtccagttcaaggaagtggtgctggagctgaaggtcaccccgaccatcaccaacgacaaccgcgtgttcctcaacatgcaggtgaagaaggacgaagtcgaccagctgatccagctggagggctacggcaccgtgccgtcgatcaaccgtcgcgaagtcaacaccgcggtgctggtcgaggatgggcagaccgtggtgatcggtggcgtctacgagttcaccgatcgcaacagcatcagcaaggtgccgttcctgggcgacgtgccgttcctgggcaacctgttcaagaagcgcggtcgcaacaaggacaaggccgagctgctggtgttcgtcaccccgaaggtgctgcgcgtggccaagcagaactga

SEQ ID NO: 495659 - DNA, 534 bp, Stenotrophomonas maltophilia
atgcgcgcgcagaccgtacgtggtgcgatggtgctggctgtgctgctgctggctggttgcggccgtggcgtgaccagcacgcccggcgacgcaccgaaccttgagaagtgggtggaaggcgagcgcgcgcgaccggcgcaaccgctggagccgctgccggtgatgcagcagttcgagaccttcgaatactccgcgcagggcatgcgcgatccgttcaccgatgcctggaccaatccgcagcaggggaacggcggattgcgaccggacccgaaccgacgcaaggagccgctggaaggcttcccgctggatgcgctggacatggtcggcaccatcggtaccggcgcaggtaccgtggcgctggtgatggggccggacaaggtcacctaccgggttcgcccgggcggttacctggggcagagcgacgggcgggtcacggcggtcttcgaagaccgcgtggagctgatcgaactggtgccggatggcgcgggtggctggctggaacggccggcaacgctctcgcttgaagatcaatga

SEQ ID NO: 495660 - DNA, 657 bp, Stenotrophomonas maltophilia
atgagccagaagatcgacatcaagaacctggatttcaacgacatcggcaactggccgcagaaggccaagatcgtcttctgctcgttgctggcgctggtcatcatgttcgtggcgtggatgctgctgatcagcggcaagcgcgaagaactggccggcctggaatcgaaggaagtcgagctgcgcaccgagttcaccaagcagcaggaacgcgcggtgaacctggggccgctgaagcagcagttggcgcagatggagcaggtgctgcagcagatgctgcggcagctgccgagcaagaccgaaatgcccgacctgatcatcgacatctcgcagaccgcgctgtccagcggcctgaccaacgagctgttcgagccggagcaggagcagatcaaggagttctacgccgagaagccgatcaagctgcgcatggtgggcagttaccaccagttcggcgcgttcgtcagtggcgtggcctcgctgccgcgggtggtgatcctgaccatgcatgacatcaacctcaagcccaaggaaaagaccggcggcaacgtccgcagcggtgcactggaactgtccggtacggtcaagacctaccgctacctggacgagaccgaggtgcaggcgcagcaggcggccgacgctggcaaggagggcaagaagtga

SEQ ID NO: 495661 - DNA, 882 bp, Stenotrophomonas maltophilia
atggcacgcatcaatctattgccctggcgcgccgagcggcgcaagcaacgccagcgcgagttctacgcaatgctgggcatggccgccgtcggtggcctgctgctgtcgctgatgatctggttctactacgaccgtcaggtgagcggccagatggaccgcaatgcctatctggaagccgagatcgagaaggtcaaggaacagaacaaggagatcgatcgcctcgacgcgcagaaggaacgcctgctggcccgcaagaaggtgatcgaggaactgcaggccaagcgctcgcagatggtccacctgttcgacgcgctggtgcgcacgattcccgacggcgtggtgctgaccgcgctgaagcaggaaggggatgtgctgacgctggaaggccgcacccagtccaacgcccgcgtttcggcctacatgcgcaacctggagacctccggctggatgaccaacccggagctgtcgatcatcgaagcgcgcgacccggagaaggacaaggacggcaaggccggcccgctggccgacatcaaggcgctgccctacgtgttcgtggtcaaggtgaaactgccggcacagagcgaagaggtgtcggcgacgccgggcctgaacgccgatggctcggtggcgacggctgccccggcaccggtggcaccgttggccgcaggtccggatgccgcgacgcctgcggccccggcagcgggccagccggcagcagctcccgccgcaccggccactgcaccggccacgccggccaagccgaaccaaccggccgctccggccgccgcgccggccccggcacctgccccgaagcctgagggcagccgcctggcgcagccgccgcaggccttcaatgcgctgctgcagggggaccgcgcatga

SEQ ID NO: 495662 - DNA, 1059 bp, Stenotrophomonas maltophilia
gtggggctcatcccaaaaagtcagtcgccgctcgtaggcgtcgacatcagttcgactgcggtaaagcttttgcagctgtcccgcagcggcaatcgttttcgcgtggaacattacgctgtggaacctcttccgccgaatgcggtggtggagaagaacatcgttgaagtggaggccgtgggtgaggccatccgtcgggcgatgaaccgttcaggcagcaaggccaaattggccgctgccgccgtcgcggggtcggcagtgatcaccaaggtgatcccgatgccggccgatctcgacgaaaacgacatggaagcccagatcgagctggaagcggtcaactacattccgtatccgatcgaggaagtgaacctggacttcgaggtgatcgggtcgatcccgaacaacccggagatggtccaggtgctgctggccgcgtcgcgttcggagaatgtcgagctgcgccagtccgcgctggaactcggtggcctgcaggccaaggtgatggacgtggaggccttcgcggtcgagaacgcctacgccctggtcgccagcgagctgccggtatccatcgacggcgtggtcgcgctggtcgacattggcgccaccatgaccaccctcaatgtcctgcgcggcggccgcagcctctacagccgcgagcaggtgttcggtggcaagcagctgaccgatgagatcatgcgccgctacgggctgagctacgaggaagccgggctggccaagcgccagggcggcctgccggaaagctacgagatggaagtgctggagccgttcaaggaagccacggtccagcagatcagccgcctgctgcagttcttctacgcaggcagcgagttcaaccgcgtcgatcacatcgtgctggccggcggctgcgccgtgctcggtggcctgccggagatggtcgaggaacagctgggcgtgccgaccgtggtcgccaacccgctggcgcagatgaccctggggccgaaggtgaacgcgcatgcgttggcccaggatgcccccgcgctgatgatcgcgaccggtctggcgctgaggagctttgactga

SEQ ID NO: 495663 - DNA, 2424 bp, Stenotrophomonas maltophilia
atgactcgactccgccgctggctgcgctggatcttcctgattgtcctggtcctggcgctgatcggcgcggccgccgtgggcggtctgtactatgccgtttcctccaagcttcccgacgtgcagaccctgcgcgacgtggaaatgcaggagccgatgtacgtctatgctgccgatggcaagttgatggcggtgttcggcgagacccggcgtaccccgatcaccatgaaggacgtgccggagaagctgaagcaggccttcctggccaccgaggacgcccgcttctacgagcacggcggcgtggactacatgggcatcgggcgggcggtctggctgctggccaccacgagcgacaagcgcgtgccgggtggctccaccatcacccagcaggtggcccgccagttcttcctcagctccgagtacagctacacccgcaagctggccgagatcctgctggcgcgcaagatcgagtccgagctgagcaaggacgagatcttcgagctgtacctgaacaagagtttcttcggcaaccgcgcctacggcgtggccgctgccgccgagttctattacggcaagaagctgaacgagctggacctggacgagatggcctcgctggccggcatccccaagttcccctcgtcgggcaacccgatctccaacccggagcgtgcccgccagcgccgcgacaactacgtgctgcagcgcatggccgacctgaagttcgtcagccaggccgaggccgacgcggccaaggccgtgccgatgcatgccaccgcgcatgagccgccggtgcaggtcgatgccccgtacgtggccgagctggtgcgccaggaaatgatcgcccgcttcggcggcgacgtggtcaacaagggctatcacgtcaccactaccatcgactccaccctgcagaccgccgcgaaccagtcggtgcgcgacggcctgctgctgtacgaccaccgccacggctggcacggcgtggagaagcaggtgcaggtgggtgccggcgaagacgccgccgccctggccgagcacctgcgcggcatgtacggccaggccggcctgctgccggcgatcgtcgccagcaccggcgccgacggcagcgccaccgtggtgctggccaaccgcagcgagatcgtgctgccggccggtgccgccaagtggaccaacaagaccccgggcaagctggtgcagcgcggcgacatcgtgcgcgtgcgcgccggtgccaaggagggcgagtggctgctggaccagatcccgcgcggccagtccgcgctggtctcgctggatgcccacagcggcgcgctgaaggcgctggtgggtggcttcagcttctccggcaacaagttcaaccgcgccacccaggcccgtcgccagccgggttcgagcttcaagccgttcgtctatgcagccgccttcgacaagggctacaacccggcctcgatcgtgctcgacgccccggtcgtgttccgcgaccgccgcggcaagacctgggccccgcagaacgacggtggcggcttccgcggcccgatgcgcctgcgcgaagcgctggtgcagtcacgcaacctggtatcggtgcgcctgctcgatggcatgggcgtggactacgcacgcaagtacatcagcgagtttggctttgccgaatcggagctgccgccgaacctgtcgatgtcgctgggcaccgcctcgttgaccccgctgtcggtggcgcgcggctacgccgtgttcgccaacggcggctcgcgcgtggacacctggctgatcgaccaggtcaatgaccgcgacggcaacctggtgttcaaggaaaacccggcgctggcctgccgcgactgcgccggcagcagtgaccagccggtcaaccaggtggtggacggcttcaacttcggcgctccggccccgaaggtggacccggccgccgccgccaaggccgaagccaaggtcgaaacccaggcggcaccggccaacccggatgcccgcactgccccgcgcgcgatcgacgcccgcaccgcctaccagctggtatcgatgatgcgcgacgtggtccagcgcggtaccggcgtccaggccaaggtgctcggccgcgaggacgtgggcggcaagaccggctccaccaacgaccaccgcgacgcctggttctccggcttcggtggcccgtacgtgaccaccgtgtgggtgggccgcgacgacttccgttcgctgggttaccgcgagtacggcggcaaggccgccctgccgatctggatcgactacatgcgcaccgcgctgaaggacaccccgatcgcgcagaacgacccgcccagcggcatggtccaggccaccctcaacggcgcgaccgagtgggtgaaggtggaagacatggaccgcctgaccgactacgacctgaacctcaatacgccgcaggccgacgccgccgcgttcgacatcttctga

SEQ ID NO: 495664 - DNA, 747 bp, Stenotrophomonas maltophilia
atgtatcgatgggtaagccgattcatcagctaccgcacgttctatctgtggcgggcgcgtttttactactacacccgcaatctggatcgctgggtgcagttcaccttgttgtgcctggtgggcatggtgctggtgctctggtaccactggcgggtggcgagcgtgccgccaccgcgcgtgcatccggaggcggccgcggtgcgcgtggagaacatcacccaggaggcgatccatcgcatcgtgctggtgcggcatggtggcccgacaccgggcgagccgttcaccacgccggaagacgtccgcgcgggaacgctgcgcaccctgcgggtgcgacaactgctggacagtgagagggtgtggcagctgaaagcccacatgctggccgacatggcggcgtacatcgaagccacgggcagctgcttcccctttccatgctggcaggtgagccaccggctggagctcatgcgtgcggcggaggcggagaacgcggccatcaaccgggggctggagccggtgctggaggtgccgttggacaggatgcccaacctcaacggcggtgagcgcgcgcggatacagacggcgtggtcggacccgttcggcgatgtctacaaccagacctggttgctgggcgatctgcagaacatgcatgcgcggatgatgatggcgtacccgcagcgggtgggagcaccgtggctgatgcgcctgcttggcgatgagacggaggagcagcaccatgatgtctggtag

SEQ ID NO: 495665 - DNA, 4605 bp, Stenotrophomonas maltophilia
atgaatcatatctatcgtcgtatctggagcaatgcaaagcagtgttgggtggtcgtgggcgagctggtagcagcgcgtggaaagccacgaagcgccttgattcatcgtcgcgggaccgcactgattgtcttcatcgcactggccggtgcggcgggcagcgcgaatgcgggtctcgatgtcggttgttcgggtgacaacgggaacatccggcattgcattccattcataggttcgtgggaccctcgcatgtcgacaggctatgctgacatgggtttggatgtgacgaactcgatggcgatcggtgcggggtccagaatgtacggaagttactcgttcgcgttcggtcaaggtgcgcgagtcgagaagcgtaacagtgtcgcgttcggctaccactctacaacctccgacgtcgacagcgtcgccatcggctatatgtcgcgtactggcgcaaatggtggtcacagcattgccatcgggacgagagcgtttgccgattacattggcgcaaccgctttggggaacagctcaacggctcgcgccgagaatgctgtcgcccttggaagcggcgcctcggccaccgcatcgaatgcggtggccattggtgccaactcggtagccaacggaagcaacacagtatcggtgggaagcaacagcattaaacgaaggatcgtgaatgtcgcatcaggcaacatttcctacggtagtgcggacgcggtcaccggtggtcagctgtatgaaaccaatcagaatgtagcatcggcgcgaagcacagcggattcggcttactcgaccgccagggcggccaggactgttgccgatacggcgaagtccaatgcggacaatgccttgtcgaaagccaatatgctttccggcctcctgagccagacgtctgcctcggggaacgttcgcctaggtgcaagtaacagcggaaccgtgctggacgtccgcaacagcgccagcgccaatcgcaggatcacgggcgtggcggatgccacgctaagcacgacgagtacggatgctgtgtctggcaagcagctcaatgccaccaacaccaatgtaacggccgcacggtccgtcgccgactccgccaagtccaatgccgacagtgcgctggcaaaggccaatacgctctccggccttctgagccagacgtctgcttcgggaaatatccgtataggcgcaagcaacagcggcaccgcactggacgtccgcaacagtgccagcgccaatcgcaagatcacgggcgtggcggatgccacgctgagtacgtccagcaccgatgctgtgtcaggcaagcagttgaatgccaccaacaccaagctggcagatgcacagcgcgtcgcagacgcggcagccgcgcgcctgaacgcatccgccccggctatcgggctggcggcagaggcggaagggagcggaagcaccgccagcgtagcgatggggcgctcggcgaaggcctacaacaccaacagcatcgcagttggtgcagatgctcgggccggtgtcgacgccaacggcgacaagagcgctgccaccggtgcagttgctctcggtgctgcaacgcgcggtggcaatggcgcggtggcggcaggcctgcgtgcttcggcggtgggtgatcgcgccgtggccgtaggcaatgatgcgacggccgcggcgacccatgccgccgcgctgggctacaaggcagatgcgagcggcaatcaggccgtcgccattggccgggaggccgccgcatcggccttgtattcgacggcgcttggcaatcttgcaaaggcgggtgccgaaagtgccgttgcgttgggcgaccgcgccctggcatcgcacacgggaagtgtcgctctgggcaacggctcccagaccaccggcatcaatcaggtctcggtcggcagctccagtatcaagcgcaagatcgtcaaccttgcggatggcgctgtcagcagcagcagtaccgaggccattacgggcaagcagttgaatgaaaccaacggccgggtaacgactgcacagaatgctgcgaacggcgcgcaggcaacggccaatgccgcacaggttgatgccaccaaggccttggctgaagctaccgtattgggtgggctcgtcgggcaggtttcggccacggggattgtccgcctgggtgagcagaaccgcggcacgacgttggacgtgcgcaacagtgccaatgtcaatcggaagatcagtggtgtagcggacgcgatattgagcgccagcagcgccgaagcagtctctgggaagcagttgtattcaagcaattcacggatctcagttctggaaggggttagtcagttcctgagtattggcgtggcgcccatcagtgagcctgctgcagcgggggcaggaggggtcgctatcggtaactcagccaagacaggttctgaaagtggaactgcggttggtactcgagccagggcaatgggcaggagttcgactgcgattggtagaggggcaaccgtttttgagcaatccgagagtggctttgcaatgggggccggtgctgaggtgggggcagcgggcggtggagcagatggcggtgttgctattggtgcgggcgcaaagatcgggagtggagcccatggctcgctggcactcggaagcagcgctcaggcaaatgaagccggagttgcatcgttcggaaacagtggtatgcagcgccgccttgtaaacatcgcccgaggcaccgccgaccacaacgccaccaccgtctctcagctcaaggactccctagccaccctcggcggcggcgcaggcatggacgccagcggcaacatcatcgccccgacctacacgatgcagggtggcacgcagaacaccgtcgaggacgcactgatggcactcgatggcgccgtcgtcaccgcagaccgtcgcgcggacaaggtggaaggccagctgagttcgatcttccagaaatcaccttcggcccgtgccgacggcatgaaccaggtcgcgctgaatggcgtgaatggcatggtgctgaccaacctggctgacggccgagtggcggcgggaagccgtgatgccgtaaccggcagtcagttgtacgccgcagaacagaagatctcgcaaaatcggaatgatctggaggcgatgcgtaaggagcgggagataggtgagcaggccatgcgtggattggatgcgagcggtccaatcgactttggcggtgcacgtttgactggcgtggccgaggcgaagctgtcggctgacagctcggacgttgttcgcggaagtcagctctatgagaccaacagccgtgtttcggccatggaaggcatcagccagtacgtcagtgtgggtacggctcctgagtatggcggtgctcaggctggtccgggtggtctcgccattggaaacttggcaaagacgggcattgaggggggcacggcaattggaacattcactgaggcaatgggcaaaaactcaattgccatcggacgggcgtccactgtctaccaaggctcagattccagctttgccatcggaactggagctgaggttggtagggccggcgagcctggtgcaatcggagccatagcgtttggtgctggttcgagagtcgaacccggggcacatggttctatagcgctcggaaccagctcttatgcagccgaggcgggggttgtgtcgtttggcagtgttggtacgaagcgccgcctcgtaaacatcgccaacggcaccgccaaccataatgccgccaccgtcggccagctgcgcggcgcattgtccgcactcggcggcgaagtcgataccaatggcaacatcgtcggtcccagcttcaatgtccaaggccagtcccaatccaccctcaacggcgcattggaagcgctcgacggcgcagtcgtcagcaccacctcgcgcgtgaaccaggtcgaatcccagctccgctccgtgttccaggaaagcccctcggtccgcgcagatggtacccatcagctcacactggccggtgccaacggcatggtcatctccaacgtggccaacggcctgatcgcggccggcagccgcgatgcggtcaacggtggccagctgcattcgatgcagcagcagatcaacggccgcatggatgggctggagcagcgcatcgacggtcagccgcaggcccgcgccatggcggcagcatccacgccttcgccgtccaccgaagacatcgcgccggcaccggaaaccaacggctcgccgcagatcgcctcgaccggtgaaggtgacaagcccacgccgcagccgaagccgaagcaggacaacacgcccaagccgcaggtcgataccgccgacctggaaaagatgctggcccgggccaacgagtacaccgatggtgcgatcagcaccttcgaacgccgcctggacaagatggacaagcgcttcaaccgcatggcggcgatgagcagcgcacagagtgcgatggcgatgaataccgccggcctggccacctacaaccgcctgggtgcgggcgtgggttacagcgagggtgagtcggcgatggcggtgggctaccagcgcgtgctgaacgagaagggttcggccaccttcagcctcaatggtgcgttcaccaacagcggtgagcgcagcatgggcgtcggcgtgggcatcggctggtaa

SEQ ID NO: 495666 - DNA, 708 bp, Stenotrophomonas maltophilia
atgaagaagctgctgttctgtctgttgccgctgagcgcgctgctggccccgccggcgcatgccaacctctccatccatccgatgcgcgcggccgtcgatggcaagcgcggtacgcagatccgcgtctactcgcactccacccagccgcagtacgtgcaggcacgcctgttgcgcatcgcgaatcctgcgcaggttggcgaggaagaggtggaaatggaggcggccgacgccgcggtcgccatcacccctgggaagttcgcactcagtggcggaggcaatcgcctgatccgggtgattccgctacgcggcgtggagaaggaagtggcctaccgcgtctacttcgagggtgtcaggggaccggacgggactctgctcgagggtgacgagcaggcggcacaggccaacgtcggcgtcagcctggtctggggcgcgctggtgaacgtgctgcccaccaacggcagcgtggatctgcaactgcagggcgacaccctgcgcaacgtggggaccttgcgggtcggcatcaccggactggccgagtgcagcgccagtggtgcctgtaccacccacgactttgccaaaagcctgtacccggacgcggagctgaagctgccgttccagcctcagccgggcaacaccgtgcagctgcattaccgcctgtccaaggacggctaccgcgagcacgtaaccacactggcgccaagcgcctga

SEQ ID NO: 495667 - DNA, 582 bp, Stenotrophomonas maltophilia
atgcgcctaaaaatcaaggccgaccccgccgcagcacccgtcgccacagccaccttcaacttcgacttcaccgtcaccgactacgacgcgatctcgatctacttcccgggcttcgacggcatcgcaccgctggtcaacatggacctgcgctacgaccccatccgcaagatggtcggcggctacaaggaagtggacatgtgcctgtacgacggcgtgggctcgcagagcgagttccttggcgtcaccgtgcgcgacagcggtccacggccaccaccagggcgtgactatgcggtctggcacggggatggcggcagcgatgacacccagcgcctggactaccaggttggcctgaaatacggcggaaacctgctggccatgaaacacggcgaggaacagctgctgcgcggcatcgacagcgcgcagctgcgcctggtgatgctgccgggcatcaatcaacccgtgtactgcgtgcccacgccgctggtgctggaaacgccgcctacgcccatcgccagcaagcggcccggtctctacgacggcgagctgacggtagagctgcgcgtgccgactgccaaaccctga

SEQ ID NO: 495668 - DNA, 2730 bp, Stenotrophomonas maltophilia
atgaccccacatgcccccgccgttacccggctggcggtcgcgctcgccctggcgctggctgctccctcggtagcggcccacggcgtccccgccggcttcgaggatctggtcgaaggccagaccgaacaactcgacatccagctgttcggccgctcggccgggctgtcgccggtacgcgtgaccctggaacacgtgcagctggaagaccccgcgcgcgtgctgcaggcgctggccctgcctgccgaagcacaggccgcgttgctaccggcgctgtcgcaaccgttgccgcgcaacagccatctggcctgccgttttggtggcgccacggcggggtgcggctatctggacccgcccgaagagcccaccgcggcacgcgcgctgtacgacgagggcgagggcgcggtgcgcctgttcgtggcgcggcagtggattcccggcgagccggcagcggagcgttaccacacggtcacggccaacgccgagaacgccttcctgcaccagcagacgctcaatgtgagcggtggtcgcgattatcaggcactgtccgcgcgcggcgtgggcacgctgggcctgtttgatcgcggccacctgtccgccgactggtactacacccagcagcgctaccgcagccgtggcagcaacgacgacttccagttcgacaacgtctattaccgccatgacctgggccaagcgcattacctgcaggccgggcgcatggaccgccgcaacctgtccagcccgcagggcggcaccttcagtttcagcatgctgccgctggaccgtttccagggcgcacgcgtgggcaccacccaggcctatgtggacaccgacgcggccgtgcaggccacgccgctgaccgtgctgctggcgcgcgatgcacgcgtcgatgtgttcgacggtgagcgcctgctgcagaccttctacctgcaggccggcatcaaccagatcgacacccgcaatttccccttcggcaactacctggtgcgcatgcgcatctacgaagatggtgtactggtgcgcaccgaggaggcgccgttcgacaaaggcggcgactggaccaacagccagtggcagtggttcgtgcagggtggccgtcgcaacgagcgccgtagcgaccgtttcgatggagaaagcgtggcaatggccggcgtgcgcgtgccgctgggccgcgatgccgcacttaccgcgggcgccgccaacctcggcggccacagctacggcgagctgcgcctggacctgcgccgcgtgctggccacccaggaaatgcgcgcctcgctcagcggcatgcgtggaagcgatggcagcaatggtcagcagcaccaactgtcataccggcgcaaggcgtcgtggaatctttaccagcagcgcatgcgcggcaaggcctgccagttcgaggccgatgcacgcgaccagctgggctgcaccaactcactcagcggctcggtatcgctgccgctggccggcggcaacgtctacgtgggctacacccggcgccagacctggcgcaccggctggcatcggcctgaattcgagcaggacccgttgttcgggctggatcccttgctgccgcccggtccgctggagccgcgccgcgagcccgtgctgagccggacctggcaggccagcttcagccgcagccaccgctggcaggacttcagcgtgtccacgcgcgtggggctatggcagcagcgcagcaccgacagcgtgcgcggcagcaacgagcgtgaccgtggcatctacttcaacctgagcctgacccgcctgcagcgtaaccatgacagcagcggccagcgccgctacgcggtggacgtgcgccagccgcagcgtcagcgcccggccatcgactacagcgtgggccagagcctgcgccaggaccgggacacgcactatcgggagctgaatgccgaactgcgcgccaacaacactgaccgttacagcgcgtcgctgagcggccagctgcagaacggcatcggcaacaccgccgccagcatcgcgcactatcagcagcgcgggcgtggcgagaccggctacagcggcagccacagctccggcttcgcactgggccgtcgtggtttcttctggagcggtgccaacggtgccgaggccggcctggccgtgcaggtggacggtttcgacgatgccgacctgcatggcgtggccgcggaattgcaggtgggtgggctgcgccgacagcgtctgcagatcggcgagcgccggctgctgccgctgcaggcctatcagtcgcagcgcgccgaagtgcaggacgccagcacgctggacagcatcgccgcgatccgcgtgaccggcgtgggcggtgcacgaccgatgttcctcacccccggcaagctgatgcgcatgccggtgccgattgaagtgacctacaccttcatcggcaatgccaaggaccttgcggggtcgccgctgggcggcgcccgcatcctcaatgcgccggtgcccggcaccagcgccaacggcagcttcgtcgccgattttccgcgccgcgaaacaacgctgtacctgctgcaggacgaccgcctgctgcattgcccgctgcaggtgcgtgagcgccgccaggtggtgctgctggtcggcgccgtgcactgcgagccgctggccgtggcccagctgccgcccgagatccgccagcaggcccgcgtgacccgcctgctgcaggaacgcgcgttgatcgccgccacgccccagaccgctgctgcaggaggtacgccatga

SEQ ID NO: 495669 - DNA, 498 bp, Stenotrophomonas maltophilia
atgcacgccattatcaagaaggccgcgctcgctgcagcgctggctactgcttcgctgtccgcgcacgcgctggaaaccaagatcaccgtctacgccgacgtcgacccgaccctggcgctgctgcgcgacgatggcaccccgctgccggacaccgtgcagctgacccacgatccgctgcgtggcctgctgccgtcgacgcagcaggtgcgcatccattccaatgacgaaaccgcggacatcgaggtgcgcctccgccacgatccggtgctgctcaatggcgccacgcgcgtgccgctggccgtcagcctgaataccgacgcgctgaccactgcggtcaccgagttcaaggcggctgacctgttcaacggcgccagctcgacgccgggtgcctccatctcgatgcccctgaccatcgcccaggcgggtgccggtggcccgcttacggtcaacggccgctacgaaggcatggtctacatcgtcatgaaccagaagccctga

SEQ ID NO: 495670 - DNA, 1065 bp, Stenotrophomonas maltophilia
atgagtacccgattcgacccacccgagcgcggcccgctcggcactgacgtcgccgctgtcgtcactgcccccatcgttccgcccgccagcgaaagcgcggtgtcgtggggagccatcttcgctggcgccgccgccgccgctgcgctctctctcatcctgctgatcctcggcgtgggcctggggttgtcgtcggtgtcgccctggtcgttcgaaggcgtcagcaaggaaaccttcggctggtccagcatcgcctggctcaccttcaccgcactggccgcttccggcctgggtggctatctggcgggtcgcctgcgtaccaagtggacgcagatccacggcgacgaaacctacttccgcgacaccgcgcacggcttcgtgtcgtgggcggtggccacgctgctgaccgcgggcctgctgacgtcggccatcggtggcgtgctgggtgcgggcgcaaaggtggccggcgccactgccggtgccgctgcgtccaccgtcggcgtggctgcagccggtgccagcggcgctgtggcggctgcaccggaaggcgacctcgactattgggtggatgcgctgttccgcagcacgacccacgcagggccggccgatcccgcagcgccgccgccgggcgcaccgatggacccggatgccgcgccaccgccggcagcgggcgccggtccgcgcgacgcgcgcatggccccgccgccgcgaccggcgccgggcaacggtccgatcggcgatcgccgcgaagtgcgtgccgaagtgaaccacatcatcgtcaacagcctgcagggggaaggcctggatccggccgatacccagtacctgtcacagctgatcgcgcgcgagaccgggatgagcccggctgaagcgcaggcccgcgtgaccgatgtgcagacgcgcatgcgtgcagcgctgcagaaggccaggaataccgccaagcaggctgccgacgatgcgcgaaaggcgaccgcctatgccgcgttgtggctgttcatcaccctgctgatcggtgcgttcttcgccagcctcagcgccacctggggcggccgccgccgcgacctgtaa

SEQ ID NO: 495671 - DNA, 1278 bp, Stenotrophomonas maltophilia
gtgtccgatcttgatcaggtcacgctcaacgccggcgataagtccgtcgttctgcccgtcatcaaacccacccttggcaacgactgcgtcgacatcgcgaagctgaccaaggaaacggggtttttcacctacgattccggcttcaccgcgacggccagctgcaagtccgccatcacttacatcgacggcgacaagggcgtgctgctgtatcgcggctacccgatcgagcagctgtcggaaaagtcgagctacgtcgaagtggcctacctgctgatcaacggcgagcgcccgagcgccgagcagctgaaggccttcaccgatgagctgactgccgaagccaatgtcgacgactcgatcaacaccctgatcggcagcttcgccaaggacgcccacccgatggccatcctggctgctgcgatcgcgcagctgtcggccatctaccacgacgcgctggacctgtccgacgccgaacagcgccgccaggccgccgtgcgcctgatcgccaaggtgccgaccctgtcggcgctgatctaccgccatggcaagggcctgccggccaacaagccggacacgtcgctggactacgtcagccgcttcctgaagcagaccttcgagtcggctgacggccagtacgatctgaacccggatgtggtcaaggcgttggacctgctgttcatcctgcacgccgaccacgagcagaacgcctcgacctcgaccgtgcgcctggtcggttcgaccggtgccaacccgtacgcgtcggtcgccgcgggcgtcaccgcgctgtggggtccggcccacggcggtgccaacgaagccgtgctgaagatgctggaagagatcggcagcgccgacaacgtcgagtccgccgtggtcaaggccaaggacaagacctccggcttccgcctgatgggcttcggccaccgcgtctacaagaacttcgacccgcgcgccaaggtcatcggcgagatgaccagcaaggtgctcaagcagctgggcgtgcaggatccgctgctggacgtggccgtgaagctggaacaggccgcgctgcaggacgagtacttcgtcgcgcgcaagctgtacccgaacgtcgatttctacagcggcatcatctacaaggcgctgcagatcccgaccgaaatgttcaccgtcatgttcgccctgggccgtacctccggctgggtctcgcattggctggaacagcaggtcgatccggaaatgaagatcggccgtccgcgtcaggtctacaccggcagcgacgtgcgcgactaccagggctga

SEQ ID NO: 495672 - DNA, 243 bp, Stenotrophomonas maltophilia
atgaaggccgatatccatccgaactaccgcgacgtcgtcttccatgacgtcacctccgatttcaagatcctgacccgctcgaccatggcgacgaaggaaaccatcaagtgggaagacggcaacgactacccgctggtgaaggttgaaatttcctcggcttcgcacccgttctacacgggcaagcacaaggtcatcgacacctcgggccgtatcgacaagttccagaagcgctacgcgcgctga

SEQ ID NO: 495673 - DNA, 939 bp, Stenotrophomonas maltophilia
atgacccacaagatccccctgttgatcgacaccgaccccggtgtggacgacgccctggccctgctgatggcctttgccgatgaacggcatgacgtggtcgccctgaccatcgccgccggcaatgtcggcctgcagtacaccgtccgcaacgccatcaagctctgcgacatcgtcggccgcaccgacgtgccggtgtttgccggcagcccggatccgctgctgcatccttccgtagacgctgcccacgtgcatggccgtgatggctatggcgacgtggacctgccgccgccgagccgccaggccgaagccgagcatgctgcgctggccatcctgcgcctgtcgcacgcgcatgccggcgaactgatgctggtgatgcttggcccgctgaccaacctcgcgctggcactgaagctggacccgaccctgccccagcgcatcaagcgcatcgtggtgatgggcggcgcggtcacctgccacggcaacatcaccccggcggccgaattcaacatcgccttcgatccggaagcggcgcatgtggtgttcacctcgttcaagcatctgctggtgtcggactgggaggccaccgtcgcccacggcctgccactggaagaagccgagaaatggctgcaggccgattccgatcgcgcccgcttctacgagctgatttcgcgcaagacccggggcctgtccgaagacagcaagggcggccgctggtacaccgccgacgcggttgccatggcctgggcactgaacccggaagggcagctgcgggtcgagtcgcgtccgctgaacgtggagctgaatggcacgttcagccgcggcgccaccatcgtcgactggaaccgccagaccggccagccggacaactgcgatctgctgatggcctacgaccagcagcgtttcgaggccctggtacgccaggccctgggcgcggactga

SEQ ID NO: 495674 - DNA, 2112 bp, Stenotrophomonas maltophilia
gtggcacgcaaggcggcggtcaccccggtcctgtcaccgtccggcgaagcatccctggcgatgctcgccggcgtcggtccggccgtggccgctaaactgcaggcgcgtggcctggccaccctgcaggatctctggcttcacctgcccctgcgctatgaagaccggacccggctgacccgcatcgaagacctgcgcaacggcgtgccggcgcaggtggaagggcgggtggtcgcggtcgagcgcggcatgcgctatcgaccgatgctgaaggtcgcggtggaggacgaagggcagggcaccctggtgctgcgcttcttccatttccgccagcagcaggtcggccagttcgcggtcggcaaccggctgcgctgcttcggcacgcccaagcccggccacctcggcctggaaatcgtccatcccagctaccaggtgctgggccgcaacgatgatcccgaactcggcgaccgcctcgacccggtgtatcccaccgtcgaaggcgtgggcccgatgacgatgcgcaagctgatcggccaggccctggatcgcctgcccgaggagagcacgctggaactgctgcccagcggttggctcgatggcctgggcctgccgtcgctgcgcagcgcgctgctgaccgtgcaccggccaccgccggatgccgacctcgccgcgctggccgccggcacccacccggcgcagcgccgcctggcgatggaagaactgctggcccaccacctcagcctgcgtcgccagcgcattgccttgcaggcacaccatgcgccggcgctggctggtcctggcaagttggccaaggcgctgctgaagcagctgccgttcgcgctcaccggcgcgcaggcgcgcgtgttcaagcagatccgtgaagacctcgcgcgccccagcccgatgctgcggctggtgcagggcgacgtcggttccggcaagaccgtggtggccgcactggcggcgatgctggcggtggagcagggcaagcaggtcgcattggcagcgcccaccgaactgctggccgaacagcatctcaacaacctgcgcggctggctggagccgctcggtgtgcgtatcgcctggctggccggcaaggtcaccggcaaggcgcgcgccaaggtgatggagcaggtcgccagcggcgaagcgcaggtggtggtcggtacccacgcgctgatgcaggaggcggtggtgttccaggatctggccttggccatcgtcgacgaacagcaccgcttcggcgtgcaccagcgcttggcgctgcgcgacaagggcgcgggcggcaacagcgtgccgcaccagctggtgatgaccgccacgccgattccgcgcacgctggcgatgtccgagtacgcggacttggatgtgtcggccatcgatgaactgccaccgggacgcacgccggtgcagaccgtcgccctcaacaatgaccgtcgcccggaactgatcgagcgcattgcgctggcctgcgaggaagggcggcaggtgtactgggtgtgcacgctcatcgaggaaagcgaagaactggatgccaccccggcgcaggccacctacgaatcgctgcaggcactgctgcccggcgttcgcgtggggctggtgcacggacgcctgaaagccgccgaaaagctggcgacgatggtggcgttcaagaccggcgagatcgacctgctggtcgcgaccacggtcatcgaagtaggtgtggacgtacccaatgcttcgttgatggtgatcgagaacgccgaacgcctcggcctggcccagctgcaccagctgcgcggccgcgtggggcgtggttcggcggtatcgcgctgcgtgctgctgtaccaggctccgctttcgcagatggcgcgtgagcgcctgcagaccatgcgcgaaaccaacgatggtttcgtcatcgccgagaaggatctggaactgcgcggccccggcgaactgctgggcacccgccagaccggcctggccggtttccgcattgcagacctggcccgcgatgccggcctgctgcccggcgtgcatgacctggccgagcggctgctggcccagcagcccgcgttggccgatcgcgtggtgcagcgctggatcggcaccgccgtgcgctacgcctcggcgtaa

SEQ ID NO: 495675 - DNA, 387 bp, Stenotrophomonas maltophilia
atgtcccgccagatcatcaacaccgaaaaggcccccgccgccatcggcccgtactcgcaggccgtgcgcgccggcaacaccgtgtacttctccggccagatcccgcttgacccggccaccggcgacatcgtcggcgctggcgacgtcgaagcgcaggcccgtcgcgccttcgacaacctcaaggccgtggccgaagccgccggcggctcgctggacaaggtcgtgcgtctgggcctgtacctgaccgacctgggcgagttcgccaaggtcaacgcggtcatgcaggactacttccaggccccgtacccggcccgttccaccatcgaagtctccggcctgccgaagggcgccagcttcgaggtcgacgcggtgatggtcatcgactga

SEQ ID NO: 495676 - DNA, 2163 bp, Stenotrophomonas maltophilia
atgaacccaggccccactgccaaggtcgccgcagcccccactgccgccgtacccgactacgtcctccagcttgaacgcgccgcccattacctgccgccggaacagctgccgctgttgcgccgtgcctgggaagtcggagcctccgcgcacgctgggcagacgcgcaagtcgggtgagccctatatcacccacccggtggcggtggcccaggtgctggccgagctcggcctggacgtggaagcgctgatcgccgcgatcctgcacgacaccatcgaagacacgccgctgacccgcgaggcgctggccgccgagttcggcgaagccgtggccgaactggtcgacggcgtcaccaagctggacaagctgaagttccgcgaccgccaggaggcggccgccgagagcttccgcaagatgctgctggcgatgtcgcgcgacctgcgcgtgatcatgatcaagctggccgaccgcctgcacaacatgcgcacgctgggtgcgcagagccgcgaagcgcgcggccgcatcgcccgcgagacgctggagatctacgcgcccatcgcccagcgcctgggcatgagcctggtcaagagcgagctgcagaacctcggtttcaaggcgctgtacccgtggcgccacgccatcatcgagaagcacatccgcagccagccggtggtgcgtcgcgaggcgatggcgcaggtggaagtgcagctgtcgcagcgcctggccaaggaggggatcgagcatcggctgatcagccgcatcaagaccccgtggagcatctacaacaagatgcgcgacgagaacaaatccttcgaccaggtgatggatgtgttcggcttccgcctggtcgtgcgcagcgtgcccagctgctaccacgcgctgggttcggtgcatgccaccttcaagccgctggatggccgtttccgcgacttcatcgccattcccaaggccaacggttaccagtcgctgcacacggtgctgttcgggccgtatggctcgccgatcgaagtgcagatccgtaccgaggaaatggacctgatcgccgaacgcggcgtggccgcgcactggacctacaagttcggcggcgattcgcccaacagcgcacagagccgtgcccacgcgtggatcgtcgaactgatcgactcgcagcgtgccgccggttcctcgctggagttcctggacaacgtcaaggtcgacctgttcccggacgaggtctacctgttcacgccaaagggcaagatcctggccctgccgcgcaactccaccgcgctcgatttcgcctacgccgtgcataccgacgtcggcaacatggcggtggcctcgcgcgtggacaagaaactggtgccgctgcgcaccaagctggtgtcggggcagtcggtggagatcatcaccgcacgctcggccacgccgaaaccgcagtggctggaattcgtggttaccagcaaggcgcgcaccgccatccgccaccagctcaagcagctggagcacgaggatgccgtgcagctgggccaccgcatgctcgaccgtgcgctggaagcgatggattcgtcgctggagcggctgccgaaggggcgcctggatgcgttcctggccgaacaccgcttcccgcgcctagaagccctgctggccgaggtcgcactgggcaactggatgccgacccaggccgcgcaggcgctgatggcctacgccgaactgcgtggcggcccgcattcgcgccaccactcgcaggaaaagatcctgatcaacggcagcgagcgtggcgtggtcaccttcgccggctgctgccagccgattcccggcgacgagatcatgggctaccacaccgccggcaagggcatcgtggtgcaccgcatggactgcccgaacctggccgagctgcgcaagtcgcccgagcgctgggtgccgatcggctgggacaccaccgtctccggcgactacgacacctcgctggtggttgaagtggagaacggcaccggcgtgctggcacagctggccgctgccatcgcgcagagccactccaacatcgagcgcgtggactacctggatcgcgatttcaacgccgcggtgctggcgttcaacatccaggtgcgcgaccgcaaccacctggccgaagtgatgcgccgcctgcgccgcctgtcggtcgtgcagtcggtacgccgccagtag

SEQ ID NO: 495677 - DNA, 300 bp, Stenotrophomonas maltophilia
atggcccgcatcaccgtagaagattgcctggaagtcgttaacaaccgtttcgaactggtcatgatggcatccaagcgtgcccgccagctcgccaacggcgtgcaggccacgctggacaacagcgagaccgaggacaagccgaccgtgctggcgctgcgcgaaatcgccgcccgcaagatcgacaacgcgctgatcgacgaagtcgagaaggccgagcgtgagcgcgccgagcgcgaagcgctggagtgggctgccgccgaagtggtcgctgacgaagacatgtccaagaacgacgattga

SEQ ID NO: 495678 - DNA, 666 bp, Stenotrophomonas maltophilia
atgagcgccccgtcgaagccgtcggacgccgttgcgcgcggcacgctgtacatcgttgccgccccctccggcgccggcaagagcagcatcgtcaatgccaccctggcgcgtgacccgcagatcgcgctgtcgatctccttcacctcgcgcgcgatgcgcccgggggaagtgaacggccagcactaccatttcgtctctgcggaaaggttcgaagaaatgatcgccgccggcgacttcttcgagcatgcgtgggtgcacggcgactggaagggcacggcccggcagtcggtggagccgcagctggccgccggccaggacgtgctgctggaaatcgactggcagggcgcgcagcaggtgcgccagctggtgccgggcacggtcaccgtgttcatcctgccgccgtccaagcaggccctgcaggatcgcatgcgcaagcgcggccaggacagcgaggcggtcatcgcccagcgcctgggcgcggcgcgcgatgaaatgctgcacttcaacgagttcgactacgtcatcgtcaacgaggtgttcgacaccgccgtggacgagttgtgcgccatcttcaccgccagccgcctgcgccgggaggcccagaaggtccgccacgccggcctgatccaggccctgctgactcccgatccgggcgcaactgactga

SEQ ID NO: 495679 - DNA, 591 bp, Stenotrophomonas maltophilia
atgccatcgatgagccgccgccagttcctgaaagtgaccgggacaaccctggtcggctccagcctggcattgatgggcttcgcgcccggcatcgcgctcgcggaggtcaggcagtacaagctgacccgcgcgaccgagacccgcaacacctgtacctactgttcggtggcctgcggcatcctgatgtacagcctcggcgacggcgccaagaacgccgagccgagcatcttccatatcgagggtgacccggaccatccggtcaaccgcggcacgctgtgcccgaagggcgccggcctggccgacatcatccacagcaagtcgcgcctgctctaccccgagtaccgcgcgccgggctcgaacgagtggaagcggctgagctgggacgatgcgctggaccgcatcgcgcggctgatgaaggaagaccgcgatgccaacttcgtgcagaagaacgaggccgggcagacggtcaaccgctggctgaccaccggcatgctggcggcctcggccaccagcaatgaaaccgcggtgctgacccacaaggtcgtgcgctcccttggcatgttggcattcgacaaccaggcacgtgtctga

SEQ ID NO: 495680 - DNA, 2430 bp, Stenotrophomonas maltophilia
atgacgaatcactgggtcgacatcaagaatgccgacctgatcctgatcatgggtggcaatgccgccgaggcgcacccgtgcgggttcaaatgggtgaccgaggccaaggcacacaacaaggcgcgcctgatcgtggtcgatccgcgcttcaaccgctcggccgcggtggccgacgtgtacgcgccgatccgcaccggtaccgacatcgtgttcctggggggcctgatcaactacctgttgaccgaggaccgcatccagcacgagtacgtgctgaactacaccgacatgtcgttcctggtgaaggacgagttcgccttcaaggacggcctgtattcgggctacaacgaagagaagcgcagctacgaccgctccagctgggactacgcctacggtgacgatggcttcgtgcgcagcgacccgacgctgaaggacccgcgctgcgtctacaacctgctcaagcagcactatgcgcgctacacggtggagatggtcgaacgcatctgcggcacgccggccgacagcatccgccagatctgggacatgatcgcgtccaccgccggcaaggacaaggcgatgaccatcctgtacgcgctgggctggacgcagcactcgatcggcgcgcagaacgtgcgtgccggcaccatggtgcagctgctgctgggcaacatcggcgtggccggtggcggcatgaacgccttgcgcgggcattccaacatccagggcctgaccgacatcggcctgatgtccgacctgctgcccggctacctgaccctgccgaaacaggacgagcaggactacgaggcctacatcgccaagcgcacgcagaagccgctgcgcgccaaccagatgtcgttctggcagaactacccgaagttccacgtcagcctgatgaaatcgtggtggggcgacgccgccaccgccgacaacaactggtgtttcgattacctgcccaagctcgacaagccgtacgacatgctgcaggcgtacgagctgatgaacgaaggcaagatccacggctacatctgccagggtttcaacccgctggcctcggcgccgaacaagggcaagctgatcagcgcgttctccaagctgaagttcatggtcagcatggacccgctggaaaccgagaccatcgccttctggcagaaccacggtgcgttgaacgacgtcgacccgagcacgatccagaccgaagtattccgcctgccgaccacctcctttgccgaggagaacggcgcggtggtgaattcctcgcgctggctgcagtggcactggaagggtgccaacccaccgggagaagcgcgcagcgacatcgagatcatgtccgagctgttccatcgcatcaaggcgatgtacgagaaggacggcggtgcgtggtgggagccggtgcgcgacctggcctggaagtattccaacccggagctgccgacgccggaagagctggcgatggaatacaacggcaaggcgctggccgacgtgttcgatccgaaggatccgaccaggctggtgcgcaaggccggcgagcagttggccgcattcggcgacctgcgcgacgatggcagcaccgcgtcgggctgctggatctacatcggtgcctggggcccgaccggcaacatgatggcgcggcgtgacaacagcgaccccaccggcatcggcaacacgctgggctgggcctgggcgtggccggccaatcgccgcgtgatgtacaaccgcgcgtcgtgcgacgtggccggccagccgttcgacccgcgccgcacgctgctggcctggaacggcaagaactggggcagcgtggacgtaccggacttcaaggccgacgaagatcccgccggcgggatgggcccgttcatcatgaacccggaaggcatcgcccgcttcttcgccaaggccggcatggccgaagggccattcccggagcactacgagccattcgacacgccactgcgcagcaatccgctcagccccggccaggcactgacgctgaacaacccggccgcccgcgtattcgccagcgatcgcgcacagatcggttcgccggacgagttcccgcatgtggccaccacctaccgcctgaccgagcacttccacttctggaccaagcacggcaagttgaacgccatcatccagcccgagcagttcgtcgagatcggcgcggccttggccgacgagctgggcatcagcaacggcagccgcgtgcgggtcagttccaagcgtggccacatcgaagcggtggcgatggtgaccaagcgcatcaaggccctgcagatcgatggccggaccgtgcaccaggtgggcgtgccgatccactggggtttcctcggtgcggccaagcctggatacatcgccaatacgctgaccaacgccatcggtgacggcaactcgcagacgcccgaatcgaagtgcatcctggtcaaggtcgagaaggtgtag

SEQ ID NO: 495681 - DNA, 918 bp, Stenotrophomonas maltophilia
atgtcactgcaatcgctggacatcatccgccgctcggccaccaccacgccctcgccggaagcgcgcggtgcgcacaccggccaggtcgccaagctgatcgatgtgagcaaatgcatcggctgcaaggcctgccaggtcgcctgcatggaatggaacgacctgcgcgacgaggtcggcagctgcgttggcagctatgacaacccgcccgacctgagcgaccagtcgtggacggtgatgaagttccgcgagtacgaggacgagaagggcaagctggagtggctgatccgcaaggagggctgcatgcactgcagcgacccgggctgcctgaaggcctgcccgtcgccgggcgcgatcatccagtacgccaacggcatcgtcgacttccaggaagagaactgcatcggctgcggctactgcgtgaccggttgcccgttcgacgtgccgcgcatttccaagaaggaccacaaggcctacaagtgcacgctgtgttcggaccgggtggcggtgggccaggaaccggcctgcgtgaagacctgcccgaccggcgcgattaccttcggcagcaagcaggcgatgaccgagcatgcggccggacgcgtggaagacctgaaatcgcgcggctacgggaatgccggcctgtacgacccgcagggcgtgggtggcacccacgtgatgtacgtgctgcagcatgtggacaagccggagctgtacgccgacctgcccaaggacccgcgcatcagcccgatggtggaggtgtggaagggcgtggccaagccgctgggcgtgctggcgatcgccgccaccgccttcgccggcttcctgcattacatcggcatcggccgcaacacggtcaatgacgaggaagaagaggaagccgagcacgaggcgaagaagatcgaagaggagcagcggccatga

SEQ ID NO: 495682 - DNA, 648 bp, Stenotrophomonas maltophilia
atgaagtacgccccgcacccgcgccagatcatccgctaccgcgcaccgacccgcatcaaccactggatcgtggcgatctgcttcgtgctgaccgcgctgtccgggctggcgctgttccaccctgccctgttcccgttgacccagctgttcggtggcggcccgtggacgcgcatcctgcatccgttcatcgggctggccatggtggtgggctttgcgctgctggcgttccgcatgtggcgcgacaatctgccgaccgccgacgatcgcgcatggatgcgcggcatgcgcgatgtactgcgcaacgaggatgagaagctgccgccggtgggccgcttcaatgccggccagaagctcctgttctgggcgatcattggttgcctgtcggcactgctgctgaccggcttcgtgatctggcggcaatacttcagccatctcttcccgatcgggctgatccgcttctcggtgctggcccatgcgttgttcggttgggtgctggtgtgcgcgatcgtggtgcacatctatgcggcgctctggatcaagggctcggtgcgggcgatgacccagggcaaggtgacctatgggtgggcgtacaagcaccaccggcagtggttccgcgacatcctgcgcggacgtcgggaagagggataa

SEQ ID NO: 495683 - DNA, 984 bp, Stenotrophomonas maltophilia
atggcgcaacgcatccttgaacccggtgagatcgagacgctcgcctcgcgcgacgtgccgcgcatcatcctgcctgataccaggtcgctgttcgccacacgcgcggcgcgcctgcgcagcctggccgcgtacagcgccatcggcggttacctgcagctgctggcggcattggccgatgcacagcaggcgctgctggaggaattgacaccccagcaacgcgaggcgctgcaggaccacgcgcgcgcgcagcagtccagcgcggccgccagtgccggcatgccgttgcggcccgccaacacgcttcatctggacgggcgctggcgcgactggctgcgcacgctgtgccggcactgcgccgacgaagcggggctaccggcggaaacacggcaggaattgctgcgcgtcgccgccgccgacgacacctggctggatgcgcaggcccacgccgtgctggaacgcgctgacgcgcccccggtcgacgcggtcgctgcgctgctggtgatgaatgcgttgcaggtgtattgggcagtactggcggccagcttccgccccagcgacctgaagccgctggccgatgcgccagggctgtgcccgctgtgcggcaccctgccggtggccagcatggtgcaggcccgcccgccctatgcctcctaccgctacctgtcgtgctcgttgtgcgcctgccagtggcactacgtgcgcgtgcagtgcagccagtgtggcgccgctggcaaggacatcgcctatcgcgccctggctgatgccgacggcgataccggccaggcggtgcgcgagagcgcggtacgtgcagaaacctgcgaccactgccacagctaccgcaagatcctgtatctggaaaaagatccgtcgctggaaccggtggctgatgaccttggcacgctggcgctggacctgctgctgggcgaggaaggctatgcacgcgccagccagaatccgctgctgtggcagtccgacggcgagtga

SEQ ID NO: 495684 - DNA, 1425 bp, Stenotrophomonas maltophilia
atgacagccacgccccccaccccggcatcggcttccgcgctgccctcgctggaccggttgctgcgcctgcctgccttggcaacactgatcgagggccacggccgcagccgcatcacccagttgctgcgcgtacatctgcaggcgctgcgtgagcgcatcagtgccacgcagctctcggccgagcagttgcatcaggccattgaaggcccggcactggtcgcggcgctcgacgccgcactcatcgccgatgcacggctgaacctgcagccgatgttcaacctgaccggcaccgtgctgcataccaacctgggtcgcgccctgctgcccgaggccgcggtgcaggccgtcacccgcgcgatgaccgcaccggttgacttggaattcgacatcacccgcggccgccgcggcgaccgcgatgcacgggtgcaggcgctggtccgcgagctgaccggtgccgaagccgccaccgtggtcaacaacaatgcggcggcggtcctgctgctgctcaacagcctggccaaccgccgcgaagtggtggtgtcgcgcggcgaactggtggagatcggcggtgccttccgcattcccgatgtgatgcgcagtgccggcgcgcggctgctggaagtgggcaccaccaaccgcacccacccggccgacttcgcccatgccatcggcgcgcgtaccgcactgctgatggaggtgcacgccagcaactacgcgatcaccggcttcaccgccaaggtcgacaccgcggcgatggcagcgatcgcgcacgaccatggcctgccgttggtggtggacctgggcagcggcagcctgtgcgacctggcggccttcggcctgccacacgagccgaccgtgcaggaaacactggcggccggtgccgacctggtctcgttcagtggcgacaagctgctgggtgggccgcaggccggcatcatcgccggccgcgccgacctgatcgcgcggatcaaccgcaacccgctcaagcgtgcgctgcgcatggacaagatgggcctggccgcgctggaggcggtactggcgctgtaccgcgagccggagctgctggcgcaacggctgccgacactgcgtacgctctcgcgcacgcagcaggacgtggatgcgcaggcccagcgcctgctgccgccgctgcgctcggcgctgccgaccggctacatgcttgaacaggcacggatgcacagccagatcggcagtggtgcgcagccacaggcgcagctcggcagtgccggcttgcgcatcaccactgcgcgacgtggcggcctggaccgcctggccaagcgcctgcgccagctgccgcgaccggtgctgggccgcatcggcgaggacgcattgtggctggacctgcgttgcctggaaccggccgacgaagcggacttcctcgcccaatggagcacgctgcaaccatga

SEQ ID NO: 495685 - DNA, 1932 bp, Stenotrophomonas maltophilia
atgatcgtcggcaccgccgggcatatcgaccatggcaagacgcgcctggtgcgggcactgaccggcatcgaaaccgatcgcctgcaggaagaacgcacgcgcggcatctccattgaactgggctatgcctatgtcccggtggaaagcgcgaacggcacgggccccgccgcaacgctgggtttcgtcgatgtgccgggtcatgagcgcttcgtccacacgatggtggccggcgccaccggtatcgatgtcgccctgctggtcgtcgccgccgacgacggcgtgatgccgcagacccgcgagcatctggcgatcctgcagctgctgggcgtggatcgcggcgcggtggcgctgaccaagatcgaccgcgtggacgccgcgcgcatcgcccgggtcgaaatcgagattgccgctttgctggccggaacgccgctgcaggattcccccgtattcgcctgcaacagcacgtcccccgatgacgcaggcatcaacgccctgcgcgcccacctgcacgcatgggccgccggcgaggccaacgcgcgccaggccgcgctgcgcagcgagctgttccgcatgccggtggaccgcgtgttctcgctggccgggcacggcacattggcgaccggcgcggtacatggcggtgtcgccgcggtgggcgagcatctgcagctgatgcccgccgccactgaagtgcgcatacgcagcatccacgcgcagaaccaggccagcgaacacgcgatggccggacagcgctgcgcgttgaacctggccgccatcgcccgcgacgagattcatcgtggcgactggattgccgacccgcgcgcgctgctggccaccacccgcgtcgatgtgcgcctgcgcctgtccgcacgggcagcaccactgcgcgactgggcacccctgcacatccactggggcacgatgcaccggcaggcccatgtggtgctgctggaggaccgtgaccaaggtgatgggcagttggtgcagctggtcttcgatgcaccggtctgtgcgatgtgtggtgatcgcttcatcgcccgcgattccgccgcgacccacacgctgggcggtggcgtcgtgctcgacccggacccgccacagcggcgccggcgcagcccggcacggctcgcctggctgggcgcactggagcagctggccacaggtgcgggaatcggcccgctgttgcagcaggcgcccttcggcattgccatggccgcgctgcaacgctactgccggcgcgcggccgaccggatcgatcttcctccagacgcacagcgcatcatcacccgcgaggacacggtggtcatccttgcctcgcactggcaggtgctgcgcgagcaggtgatcacatcgctgcgtagctggcatgagcgacgcccggacgaacccggtgtcgacagcgggcgcctgcagcgcagcatcctgcccgcgcttgcgacggggctctggaatgcgctgctgcaggagctgctggacgacggcagcgtgcaacgcgtgggcgcctggtggcgcctgcccggccatgaccatgcgccaccggaacgcgagcgcctgctgctggaacgcgtgctgccgcaactgcacgccggtggcttcgatccgccgtgggtgcgcacccttgctgtcgagatcggcttggccgaggacgaagtccgcaccctcctgcgccgcgccgccgcacgtggcgaactgttccaggtggtgccggacctgttctatgcacccgcgcgcattgcggaactcgccgcgatcgtcgcgcagctgtcacaggccagcggcgcggtggatgcggcggccttccgcgatgccatcggcctgggccgcaaacgcagcatccagatcttggagttcttcaatcgcgttggctacactcgacgcgtcggtgaccagcatcggccgcgcggcgacctgcagtggaacgcagcccgcgactga

SEQ ID NO: 495686 - DNA, 1080 bp, Stenotrophomonas maltophilia
atggccacgcacgcgcagtcacccgccccatccacggccgatgccccgcaacgactgacctctctcgcgcatggcggcggctgcggctgcaagatcgcgccgggtgcgctgtccgaactgctgcgcggcgttccagcacttcccgcaccggccgaactgctggtcggccgcgagaccagcgacgacgccgcggtgtaccgcctcgatgatcgccaggcaatcgtcgctaccaccgatttcttcatgcccattgtcgacgacccgttcgacttcggccgcatcgccgccaccaacgcgttgtcggacctgtacgcgatgggcgcgcggccgctgttcgcgctggccatcgtcggcatgccgatcaacaccctgccgcaggacaccatccgcggcatcctgcagggcggcgagcgtgcctgcgccgacgccggcatcgtggtggccggcggccacagcatcgattcggtggaaccgatctatggtcttgccgcgatcggcgtgctcgatccgcagcggctcaagcgcaatgccgatgcccgcgccggcgatgtgctggtgctgggcaagccgttgggcgtgggcgtgtactcgtcggcgctgaagaaagaagtgctggatgcagagggctaccggcagatgatcgcgtcgaccacccgcctgaacagcgtgggcgtgccgctggccgcgctggacggcgtgcacgcgatgaccgacgtcaccggcttcggcctgctcggccacctgctggaagtgtgccgcgccagcggcgtcgctgccgaagtggacagtacacaggtgccgctgctgccgcaggcgctggagctgctgcagcgcggctgcgtgaccggcgcctccaaccgcaactgggcctcgtacggcgccgaagtgcgcttcgccgagcgcttggccggccactggcagccactgctgaccgatccgcagaccagtggcgggctgttggtgtcctgtgcaccggaggcagtgaatgcggtgctggcctgcttccacgacgcagggttcggccaggcggccgtggtcgggcgattgggtgaaggagcgccgggcgtcagcgtgcgctga

SEQ ID NO: 495687 - DNA, 861 bp, Stenotrophomonas maltophilia
atgattcgaagcatgaccgcctatgccggcggcgagcgggtcaccccgtggggcacgctgggctgcgagctgcgctcggtcaaccaccgcttcctggaggtcggcacccgcctgcccgaggaactgcgggcgctcgaaccgcagctgcgcgagcgtatcgccgcgcgcctgagccgcggcaagctggatctggtgatgcgcctgcgcgcgccggaggcggctgccaacctgcaggtggacgaggccctgctgggccagctgggccgcctggcccaccgcctgacctccgatttcccgaacctgcaggtcagcttcaccgatctgctgcagctgccgggcgtgacccgcggcgaggccacggatgccgccgccctgcaggtcgaggcgctggccctgctggaccaggtgctggacggcttcgtcgaagcgcgtgagcgcgaaggcggcaagctggctgcggccatcagcgaacgcgtggacggcatcgaacgcatcgccaccgaagtgcgcaccttgattccggccattcgcgacggccagcgcgccaagctggccgcccgtctggctgacctgccgcaccctgtcgacccgggccgtgcggagcaggagctggtcctgtggctgcagaagctggacgtggatgaagagctggaccggctcggcagccatatcgtcgagatccgccgcgtgctcaagcagcgcgagccggtcggccgccgcctggacttcctgctgcaggagttcaaccgcgaagccaatacgctgggctcgaagtcggtggacagccgcacgtccaatgccgcggtggagctgaaggtgctgatcgaccagatccgcgagcaggtgcagaacatcgaatga

SEQ ID NO: 495688 - DNA, 726 bp, Stenotrophomonas maltophilia
atgtccgattcccgccccagcggccgccagcccgaccagctccgcccggtcgtcatccaacgcggcttcacccgccacgccgaaggttcggtgctggtgtgcttcggcgaaacccgcgtgctgtgcaccgccagcgtcgagaaccgcgtgccgggcttcctgcgcggcaagggcgaaggctgggtcaccgccgagtacggcatgctgccgcgcgccacccatacccgcagcgaccgcgaagcggcccgtggcaagcagggcggccgcacgctggagatccagcgcctgatcggccgcagcctgcgtgcctgcgtggaccgcaatgcgctgggcgaacgcaccatcaccctcgactgcgacgtgctgcaggccgacggtggcacccgcaccgccgccatcaccggcgcctatgtggccctggtcgatgcggtgaacgtgctgatgaagcgtggcgacatcaagcgcaacccggtcctgggcgcagttgcagcggtgtcggtgggcgtgtaccgcggcaccccggtgctggacctggactacgccgaagacagcgactgcgacaccgacatgaacgtggtgatgaacgacggtggcggcttcatcgagctgcagggcaccgccgaaggccacgccttccgtcgcgatgaactggacgcgctgctgggcctggccgagaagggcgtggccgagctgctcgccgcgcagcaggcggcgctgtcggcatga

SEQ ID NO: 495689 - DNA, 390 bp, Stenotrophomonas maltophilia
atgaaccggcgcatcgccctgaccaccctggtggtggccgactatgacgaagccattgcctggtacaccggcaagctcggcttcgcattgctcgaagacatcgaccaggggcacaagcgctgggtggtggtcggcccgaccgacggcagcgccgccgccctgctgctggcccgtgccagcgacgaggaacagcgcagccgcatcggcaaccagaccggtggccgcgttgccttcttcctcaacaccgacgacttccaccgcgaccacgcggcgatgctggccgccggcgtcgagttcctggaagcaccgcgcgaagaaccctatgcaacggtcgcggtattccgcgacctgtatggcaacacctgggacctgttggagccccgtcaatga

SEQ ID NO: 495690 - DNA, 597 bp, Stenotrophomonas maltophilia
atgaagaaactggtactggccagccacaatgccggcaagctggtggagatgcaggagatcctcgccgacctgccgctgcagatcacctcggccgccgagctgggcctgggcgacgtggaagagaccggcctgaccttcgtcgagaacgcgctgctgaaggcacgcgccgcctgcgaagcgaccggcctgccggcgctggccgatgattccggcctgatcgtcgatgccctgggtggtgcaccgggcctgtacagcgcgcgctatgccggccacccgaccaacgccgctgccaacaacgccaagctgctggacgcgatggccggtgttcccgatggccagcgcagtgcccgcttctatgcggtgatcgtgctgttgcgccacgccaccgacccgcagccgctgatctgcgaaggccgctgggaagggcagatcatccgtgagctgcgtggcacgaatggtttcggctacaacccggtgttcctggacaccacccacggcctgaccgccgcggaaatggagccggcgctgaagaacgccatcagccaccgtgccattgccctgcagcagctcaagcagcagctggcgacgctgtactga

SEQ ID NO: 495691 - DNA, 1236 bp, Stenotrophomonas maltophilia
atgaagcccatgccgcacgcccacgaccactgcaaccacctgcccggcgaagcctgctccgctgaccacgacggcgcaccgcggctggtgccgccaccgctgtcgctgtacgtgcacctgccgtggtgcgtgcgcaaatgcccgtactgcgatttcaattcgcaccaggccaggggcgagttgccgttcgaggcctacatcgatgcactgctgcgcgacctggaccaggacctgccgctggtctggggccgggtggtgcacagcgtgttcttcggcggcggtacgcccagcctgttcccgccggaggcgatcgaccgcttcctgcagcaggccagcgcgcgcctgcgctttgcccccaatgccgagatcaccctggagaccaacccgggcaccgccgagcatggccgtttcgaccgctaccgcgcggccggcgtgaaccgcctgagcttcggcatccagagtttcgacgacgccatgctcaagcgcctcggccgcatccacgacagtggcgaagccgagcgcgcggtgaagatggcgcaggacgcgggctacgacaatttcaacatcgacctgatgtatgcgctgccggaacagaccctggccggcgccgaggccgacctggagcgtgcgttcgcgctgcagccggcgcacatctcgcactaccagctgaccctggaaccgaacacggtgttcttcgcgcggccgccgcagggcattcccgacgaagacaacgcctgggacatgcaggaacactgccaggcattgctggcacaggctggtttcggccagtacgaggtcagcgcctatgcgcgccccggccggcaaagcgcgcacaacctgaactactggcgtttcggcgattacctgggcatcggtgccggtgcgcacggcaagatcagctcgggcgccgaagaacacgtgctgcgccgctggaagctgaagcatccgcaggcctacctggacagcgctggcacgccggcctctttcgggggtgacgatgtgatcgcagccgagcgcctgccgttcgagtacatgctcaacctgctgcgcctgcacgaagggttcggccttcgcgatttcgagtcgcgcaccgggctgccgcgcggcgtgctggacgctccgttggccgaggccgtccagcgcggctggctggaggtggcggagggtcatgtgcagccgaccgagctgggccgccggttcaccaacgatgtggtgagcctgttcctggaggaataa

SEQ ID NO: 495692 - DNA, 2280 bp, Stenotrophomonas maltophilia
atgtcagctgtcttttccatcacctctgccgacaaggcacgcctggccgccagcgacctgccaccgcgggtgcgtgagctgctgggtgcgttgatcggcctgtgccggcaaacgctggccgcgcccctgatcctgaccgtcgaagcgctggagcagacgctgctgcacgacgccgaccgcgcacgcaatccgatgcagcaggcggacctgatggcccagcgtggccagctgcacgccttcgccggccatttcgccgaccgcatgctcgatgccgtggccgaagcgctggcgggcctgcgcgagccgtccaccgccgctgcggcgcctgcttcgccgccgccgctaccgggcacgctcggcctgtcgctggtcgatgagcacgaggtggatcgcgacctgctgctgaccgaaatgatccggcgcgagaccctgcgttcaaccaatacgttgaacctgctgggacagcgcctgggcgtgctcgcggcggcgccggcgttcgaggccgacaccctgccactggcaccgcaggccctgtgcgcgatggtgcgccggatcgccgaacaggacgcccttggcgtggaggtgcagcttgcgctgtaccgcagcttcgagcggcaggtgctggaacgcctgggcgatgtgctggaccgcgccaatgcgctgctggcccagcatggcgtgctgccgggcctggtctacaccccgtacctggcacgctcgtcgagcacccggcggatcatcacccagtcggtgggcggcggccgcacgacccagcctgccaagcgttccgccgcgccgttgaccggctggaacggctccgctccggccggttcctggtcgaacctggtgcaggacgcattcaacgacgcgggtacgccgggcgcagccaccgctggcgtgaccacgtccaccggcagtgcgctgcatgaattgctgcagcaggcccgccatgccactgcccctcctgcggacaccgctgccgtgcccagtgcggccgtcgatgcggtcctcgcgcgactgcaggcccagtccagcgcggccaccggcgtcgccgacctgcaggctgcggtggtcgcccagctgcgcagcgagcacggcgcgcaggcccagctgggcagccacgaccgcgacaacctcgacctgctgcgcctgctgatgcagcaggtgcagcagcagcagcgccccgacccggtgccggccgccctgctggcgcgcctgcaggtaccactggcgcgtgcggcgatggccgaccccggcttcttcgtgcgcgacgaacaccctgcacgcgaactgctcaaccagattgccgaagtcggcgccaactggctgggcgacgatgacgtggatccccagctgctgcagcgcatggcgcagagcgtgcagggtctgctcggccaggatgcacgctcgcccgaggccttcgccaccgccaacgaggacgtgcagcagcatcagcgcgcggcggcccatcgcgccgaactggccgagcgccgccacgtcgaggccgcgcgtggcaaggaacggctggaactggcgcgtcgccaggccaatgcgcagatcgaccagtgctgcgagacacaggcgccgccgcgcttcgtgcagaccctgctgcgccaggcctgggccgatgcactcaccctcacccgcctgcgccatggcgaagattcgccgcagtggcaggaacgcctgctacagaccgagcgcatcgccgcggtgaccgcgcaggccgtcgatgccaacggtggcaccgatgcagtgctggccaacgaggtggaatcggcgctcgtgcaggtcggctatcacgccgaggaagccgccgccgttgcgcgccgcctggccacgccaggaggcgaggatgaaagcacctcgcgcaccgagctcagtgcgcgcctgaaggcacgtgcacgactgggcgaacatgctgccagcggcagcgccgacgccccgcgcacgccgcgcagcagcgccgaagaggcggcctaccagcagctcgtgaccctgccctttggcagctggttcgacatcgacaacggtgacggcaccctgcgccgccagcgcctgtcctggtacagcctgctgaccggccacgccctgttcgtcaatccgcgcgggcagaagatcgccgataccgaccttgatacgctggcccggcagctcagcgctggacgtgcgcagctggtcaccgaagacaaggggcggctggtcgatcgcgcatggcaggccagcctcggtgcgctgcgtgcgctggccggcggccgttacagggaggcgtccgtttga

SEQ ID NO: 495693 - DNA, 375 bp, Stenotrophomonas maltophilia
ttgaacgtgcaaccgccgcaggacacccgccgcgcgccgcgtcgccaggtctcggacctggtaccggtcaccgaccagatgcgcgaatgcgtggtgggccggctcggcaatgtctccgagactggcatgttgatgctggccagcaccccgctgcgcgaggacgcgctgtaccagttccgcttcccgttgccgatcggtgacggccgccacgaggccattgacgtgggcgtgcacctgctgtggagcgagccggcgcatgtgcccggccagagctggaccggtttccgcttcctcaccctgtcacgcgaacatcggcagctgctgcgccagtggataggcgaagacagcgacgaggcaccggtttcgacggcctga

SEQ ID NO: 495694 - DNA, 1332 bp, Stenotrophomonas maltophilia
atgatccagcaaaaccccggcgccctgtaccccgaccacctggccgtgctgtgccgacgtgccgaacaggcgttggcccgcggcggcttcgaccatctggtcgtgcccagcggcaccctgcactaccaggtgttcgacgatcgcgactacccgtacgcggtcaatccgcagttcaaggcctggctgccgctgacccgggtgcccaacagctggatcgtgttcaccccgggcaagcgcccggcggtgatcttccaccagcccttcgattactggcacgtggtaccggacgcaccgagtggctggtgggtggagcacttcgacatccacatcatccgcaagcccgaagaggcgctggccctgctgccggccgacccgtcgcgctgcgcgatcctcggcgagccgcagagcgcgctgggcagctacgtgccgaacaacccggcaccggtggtgaactacctggaatggcaccgcggcagcaagacgccgtatgagatcgcgctgatgcgccaggcgcaggtgctgggcgtgcgcggccaccgcgccgccgaggccgcgttccgcaacggtgccgacgaattcagcatccacatggcgtactgccaggccgtcggccaggatgccaacgagctgccctacggcaacatcgtggcgttgaacgaacacgccgccgtgctgcattacaccgagctgggccgcaaggcaccgcagccgctgcgcagcttcctgatcgatgccggcgccagtgcgcacggctatgccagcgacatcacacgcacctacgccgcgcagggccacgacgaattcgccgcgatgattgctgccgtcgacgccgcccagcagcagatgtgcgcagcggtgcgcccgggcttcgactacaggcagctgcacgtggacgcacatctttcgctgatgggcgtgctgaaggacttcggcgtgatcaaggtctcgccgcagaccgcgctggagaccggcgtcagcgccgcgttcttcccgcatggcatcggccacctgatcggcctgcaggtgcacgacgtggccggtttcgcggccagcgacgagggcggccgcatcgagcgcccggcgggccacccgtacctgcgcctgacccgtgtactggaaccgggcatggtggtgaccattgaaccgggcctgtacttcatcgacatgctgttgaacgaagtgaaggatgccggccatggtgatgcgatcaactgggaccgcgtggatttcttccgtccgtatggtggcatccgcattgaagacgaagtgctgtgcaccgagggcgaggcggacaacctgacgcggccggcgtttgcggcggcgaacggctga

SEQ ID NO: 495695 - DNA, 1320 bp, Stenotrophomonas maltophilia
atgcgccgttcgctgctgctgtccgccctgctgctggccctgccggcccttgcccacgcccaggacgggcagcgcccggaagtgaccgccgccgcgcagcggctgcaggccaaggtggtcgaatggcgccgcgatttccaccagcatccggagttgtccaaccgcgaggcgcgcacctcggccgaggtcgccaagcgcctgcgtgcgatgggcctgaagccgaagaccggcatcgcccaccacggcgtggttgcgatcatcgagggcggcaagccggggccgaagatcgccctgcgcgccgacatggacgcgctgccggtgaccgagcagaccggcctgccgttcgcctccaaggccactgaccagtaccgcgggcagaccgtgggcgtgatgcatgcctgtggccatgacgcccacaccgcgaccctgctcggcgtggccgaagcactggtgtcgatgaagaaggacctgccgggccaggtgatgctgatcttccagccggccgaggagggcgcaccgccgccggaagagggtggtgcggcactcatgctgaaggaaggcctgttcgccgatttcaagccggaagcggtgttcggcctgcatgtgttctccagcgtgcaggtgggtcagatcgcggtgcgcggtggcccgttgatggcggcctcggaccggttcgggatcaaggtgatcggccgccagacgcatggctcggcgccgtggaacggggttgatccgatcgtcgccaccgccgacctggtgggcaccgcgcagaccatcgtcagccgccgcgccaacctgtccaagcagccggcagtgctgaccttcggcgcgatcaacggcggcatccgctacaacatcattcccgatgaagtggagatggtcggcaccatccgcaccttcgacgaaggcatgcgccagcagatcttcgccgacctgcgcaacgtggccgagcacaccgccgccgcgcatggtgccaaggcggtgaccgagatctacgaagccgatggcaacccggccacggtgaacaacccggcactgaccgcgaagatgctgccgagcctgcaggcggtggtgggcaaggacaacgtatacgagccaccgctgcagatgggtgcggaagatttctcgctgtacgccaaggaggtgccgggcatgttcttcttcgtcggctccaccagcgcgggcatcgatccggcaacggcgccggcgaaccattcgccgaagttcctgctggatgagaaggcgctggatgtcgggttccgcgcgctgctgcaggtgagcctggattacctgcacggtgccggcaccccggcggggtga

SEQ ID NO: 495696 - DNA, 1245 bp, Stenotrophomonas maltophilia
atgtcacgtgtttggaagatcgtgctgctggtcgtggcagtgctggtgctggccgtggtcggcctgcgcgtcatgggcgggggcaaggacaaggccggtggtgcagctgcgggggcgcgccagggcggcgaggatccgaatgccggtccagtaccggtgaccgtggtggaggccacgcgccaggacgtgccggtgtatgccagcgcgctgggcacggtgactgcgatgaacaccgttaccgtcagcccgcaggtcggcggccagctgatgagcctgaatttccgcgaaggccaggaagtgaagcagggtgacgtgctggcggtgatcgatccgcgcacggcccaggccagctatgaccaggccgccgcagccaagcgccagaacgaagccctgctggccactgcgcgctccaacttccagcgctcgaacgcgcctgagtatcgccagtacgtcgccaagaccgatctggatacacagcgaaaccaagtggcacagtacgaaagcgccgtggccgccaacgaggccagcatgcgttcggcgcaggtgcagctgcagtacaccaaggtcaccgcaccgatctccggcatcgccggcatccgcgcggtcgacgcgggcaacgtggtcaacgccggcaccgcgctggtcacgctgacccagatccatccgatccacgtgctgttcaacctgcccgagcgccagctcggcgacgtgcgccaggcgcaggccgccggcacggtgccggtggccgcgctggaccgtgccgattcgcatgtgttgtccggcgacggcaagctcgacgtggtcgacaacctgatcagtgccgacagcggcacgttcaaggcgcgcgcgattttcgacaacaccgacaacggcctgtggccgggccagttcgtcaacgtgcgcatgcagctgcgcacgatcgccggtggtgtggtcatccccacccaggcggtgctgcgtggcccggatggcgagtacgtctacatcgtgcagggcgacaacacggtaaagatgcagaccgtgcgcagcggcgtggaagtgggcgacagccaggtgcagatcgccgaaggcctgaagggcggcgagcgggtggtcagtgaaggccagttccgcctgaagccgggcagcaaggtcaccgcgttgaagccgggcgagaccccggccgcaccgaccgaggccgaactgaaggcggccgagcagaagaacgcaggcggcggtggccgccgcggtggtggcccgcgctga

SEQ ID NO: 495697 - DNA, 3234 bp, Stenotrophomonas maltophilia
gtgggcttttcgacgatcttcatccgccgcccgatcgccacctcgctgttgatggcgggcctgttgctgctgggcatcctcggttaccgcaagctgccggtgtcggcgctgccggaaatcgatgcgcccagcctggtggtcaccacccagtaccccggtgccaacgccaccaccatggcctcgctggtcactaccccgctggagcgccagttcgggcagatttccgggttggagctgatgacctccgactcgtcggccgggttgtcgacgatcatcctgcagttctcgatggaccgcgacatcgacatcgccgcgcaggacgtgcaggcggcgatccgccaggccaccctgccctcgtcgctgccctaccagccggtctacaaccgggtgaatccggccgacgcagccatcgtcacactgaaactgacgtccgacacgcgcccgctgcgcgacgtcaacaattacgccgactcgatcctggcccagcgcctgtcgcaggtgcagggcgtgggactggtgtcgatcgccggcaacgtgcgccctgccgtgcgcatccaggtcaatccggcgcagttgtcgaacatgggcctgaccctggagcagctgcgcagcgcgctgacccaggccaacgtcaatgcgcccaagggctcgttgaacggcaagacacagtcctacagcatcggcaccaacgaccagctggccagcgccgccgagtaccgcgacaccatcatcagctacaagaacggccgcccggtgcggctgtcggacgtggccgaggtgatcgatggcgtggagaacgaccagctggccgcctgggccgatggaaagccggcggtgctgctggaagtccggcgccagcctggtgccaacatcgtgcagaccgtcgagcgcatccgcgcgatcctgccgcagctgcagggcgtgctgccggccgacgtgcacctggagatcttcaacgaccgcactgagaccatccgcgcctcggtgcatgaagtgcagttcaccctgatcctcaccatcggcctggtggtggcggtgatcttcgtgttcctgcgccggttgtgggccacgatcatcccgtcggtggcagtgccgttgtcgctggccggcaccttcgcggtgatggccttcgccgggatgtcgctggacaacctctcgctgatggcgctggtggtggccaccggcttcgtggtcgacgatgcgatcgtgatgatcgagaacatcgtgcgctacatcgagcagggcaagagtggcaaggaagcggccgagatcggcgcgcgccagatcggcttcaccgtgctgtcgctgaccgtctcgctggtggcggtgttcctgccgctgctgctgatgcccggcgtcaccggacgcctgttccacgagttcgcgtgggtgctgagcatcgcggtggtgctgtcgatgctgatctcgctgacgctcaccccgatgatgtgtgcctacctgctcaagcccgacgccctgcccgagggcgaggacgcgcatgagcgcgcggcagcggccggcaagcagaacctgtggacgcgcaccgtcggcctgtacgagcacagcctggactgggtgctgggccaccagcgcctgaccctggccgtggccggcggcgcgctggtgctgaccgtgctgctgtatgtgctgattcccaagggcctgctgcccgaacaggacaccggcctgatcaccggcgtggtgcaggccgaccagaacatcgccttcccgcagatggaacagcgcaccaagcaggtcgccgaagcactgcggcacgatccggatgtgaccggcgtgtcggcgttcatcggtgccggcagcatgaaccccacgctcaaccagggccagctgtcgatcgtgctgaaggagcgcagccagcgcgatggcctggacgagatcctgccgcgcctgcagaaggcggtggccggcattcccggcgtggcgctgtacctgaagccggtgcaggacgtgaccctggatacccgcgtggccgctaccgagtaccagtactcgctgtcggacgtcgattcggcaacggtggccacccaggccacgcgcctgaccgaagcgctgcgcaagcgcccggaactggctgaagtggacaacaacctgtccaaccagggccgcgccctggagctgaacatcgaccgcgacaaggccagtgtcctgggcgtgccgatgcagaccatcgacgacacgctctacgatgcgttcggccagcgccagatctccaccatcttcaccgagctcaaccagtatcgcgtggtgctggaagtggcgccggagttccgcaccagcaccgcgttgatggagcagctggcggtggcctccaacggcgccggcgcactgaccggcaccaatgccaccagcttcggccaggtcacctcgtccaactcgtcgaccgccaccggcatcggcgcgcagaacaccggcatcaccgtcggcgccggcaacatcatcccgctgtcggcgctggccgaaggcaaggtcagcagcgcgccgctggtggtcagccaccagcagcagctgccggcggtgacggtctcgttcaacgtggcgccgggctattcgctgtccgaagcggtgcgtgcaatccaggagaccaaggacagcctggacatgcccacccacctgcatgccgagttcatcggcaaggccgccgagttcactggcagccagacggacgtggtgtggctgctgctggcctcgctggtggtgatctacatcgtgctgggcgtgctgtacgagagctacatccacccgatcacgatcatctccacgctgccgccggccggtgtcggcgcgctgctggcgctgatgctgtgcggcctgagcctgtcggtggatggcatcgtcggcatcgtgctgctgatcggcatcgtcaagaagaacggcatcatgatggtggacttcgcgatcgaggcccgccgcgccggtgccaacgcgcacgaagcgatccgccgtgcctgcctgctgcgcttccgcccgatcatgatgaccaccgccgcggccatgctgggcgcgctgccgctggccctgggcaccgggatcggctcggagctgcgccgcccgctgggcatcgccatcgtcggtggcctgctgctgtcgcagctggtgaccctgtacaccaccccggtgatctacctgtacatggagcgcttctccgagtggcttgcccgccgccgcgagcagcgtgcgttgcgcgacggttcgctgcaggagccgcaggcatga

SEQ ID NO: 495698 - DNA, 3123 bp, Stenotrophomonas maltophilia
atgaacctgtccggccccttcatccgccgcccgatcggcaccgcgctgctggccatcggcctgttcatggtcggcctgatctgctacctgcgcctgggcgtatcggcactgccgaatatcgagatcccggtgatcttcgtgcatgcaagccagtccggcgccgatgcggcgaccatggcctccacggtcaccgcgccgctggaacgccatctcggccagctgccgggcatcgaccgcatgcgctcgtcgagctcggaaggcagctcgctggtgttcatgatcttccagagcggccacaacatcgattcggccgcgctggacgtacagaccgcgatcaactcggcgcaagccgacctgccctcgggcatgggctcgccgatgtaccagaaggcgaacccgaacgacgacccggtcatcgccatcgcgctgacctcgcagacgcagtcggccgacgaactgtacaacgtcgccgattcactgctggcgcagcgcatccgccagatcagcggcgttgcctcggtcgacatcgccggtgcctccacgccagcggtgcgggtggacgtcaacctgcgcctgatgaacgcgctgggactcactgctgacgacctgcgcaacgccgtgcgcgcggccaacgtgacctcgcccaccggcttcctcagcgatggcaacaccaccactgcgatcatcgccaacgattcggtggcgcgtgcggccgacttcgccgacctggtggtcaagacccagggcgatggccgggtgatccgcctgaaggacatcgccaatgtctacgacggccagcaggatgcctaccaggccgcatggttcgaccacaaaccggcggtggtgatgtacgtgttcacccgtgccggcgccaacatcgtggagaccgtggaccgggtcaaggcgcagatcccgaccctgcgcgactacctgcagcccggcaccacgatgacgccgtacttcgaccgtacgccgaccattcgttcgtcgctgcatgaagtgcagatcaccctgctgatcagcctggcgatggtggtgctgaccatggcgctgttcctgcgccggctggcaccgacgctgatcgccgcagtgaccgtgccgctgtcgctggccggtgccgcgctggtgatgtacgtgatgggcttcaccctgaacaacctgagcctgctggcgctggtgatcgcgatcggcttcgtcgtggacgatgcgatcgtggtgatcgagaacatcatgcgccacctcgatgagggcatgccgcgcatgcaggcggcgctgaccggtgcgcgcgagatcggcttcaccattgtctcgatcaccgcctcgctggtcgcggtgttcatcccgctgctgttcgccagcggcatgatgggcgcgttcttccgcgagttcaccgtcaccctggtggcggccatcgtggtctcgatgatcgtttcgctgacgttgaccccggcgctgtgcagccgcttcctcagcgcccatgaccacagcgcgccgccgtcgcgcttcggacgctggctggatgccggccacgagcgcatgctgcgcatctacaccgtgttcctggacttctcgctgcgccacgcgctgctgctgtcgctgacgccgctgatcctgatcggcgtcaccatcttcctgttcggggcggtgaagaagggcgcgttcccgccgcaggacaccggcctgatctggggccgcgccaattccagcgccaccgtctccttcgaggacatggtcgcccgccagcgtcgcatcaccgacatgctgatggccgacccggcagtgaaaaccgtgggtgtgcgcctcggcagcggccgtcagggctccagtgcacagttcaacatcgagctgaagtcacgcagcgacggtcgccgcgaaaccaccgcacatgcgttggcgcgactcagtgccaaggccgatcgctaccccgacctgcagctgcgcctgcgcgcgatccaggacctgcccagcaacgatggcggcggttccagccagggcgcgcagtaccgcatttccctgcagggcaacgacctggctgctttgcaggaatggctgcccaagctgcaggcggaactgaagaagaacccgaagctgcgtgacgtcggcaccgacgtggacaatgccggactgcgccagaacatccagatcgaccgcgccaaggccgcgcgcctgggcatcactgtcggcgccatcgacggcgcgctgtacggtgcgttcggccagcgccagatctccaccatctattcggacatcaaccagtacagcgtggtggtcaacgccctgccctcgcagaccgccaccccggcggcgctggatgaggtgtacgtgcgtgcgcgcaacggcgacatggtgccgatcaccgcggtggccacacagatgcccggcctggccccctcgcagatcacccacgagaaccagtacacgacgatggacctcagctacaacctggctccgaacgtgagcatgggtgaggccaaggcgatcatcgatgccaccgtcgccggcatgcgcatgcctggcgacatccgcctggccgacgatgcgggcttcggcttcaattcagatcccagcgacatgctgatcctggtgtttgccgcgatcctgaccgtctacctggtgctgggcatgctctacgagagcctgatccacccggtcaccatcctgtccacgctgccggcggcgggcgtcggtgcgctgctggcgttgttcggcaccaacaccgaactgtcggtgatctcgatgatcgcgctggttctgctgatcggcatcgtcaagaagaacgcgatcatgatgatcgacttcgccctggtggcgcagcgcgagcatgggctggcgccgcgcgatgccgcacgcgaggccagcatcgtgcgcttccgcccgatcatgatgaccacgatggtcgcgatcctggcggcggtgccgctggcgatcggtctgggtgaagggtccgagctgcgccgcccgctgggcatcgcgatgatcggcggcctgctgttctcgcagagcctgacccttctcagcacgccggcgctgtacgtgatcttctcgtgcctggccgagcgttggcgcgcacgccgcgcacgcaggcgcgaagccaagctgctcaagcgcgcgcagcgggcgtag

SEQ ID NO: 495699 - DNA, 2178 bp, Stenotrophomonas maltophilia
atgtccgcccgacaatcccgcctcagccgcctgtgggcccacgagaaggccagttacggcctgcgggtgttcatcgccctgaccgcggcgctggcggtgtgctggcagctggatgcgctgaccgccctgcccggcgtgttcctcggcatcatcgccagtgccatcgccgaaaccgatgacaactggtggggccggaccaaggcggtggcgctgtcgctgctgtgcttctgcattgccgcagcatcggtcatctggctgttcccgtggccgtggatcttcatcggcgcgctggcgctgtccaccttcggcctgaccctgctcggcgcgctcggcgagcgctatgcgtccattgcccaggccacggtgacgctggcgatctacaccatgatcggcctggaacagcacggtgccagcgacctgcacagtgcgctggaagcggtcagccacctgctggccggtgcggtctggtacggcctgctgtcgatcctgtggaccgcgctgttcgccaaccggccggtccgcgagcgggtggcgcgactgtacgttgagctgggccgctacctgcagctgaaggccgcgctgttcgagccggtgcgcgaagccgacctgcaacgtcgccagctcgacctggccgaacagaaccgccgcgtggtcggcgcgctgaacgaggccaagaccgcgatcctggcccgcttcggccgctccggccgacccggcgtgaactccggcctttacctgcgcctgtactacatggcgcaggatttccacgagcgcgccagttcctcgcattacccgtacggcgcgctggtggacgcgttcttccacagcgacgtgctgtaccgctgccagcgcctgcttgacctgcagggacaggcctgtgcccgcctgggcgaggcaatccggctgcgccgtccgttcgtgtacggagaaggcaaccagcaggccgggcgcgacctggccgatgcgctggcctacctgcgcgaccagcagcggccgcaatggcagcgcctgctgggctcgctggacctgctggtgcacaacctgcgcagcatcgaacggcgcctgctggatgccgagcgctccgaagccagcctggacaacgtcgatacccgcctgcgcgacagcaacccgcacaccctgcgcgagatgggcgtgcgcatccgccagcagctcacgcccggctcggtgctgttccggcatgggctgcgcatggcgctggcgctgattgccggctttgcagcgatccgcctgttcaatgcgcagaacggttcgtgggtactgctgaccatcgtgttcgtgtgccggcccaacttcggcgccacccgccaacgcctggcccagcgcatcgtcggtaccctggccggactggtgctgacctgggcgctgctgcagctgttcccgcagctgcacgtgcagctgctgatcgccttgctctctgcacttctgttcttcttcacccgcaccgaccgctacctggtggcgtcggcggcgatcacggtgatggcactgacctgcttcaacctgatcggcgacggcttcgtgctgatcgtgccgcgcatggtcgatacggtgctgggttgcgcgatcgcagcggcggccgcgttcctggtcctgcccgactggcagggccggcagctgcatctcgtcctggcacgcgtgctggacactgcggctcgctacctggattcggtgctgggccagtaccgcagcggcatgcgcgacgacctggcctaccgcatcgcgcggcgcgacatgcacaatgccgatgccgcgctgtccaccgcactgtcgaacatgctgcatgagcccggccatgtgcgccgcaatctggatgccggcttccgcttcctggcgctgtccaacacactgctgggacacctgtcggcgctgggcgcgcatcgcgaccaggtggacagctatgcgggcgacccgctggcattggcggccggcgagcgcgtgcgcaaggcactgcagcaactggcctcggcgctgaccgcacggcaaccggtcgccgacgatgacaacgacgccgaccgcgcggtggccgccgagctggagcagatcgacgaggcgatgccgccgaaactgcagctgatccgcacgcagatggcgctggtactgcggatgctgccgaaggtgcgggcagcggccaatgaagcggtgaccagcctgacctga

SEQ ID NO: 495700 - DNA, 795 bp, Stenotrophomonas maltophilia
atgaaaatcgagctcagtggccgcaccgcgctggtcaccgcctccaccgccggcatcggccgggccatcgcccaaggactggccagcgctggtgcgcgagtcattctcaatggccgcagcaccgacagcgtcgagcgcgcccgccggcacctgctcgccaccgtgccgggagccgacgtgctcggcgtcgccgccgatctctctgatgcagccggtgtcgaaacactgctggccggcctgcccaaggtcgacatcctggtcaacaacgccggcatcttcggcccacaggacttcttcgagaccgatgacgcgacctgggagcgctactggcagaccaacgtgatgtccggcgtgcgcctgtcgcgtgcgctgctaccggcaatggtcgatgccggctggggccgcgtgctgttcatttcctccgaatcagcgcgcaacattcccgccgacatgatccattacggggtcagcaagaccgcgcagctgtcgttgtcgcgcggcctggccaagcgcgtggccggcagtggcgtcaccgtcaacgcggtgctgcccggcccgaccctctccgacggttttgcggcgatgttcgaggatgaacgccagcgcagcggcaagccgctggagcagatcggccgtgagttcgtgatggcgcaccggccgtcctcggtgatccagcgcaccgccacggtcgaggaagtggccaacatggtggtgtacctggcctcgccgcaggcctcggcaacctcgggtgcggcgctgcgcgtggatggcggcgtggtcgacgatatcgtctga

SEQ ID NO: 495701 - DNA, 1890 bp, Stenotrophomonas maltophilia
atgtccggtcacaaccagttcgccctgctgcgccagcgccgtttcctgccgttcttcgtggtccaggcgctcggtgcgttcaacgacaacgtgtaccggcaggcgatcatcagcatgttgctgttcatggctgtgccggaggaagaactggggttgtacgccaccctggcaccggccatcttcatcctgccatatttcctgttctcggcgctggccgggcagatcgccgacaaactggaaaaatcgcgactgatcgtgatcaccaccaccatggagatcgtgatcatgtcgctggcggccaccggcttcctcacccagagcctgccggtgctgctggtcgcgctgttctgcaccggcatgcagtccaccctgttcggcccggtgaagtactcagtgctgccgtcggtgctcaggccagaagagctgaccggcggcaacggcctggtcgagatgggcacctcgatgtcaatcctctccggcatgatcgtcggcggcctggtgttcaccgtggctggcagccacggcacggtggtggccgcgtgcgcgatcatcgccctggcgatctgcggcaacatcgccgcgcgcctgattcccaaggtcgatgccggcgacccgaatctgaagatcaactggaacccgttgccggaatcgctggcggtgctgcgcatggcgcgccagcagaaagccgtacgcaactcgatcctgggcgtgtcctggttctggttcgtcggcaccgtgctgacctcgcagttgccggcctatgcggtgaccaacctgggcggccagccgaccctgtacatcttcgcgctggccctgttctcggtgggcaccggcgtcggctcgctgctgtgcgagaagctgtcagcacgtacggtggaaatcggcctggtaccgctgggcgcgttcggcatgaccgcgttcctgctcgacctgtacttcgcccgcagcggcgaagcgacagtgcacgggctgaccatcgggccgttcctgcagcagcccggcagcatccgcatcgtcatcgacctgatcggcatcggcctgttcaccggcatcttcgtggtgccgctgttcgcactgatccagagccgcacgccgaaggcgcagatgtcgcgcgtgttcgccgcactgaacatccagaactcgggcttcatcgtcgctgcggcgctgctgtcgctggccgcccacaagctgctgcactggaccattccgcagcagttcctggcgctggccatcgccaacgccctggtggcgatctacatcttcaccatcgtccccgaattcctgatgcgcttcctcagctggctgatggtgcgcaccctgtaccggctgcgcccgcacggcatcgaggccaacgtgccggacgaaggcgccgcactgctggtctgcaaccacgtcagctacatggacgcgctgatcctgtcggcgaccatcccgcgcccggtgcgcttcgtcatgtactacaggatcttcaacatcccggtgatgcgctggatcttccggaccgccaaggcgatcccgattgccggggcgcgcgaagacccggcgctgatgcagcgtgcgttcgatgagatcgacgcggcgctggccgaaggcgaactggtctgcatcttccccgagggcgcgctgacccgcgacgggcagatggcgccgttcaagtccggcgtcgagaagatcctcgagcggcggccggtgccggtggtgccgatggcgctgcgcggcatgtggtcgagcatgtggagccgccgcgacagccgccttggccgcatgcgggtgccgcgtcgtttccgcgccacggtcgaggtggtggcggcaccggccgtggatggccgcaccaccagcgccccggtgctggaggcccaggtgcgggccctgcgtggtgatcacgcctga

SEQ ID NO: 495702 - DNA, 288 bp, Stenotrophomonas maltophilia
ttgaatcaaccgccaccgctcagccgtccggtctacatccccaaccatctggtctgggcgatcctgacgacgctgttctgctgcctgccgttgggcgtggtgtcgatcgtctatgcctcccaggtcgatggccgccgcgccgccggcgacctgccgggggcctacagtgcgtcgcgcaaggcgggctggtgggcggtggcttcggccgtggccctgccggtcctgttgctgttgtggttcgggctgttcggcggcttggccgtactgggcgctctttccgaccaatga

SEQ ID NO: 495703 - DNA, 279 bp, Stenotrophomonas maltophilia
atgaacaccgccactccgcaggtcccgaacaatctggtctgggccatcctgagcaccctgttctgctgcctgccggccggcatcgtgtcgatcgtctacgccgcgcaggtcaacggcaagctggccgctggcgacatcgccggtgcccaggactccgccgccaaggccaagaagtgggcgatctggtcggccatcgccgccgtcgtggtcggcgtgctgtacggcatcctgatcgtcgctgtcggcggcatgggtgcaatgaacaacagcggctactga

SEQ ID NO: 495704 - DNA, 426 bp, Stenotrophomonas maltophilia
atgtccgcacttcccgcccgctcccgattcgcccgctgggcaccgctgctggccgccaccggcctggccgccggtgccgcggtggtgctgcgcaacgtcaatccgtatgtcgccggcaatcctttgccgagctgcccgctgtacgcgctgacaggcctgtactgcccgggctgtggcagcacccgctgcctgtattcgctggtccatttcgacctgcccggcgcgatggcgatgaacccgctgctggtcatcagcctgccgttcctgctgctgatgctgctgaacgtcgccggcatccgtccgcgcgtgctcgacccgctgatgcgggtactggccaatcccacgttctggctctgggtgctgcccgggtatgcgctgctgcgcaacctgccgtgggcaccgttcaccgcactggcaccgatctag

SEQ ID NO: 495705 - DNA, 888 bp, Stenotrophomonas maltophilia
atgttcaccactctggccgccgtgctggtggcactggccctgggccatgttgctccggccgctgctgcctcgctgcgccgtttcgacggtttccggcgttggctgggctggctggatgcgcgtggtggcaaggcctggcagggaccggccggcgttgccttggcactgctgccgccgctgttgctgatggtgctgctggcgtggctgttgcgcggggtgctgttcggcctgccgtcgctgctgctgggcgtggcggtgctggcctggtgctggggcccgcgtgacctggaccgcgatatcgaggccattatcgatgccgatgatgcggcgacgcggcaggctgcagtgcgcaacctgcagtcggccggcggcagcctgcgcgaggacattccgtcactggtcgaggcgacggtgctcaacgcactgcggcgctggttcgcggtgctgttctggttcctgttgctgggcccggctggcgcgctcggttaccggctgctggcgctgatggcggagagcccgatgcgcgcacgcgtgccggtggagccgctggcgctggcgcagcgcctgctgggctggatcgagtggccggtggcgcagctgatggccttctcgatggcgctggtgggcaatttcgatacggcgtggaaggcctggcgccaggcccatggcgaacgcctggccggcaacatcgggttccttggcgcggtggcgcgggccagcgtcaacgccgagctgcgtgaggatgcgcacgattacaccgaggcagggttgctgccggtgtggcagcggttgccggacctgcgtgatgcgatgagcctggtgtggcggatgctgctgctgtggctggcggtcctcgccctgctggtgattgcaggctgggtgacgtag

SEQ ID NO: 495706 - DNA, 906 bp, Stenotrophomonas maltophilia
atgcccaatactccttcgccgctttccggtttcgccttcgtgggtgaaccgctggagcgcgccgatgccctgcgcgaagatgccgatgcactggcgcgcctgtggccgggcgcgcgcattctcgtgctcgatcaggacggcagcgccttcaccggcgatgacgatcagccactggcgctgaccggcgccgacatcggcggcggcccgggtgccgcgatcttcctcggcctgcgcggagagcaggcgtggttctcggttgaagccaccaacgtcaccatcagcgcaccaggccggcttgatctgcgccaggccgcgctgctgtggtcgatggccgatgcgaccgccttcagctatgcccgcggcatgtcgtactggcactcgcgcacccgcttctgcggcgtgtgcggcggcgccgtggcgtttgcccgtggtggtttcgtcggccgctgcgggcagtgctccaccgaacactacccgcgtgtcgaccccgcggtgattgtcgccgtggaaaaccagggccggctgctgctgggccggcagtcgaactgggccccgcgtcgctactcggtgctggccggcttcgtcgaacccggcgagaccttcgagcagaccgtggtgcgcgaagtccatgaagagagcaaggtgcgggtgaccgcctgccagtacctcggttcgcagccctggccattcccgggtgcgctgatggttggcttccgcgcacaggcgcaggatgacctgccgaccgtggacggtgagctggaagacgcgcgctggttcagtgccgacgaggtcggcgcggcactggcgcgcgacgtggaggacgatggccagggtatccgcctgtcgccgccgatctcgatttcgcgcggcctgatcgagcattggtaccggcagcagaagggctga

SEQ ID NO: 495707 - DNA, 393 bp, Stenotrophomonas maltophilia
atgagcacgctagtctccctgcccggcgccaccccggttgccgcgcccgattaccaatcgctggagcgcccgctgaacttcaccgagtcggcggccgccaaggtcaaatccctgatccaggaagagggcaaccccgacctggccctgcgtgtgtacatcgagggcggcggctgttcgggcttccagtacgggttcgagttcgacgagaaccgtgccgaggatgacctggcggtacagaccagcggggtgaccctgctggtcgacccgctgagcctgcagtacctgatgggcgccgaggtggactacaccgagagcctgaccggtgcccagttcgtgatccgcaacccgaacgcaaagaccacctgcggctgcggcagcagcttcagcatgtaa

SEQ ID NO: 495708 - DNA, 465 bp, Stenotrophomonas maltophilia
atgttcggaagcagcaaatccaaccgtgaaggccagctggtggtggatgccctgatcggcaaccaggtggtgatccgcggtgatgtggaattcagtggtggcctgtatgtggaaggtcgcatccacggcaaggtgatcgccaccgaaggcgccagcggcgcgaccctgacggtcgccgagcatggcgtgatcgagggtgagatccgggcccaggtggtggtcatcagcggccgtctggacggcgatgtacacgccaccgagaaggtcgagctgacccccagcgcacgggtcaatggcaacgtccattaccaggtggtggagatgaatgcgggcgcccagctgaacggccgcctgatccatgccagcgccccgatggcggccctgccggcgccggaaggcgatgaggccaatggcggcaagggcgacaccgccgcacgccgcaagctggccgaggcgatggcttga

SEQ ID NO: 495709 - DNA, 744 bp, Stenotrophomonas maltophilia
atgaccaaccgtcctcccatgcgcgtgcaggtacgcctgcccggcgcgccgcaaccgccggccgaccgtcgtggcctgctggtgatcggcggcatctggctgctcagcctggtgctggcggtgctgggtggctgctggatggccacgccacgcgatgcccagggccagcgcctgcaggctgccgagaagcgcgccgagacgctgcaggcgcagctgaccgagctgcgccagaagcaggccacgctggaggcctccgaccgcatcagccgcgccgccaataccgaggtgcagtcctcgctggccgagcgcgatgaggaaatcgccggcctgcgcgccgacgttgccttctatgagcgcctggtgggttcgaccagccagcgcaagggcctgaacacccattcgatcgagttcagcccggaagcggccggcacctggcagtacaccgccgtgctgacccagaacctcaaccgcggcgccatcagccaggggcagatgcgcttcaccgtggaaggcgtgaagaacggcaagctggccacgatcagctgggatgatctgcaccagcgcagcaaggtgccgggacaggattactcgttccggtacttccagcagctcaccggcagcgtgatgctgccggctgacttcaccccgcaacgcgtgcgggtgacattggggagtggtacggggggtaccacccaggtattcgactggaaacaggccggtgcgccggccagcaaaggggagtag

SEQ ID NO: 495710 - DNA, 618 bp, Stenotrophomonas maltophilia
atgaccgaagcccacttgttcgtgatcggcatcctgctggcctggctggccggcatccgcgtctacctcaccgtgttcggcgtcggccttgccggcctgctcggctgggtcgacctgccgcccgccctgcaggccaccgaatcctggtgggtgctgggcacgtcggcggcgctggccatcgccgagttcttcgccgacaagattcccggcgtggactcggtctgggacctggtgcagacgctcgcacgcgtgccggccggcgcgttcctcgcagcggctaccctgtcgccggacggtcagctcggcgccggcgcactcgccgccggtgccggcgtcgccctcgccagccacggcctgaaggccggtacccgcgcgctgctcaatacctcgccggaaccggccagcaactgggtcgcctccgccgccgaggacaccgtggtagtcggtggcctggcgctggccctggcacacccgtggatcgcgctgatcgtggtgctggcctgcagcctggccggcgcgctgctggtgtggctggtctggcgcgcgctgtggaagggcgtgcgctggctggcgcgcggtgcatcggcagcaccgccggggcacagcagtaccggttga

SEQ ID NO: 495711 - DNA, 1890 bp, Stenotrophomonas maltophilia
atggccgcaaacgaatcccccgcgggcgcccgcccgggacgcgctgaaacccctccggccgatcattggcagcgctgggcgcccgaggcggcaggccccgctgtggccgcaccgacggctgcgaccccgccgcccatcgcgaccgatgccccggcgtcggtcaacagcgcaccgccgccgctgcccggcccgatcgcactggccgaagccggcaacaacgatctggccccgccgccctcggactcgccctaccgcgtgctgatcgttgaagacgatcgcgcccaggcgctgttcgcgcagagcgtgctgcacggcgccggcatgcaggcgatcgtgcacagcgatgccgatgccgcgctgcaggcgatcaaggagcaccgccccgacctgatcctgatggatctgcacctgcccgggctggacggcatgcgcctgaccgcgctgatccgccagcagcccggcctgcagctgctgccgatcgtgttcctcagcggcgatccggatccagagcgccagttcgaagtgctcgacagcggcgccgacgactacctgagcaagccgatccggccgcgccacctgatcgcagcggtggccaaccgcatccgccgcgcacgtgcccaggccgcgaccctgccgggcgccaccggcgcaccggccaccagcaatccggaaaccggcctgccgacgcgccaccatgtgctgcagcagctcaacaccgcactcgcccaccgcgaccggggcggcgtgttcttcatcgaagtggccagtgcgctgggcctgcgcgaacgctatggctatgccgcgtttgaacggctgatggtgcaggccgggcagcgcctggccgaagccggccatccgcacctgctggcgcggctgaacgacaacagcttcctgctgctggcccgcaacgccgacgaggacgccctcgaaggcatcgccgcgagcctgcgcgagcagctgtcggcccgcgccttcgtgatccgcgacgacgaatccgtgcatctgcgcggcgtggtcggttatgcgccgctgtcgccgggcttcgaggatgccagcagtgcgctggaagcggttgagcgcaccaccctgcaggcgcgcctgctcagcgccggcgtggcgggccatgtgcatcgccaggcggtcaccgaacaggaacacctggcgctgctggagggccagctggaactggcctaccagccgatcgtcgccgtggcaggcggcaacaccgcgcaataccagttgctgctgcgcctgcgccaggccgatggcacggtgctggcggccggccaggtgatccccgccgcggaagccgccgggcgcatcgccgacctcgaccagcaggtgatggaccacgcactgggcctgctggatctgtaccggcacgcaacgcagccgctgagcctgttcgtctcgcagtcgctgcgcaccctgcagcgcgatgccttcgccgactggctgctggaatcactgcagcagcgtgacctgcccggcagtgcgctggtgatcgacgtgcgcctgcccgacgcactgatccacaccgtgccgctgcagcagttctgccagcgcatggccagcgcgggggtgcgcttctgcctgagccagttcgaacccagcggcgaggccgatgcactgctgacccagctgccgctgtcgttcgtgcgcatggctgcgcgcttctccagcagccactccaatccggccacgcgcgaggaactgcgcaagacgatcgaacaggcccatgccgccggactgcagatcatcggccagcagatcgaggatccgcaggctgcagcggcgatgtgggtaggcggcgtcgactacatccagggcaacatggtgcagtcggccggcagcgacctgaacttcgacttccacaacgcggtgctctga

SEQ ID NO: 495712 - DNA, 2241 bp, Stenotrophomonas maltophilia
gtgccgctgtggggcgtgctgctggttgcccttgctgcggccgccatcgcgctgctgctgttgggcctgcgcctgcgcgcgcgcaaccatgcgctggcccagctgcagcgcacgcacagtgcgctggccgccgaacgcgaccagcttcgccataccaccgaacgccagggccagctggaacaacagctgctgcaggccaagcaggccgccgaggcggccgtgctggccaagggcgagttcctggccacgatgagccacgagatccgcaccccgctcaacggcatcctgccgatgctggagctgatcgcacgcgggccgctgggcgaagaccagcggcagatgctggccaccgcctcggccagttcgcaacagctgctgcgcatcgtcgacgacatcctcgactactcccggctggaagcgcaggcgctggaactggagatcaccagcttcaacctgcgcgacctgctcgatggcgtggtacagctgatgcagcgggccgccgacgccaagggcctggccctgggcctgcaactggatccatcggtgcgcctgccggtgcgcggcgacccggtgcgcctgcgccaggtgctgagcaacctgctggccaacgccatcaagttcaccgcccgcggccaggtgcagctgcgcgtgctgcgcctgggtgaaagtgccgcgcagcaccagctgcgcttcgagatcatcgataccggcatcggcatcgacgacgcgctgcaggcacgcctgttccagtccttcagccaggccgacgcatccaccacccgcatctatggcggcaccggcctgggcctggccatctgcaagcgcatcatcgacctgatgcacgggcacatcggcgtgcactccacgccgggccagggcgcaaccttctggttcgagatcccgctgctgaaggtcgctggcgacctgccggcgatggcgcgcgcaccggcaccgctgctgctgttcagtgccgatgcaacgctgcaggcacgtatcgagcgcatcgccgcccaccatgggctgcaggtgcaggtgctggcacagctggatgccgtggtcgagcgcctgcgcgctcccgcgcggcccggacaaccggcaccggcatggctgctggtcgatgcccgcgcacgccgcaacggtgaggccacgctgcagctggcgctgagtgaacgtggtgacgacgatgtgctgcaggtgctgtggctgcaggagggcgcacttccacaacgccagcgccagcgccagctgcccccgcacttcgacgatgcggccctgcatgcactgctggctgcaccggtcgcccccgcccgccccgctgcgctgctggccagcgcggacaacgagcaaccggctgccacgctgccgccgttgcatctgcgtgtgctgctggtggaggacaatacggtcaaccggatggtcgccgaacaactgctgcgcgtgttccagtgcgaagtgcgcaacgccgccgatggcgagcaggcgctggccgccctccgcgaaggcggcgtggacatcgtgttgatggattgccagatgccggtgctggacggctacgccgccacgagccgctggcgcgccgaagaagtggagaccgggcgcgcgcgcctgccgatcatcgccatgaccgccaacgccatggccggtgaccgcgagcgctgcctgcaggcgggcatggacgattacctgtccaagccgatcgcgcgcgccacgctgcatgcgctgctgctgcgttggggtggcggcaaagctgcatcacctggacaattttctgtggagccgtctgtagagccgagccatgctcggctgacggccagtggcactcccactccatcagccgagcatggctcggctctacaggagacgacaagccaagccgcgccgaaaccggtgatcgaccgcgacgtgctggatgaactgcacaccgtgatcggcgacgctgccacccagatcgtcatggtctttcttgaagatgcgccggtgatggtgcagcagttgcagctggccgcgcagaacggcgatgagctgcgcttgcaggccacagcgcacagcctgaagtcatcgagtgcaaacgtcggcgcattgtcgctgtcggcgatcgcgcagcggatcgagcacgaagcccgtagtggcagcctgcagcgccccgcggtggcggtggcgctgctggttgcggaattcgcccgggcgcgtgttgcactgacgggctacctggcacagcaccgcgccggccagggcggctga

SEQ ID NO: 495713 - DNA, 471 bp, Stenotrophomonas maltophilia
atgaagggcgacaccaaggtcatcgaattcctcaacaaggtcctctacaacgagctgaccgcgatcaaccagtacttcctgcacgccaagatgctgaagaactggggcatcaaggaactggccgaacacgagtacaaggaatcgatcgacgagatgaagcatgccgacatgctcgccgaccgcatcctgttccttgaaggcctgccgaatttccaggcgttgggcaagctgcgcatcggcgagaacccgaccgagatcctgcagtgcgacctgtcgctggaacgcgatggcgtggtcaccctgcgcgaggccgtggcctattccgattcggttggcgactacgtcagccgccagctgttcgtgaagatcctcgattcggaagaggagcacatcgactggctggaaacccagctggacctgatcgagcgtatcggcgagccgaagtacctgctgagcaagctggaagagtga

SEQ ID NO: 495714 - DNA, 210 bp, Stenotrophomonas maltophilia
gtgtacgtctgcatctgcaacggagtcaccgaccaccagatccgcgaagccgccagccatggcgtcagcacggtggccgaactgaccatgcgtaccggttgtggtgccacctgcggttcctgcctggacatggccggcgacctgctggccaaggcacgtgcgacccacgatctgccgctgccggtattgggcctggcgcaggtcgcctga

SEQ ID NO: 495715 - DNA, 621 bp, Stenotrophomonas maltophilia
gtgatcgatccggacggctatcgaccgaacgtcggcatcgtgctgatgcggcaggacggccaggtgttctgggcacgacgcgtgcgccgggatggctggcagttcccgcagggtggcatgaacaccgacgagacgcctgtcgaggccatgtatcgtgaactgcaggaagagaccggcctgctgcctgagcatgtggaagtgctcggggccacgcccggctggctgcgctacaagctgccggcgcgggccatccgccgcaacgagcggcaggtctgcatcggccagaaacaggtctggttcctgctgcgcctgaccggcgacgaatcccacgtgacgctggaccacaccgactcgcccgagttcgaccactggcgctgggtcgacttctggtacccggtagagcacgtggtgatgttcaaacgcggcgtctatgcgcgtgccctgcgacacctcgcgccactggcgcgcggcgtggccgggcagggcgtcaccgccatgcccaagagcgccgcggaggcctggatgccgggccacaccgccgggcacgaccgcccgcgcaagcgcccgcggacccgagggtactggccgaagaaggtcacgggcgacggcccggccagctga

SEQ ID NO: 495716 - DNA, 393 bp, Stenotrophomonas maltophilia
atggctatcactcaaaactacggcactggccgccgcaagtcctccaccgctcgcgtgttcctgcgcaagggttcgggcaacatcaccgtcaatggtcgtccgctggacgagttcttcggtcgtgagaccgcgcgcatgatcgtgcgccagccgctcgagctgaccaagaacaccgaaagcttcgacatcctggtcaccgccgctggcggcggcaccaccggccaggccggtgcgatccgcctgggcatcgcccgtgcgctggtcgagtacgacgaaaccctgaagtccgagctgcgcaaggccggcttcatgacccgtgacgcccgtgaagtcgagcgtaagaaggtcggtctgcacaaggcccgccgcgccacccagttctccaagcgctga

SEQ ID NO: 495717 - DNA, 429 bp, Stenotrophomonas maltophilia
atgagcactttcactgccaagaacgagaccgtccagcgcgactggtacctcgtcgacgccgagggcaagaccctgggccgtctcgccaccgagctggcccgccgtctgcgcggcaagcacaagccggtctacaccccccacgttgataccggcgactacctggtcgtcatcaatgcagaaaagattgccgtcaccagcaagaagctgcaggacaagatgtatcaccgtttcaccggctacatcggcaacctgaagaccgaatccctggcccaggcgctggagcgccacccggagcgcgtgatcgagatcgccgtgaagggcatgctgccgaagggcccgctgggtcgccagatgtaccgcaagctcaaggtctacgccggcactgagcatccgcacgccgcacagcagccgcaggttctggatatctaa

SEQ ID NO: 495718 - DNA, 645 bp, Stenotrophomonas maltophilia
atgaccgtgctccgccagaccaccccgctggaccacctgctgaccgaggcgcagcgcgccctggacacggtgttcggcaaccctccggcggcccgcccctacccggccgcaggcaccggcgagccgggcatggaccgcgccgagcgccgccacgccgcggggctgatgcggatcaaccatgtcggcgaggtctgcgcacagggcctgtacttcggccaggcggccgtggcccgcgacccggccacccgtgaacacctgctggaagcggcccaggaagagaccgatcacctggcctggtgcgcgacccgactggatgaactggacagccgcccgagcctgttcaatccgctgtggtacgccggcagctacaccatcggcaccctggcgggtctgcgcggcgacggctggaacctgggcttcgtggttgaaaccgagcgccaggtggaagcccatctggacgagcacctggtcgacctgccggccggcgatctgcgcagccgcgcggtcatccaggtgatgaaggaagacgaggcccgccatgcggagcacgccgaacaggccggcgcacgccgcctgccgttcccgatcccgggcgcgatggcgctggcttccagggtgatgaagaccatcgcctaccgcatttga

SEQ ID NO: 495719 - DNA, 321 bp, Stenotrophomonas maltophilia
atgccctggatctatctgctgctggccggcctgttcgagatcggtttcgccctcggaatgaagtactccgaaggcttcagcaaacccctgcccaccgttgccacggtggtgtccgccctgatcagcctgtacctgatgagccaggcgatgaagagcatccccgtcggcaccgcctacgcgatctggaccggcatcggcgccatgggcgtggcggtgctgggcatctacctgttcaacgacagtgcgtcgccggcccgcctggcctgcgtgggcctgatcgtagccggcgtgatcggcctgaagctggtctcgccgaactga

SEQ ID NO: 495720 - DNA, 795 bp, Stenotrophomonas maltophilia
gtggtcaagccgttgcctcgcctgaggctgcagggtttcaacaacctcaccaaggcgctgagcttcaacatctatgacgtgtgttacgcgcgcaccgaagaggagcgtcagcgttacattgaatacatcgatgaagagtacaacgccgacaggctgactcaaatcttgaccgatgtcgccgagatcatcggcgccaacatcctgaacgtggcccgccaggactacgacccgcagggtgcctcggtgaccatcctgatctccgaagagccggtgatcgacaagaagcaggccggcaaggaactgattcccgacgccgtggtcgcgcacatggacaagagccacatcactgtccatacctacccggaaacccatccgcaggaaggcatcgcgacgttccgcgcggacatcgacgtggccacctgtggcgtcatttcgccgctgaaggccctgaactacctgatcgagagcctggaatcggacatcgtgatcatggactaccgtgtccgtggcttcacccgcgatgtgaagggcaagaagcattacatcgatcacaagatcaactcgatccagaacttcctggccaagaacatcaagtcgcgttacgagatgttcgacgtcaacgtctaccaggaaaacatcttccacacgaagatgcacctgaaggacttcgacctggaccagtacctgttcgaggaaaaggccaagaacctgtcgttcaaggaacgcatgaagatcgaagcgctgctcaagcgcgagatcgaagagctgttccacggccggaacctgtccgagtaa

SEQ ID NO: 495721 - DNA, 666 bp, Stenotrophomonas maltophilia
gtgtcaaccgtgcgcctagctagcagtccactggccctggatatcgccacaatcgatcgtttcctggcgcacagccacaggcggcgatatcccacccgtaccgacgtcttccgacccggtgacccggcgggaaccctgtattacgtcatcagcggctcggtttcgatcatggccgaggaagatgacgatcgcgagcttgtgctgggctacttcggtgccggcgagttcgtcggcgagatgggcctgttcgtcgaatcggaccgccgcgaggtgatcctgcggacccgtaccgcctgcgagctggctgaaatcagctacgagcgcctgcatcagctgttcctcggcccgctgtcggccgacgccccgcgcctgctgtacgcgctgggccagcagatctccaagcgcctgctcgacaccagccgcaaggccagccgcctggcattcctggacgttaccgaccggatcgtgcgcaccctgcacgacctggcgcaggaaccggaggcgatgagccatccgcagggcagccagctgcgcgtctcccgccaggagctggcacgcctggtcggctgctcgcgggaaatggccggccgcgtgctgaagaagctgcagaccgacggcctgctgcatgcccgtggcaagaccgtggtgctgtacggcacccgttga

SEQ ID NO: 495722 - DNA, 762 bp, Stenotrophomonas maltophilia
atggaactgagcagcgaattctggtggttcatcctcatcggcctgggcgcacagctggtcgacggcgcgctgggcatggcgttcggcctggtgtcttcgtcggtgatgctgagcatgggcctgcccccggcgcaggtcagcgccagcatccacaccgctgaagtgttcaccactggcgcctcgggtgtgtcgcacctcgcagccggaaatgtcgataagcgcctgttcctgcgcctggccctgcctggcgcggtgggcggtgccgtgggcgcgtacgtgctcacgcagatcccgggcgagatcatccggccactgatctacctgtacctgctggtgctggcgatcatcatcctggcccgcgcggccggacgctggatgcccaagggcgagatccgccgggtaccggtgctgggcttcttcgcgggcctgctcgacgccagcggtggcggcggctgggggccgatcgccacgtccaccctgctcgcccggggtggccaggcgcgcaccacgatcggcacggtcaatgcggcggagttcgtggtcacgctgacggtgtcggcgaccttcctgctgtcgatgggggtgcagcacctgcagatcgtcgccggcctgctgatcggcggcatgatggccgcgccggtagcggccatcctggtcaagcgggtgaaggagcgctgggtgctggtggccgtcggcgtgctggtgctggggatcagcctgttccagattggccacgcggtgtacgggcacctgtaccgctga

SEQ ID NO: 495723 - DNA, 717 bp, Stenotrophomonas maltophilia
atgacaacgcactatccaacgccgcgcgaggatgcgccgctggtggtcttcgacttcgaccacaccctgtacgacggcgattcgggcacccacctgttcgcctcgctgatcaagcgcaacccgctgcgcatgctggcggcgctgctggtcacgccgatcgccgggccgatggtggcgatgctgccgacccgtcgcgcgggcatctcggtctatgtgtggatcggcagcttcggcctgcaccgtgcgcgcgacttcaacaaggtgatcgacgcctatgtgctgcgcaaccaggcgcagatgcgcgccaagctgctgccgcaggcgctggaggtgttcgccgcgcaccgcgccaagggcgaccgcgtggtggttgccacaggtgcgccgccggagctggcgcgcgcgatcctggctttcgtggcccaccaggacgtaccggtgatcggcaccgaggtcggcccacggctgggcggcgtcggcccgacccgccactgccacaacgaagagaagatgcgcatgctgcgcgagcgcggctacggcgacatcgatatcgcctattccgacagcaccgccgacctgccgctgctgctggcagccaaggcgccggtagtggtgaaccccaagccgggccgggtggcgttcttccgccgcgtgctgccggcgggcacccgcatcctcaactggggttgcgtggaccggggcggcgacaaggcctga

SEQ ID NO: 495724 - DNA, 795 bp, Stenotrophomonas maltophilia
atgagcgacatcctgcagacgatcctggcccgcaaggccgaagaagtggcccagcgccgcgcccagcgcccgctcgaggcgctgcaggccgccgtggccggcgccccgccggtacgtggcttcgtgcgcgccttgcaggcggcggtggccaacggcgatccagcggtgatcgccgaggtgaagaaggccagcccgtccaagggcgtcatccgcccggacttccgcccggccgacatcgccgtcagctacgaattcggcggtgccagctgcctgtcggtgctgaccgacgtggacttcttccagggcgccgacgcctacctgcagcaggcgcgcgaggcgtgcacgctgccggtgctgcgcaaggacttcgtcatcgacgcctaccaggtgtacgaggcacgcgtgctgggcgccgactgcatcctgctgatcgtcgccgcgctggacgacacccagctggccacgctgtccgaactggcgctgtcgctgggcatggacgtgctggtggaagtgcacgacatcgacgagctggagcgtgcgctgcaggtgccggcgccgatgatcggcatcaacaaccgcaacctgcgcacgttcgaagtgtcgctgcagaccacgctggacatgcagaacgcggtgccgcgtgaccgcctgctggtcaccgagagcggcatccttggcccgcaggacgtggcgctgatgcgtgacgccggcatccatgccttcctcgtcggcgaagccttcatgcgcgtggaagagccgggcgagggcctgcgtcagctattcttcgcggcatga

SEQ ID NO: 495725 - DNA, 1032 bp, Stenotrophomonas maltophilia
atgagcttctccccccaggaagccctgcatcgcaccatcgaacaccgcgaaatctttttcgacgaaatggtcgacctgatgcggcagatcatgcgcggcgacgtctcgccgatgatgaccgcggcgatcctgaccgggctgcgcgtgaagaaggagaccgtggacgagatcgccgcggcggccaccgtgatgcgtgaattcgcccggccagtgccggtggccgatacctccaacctggttgatatcgtcggtaccggtggcgatggctcgcacaccttcaacatctccacctgctcgatgttcgtggccgctgccgccggtgcgcgcgtggccaagcatggcaatcgcagcgtgtcgtccaagtccggcagtgccgatgcgctggaagcgctgggcgcggtgatcgaactgcagccggatcaggtggccgcggccatcgagcggaccggcatcggcttcatgttcgcgccgatccaccatccttcgatgaaggtcgttgcgccggtacgccgcgagatgggcgtgcgcaccatcttcaacatcctcggcccgctgaccaatccggccagcgcgccgtcggtgctgatgggcgtgttccatcccgatctggtgggcatccaggcccgcgtgctgcgcgagctgggcaccgagcgcgccatggtggtctggggccgcgacaacatggacgagatctcgctgggtgccggcacgctggtgggcgaactgcgcgacggcaaggtgcgcgagttcgagatccacccggaggacttcggcatcgccatgtcggccagccgcaacctgcgcgtggacagcccggagcagtccatccagatgctgcgcgcggtactggacaacgagcccggcccggcgctggacatcgttgcgttgaatgccggcgccgcgctgtacgttgccggcgtggccagcgacatcggcgacggcctggcccgcgcccgtgccgccatcgccaacggcagtgcccgccagcgcctgcagcagtatgttgagaccacccgcgcgctggttgcctga

SEQ ID NO: 495726 - DNA, 588 bp, Stenotrophomonas maltophilia
atgttgtggatgatcgacaactacgacagcttcacctacaacctcgtgcagtacctgcagacgctgggcgccgaggtgaaggtggtgcgcaacgatgcgatgagcgtggacgagatcgccgcgcagaagcccgagcgcatcgtcatttcgcccggcccgtgcacgcccaacgaagcgggcgtgtcgctggagctgatccagcgcctgggcccgaccacgccgatcctcggcgtttgcctgggccaccagggcatcggccaggtctacggcggcacggtcatccgtgccggcaacatcatgcacggcaagacctcgccgatccgccatgaaggcaagggcgtgttcgccggcctgccggaccgctaccaggccacccgctaccactcgctggtggtggacaagaacagcctgcccgatgtgctggaagtgaccgcctggaccgagaacgacgacggctcgatcgaagaaatcatgggcctgcgccaccgccagttcccggtggaaggcgtgcagttccatcccgaatccatcctcaccgaacacggccacgccctgctgcgcaatttcctgcagcgtccggcggcctga

SEQ ID NO: 495727 - DNA, 786 bp, Stenotrophomonas maltophilia
atgaagctgctgagcgcattgctgtggtcgtcactgctggccacgatggccccgtctgcgtgggcgcaggccaacacgattccctcgcagccgcacctgctggtgaaggggcagggcagccgcacggtgatgccggatcggttcggcctgcagttgaacatcgaagagaccgacatggacgccgacgccgcacgccgccgcgtgcaggacaacgttgcccgcgtgctggcactgttcaagcagcacaaggcggtggagggcagcgtgcgcgcggacaacctgcggatcggcccggccacgcgctatgagcagaaccggcaggtcttcatcggtacccgcgtatcgcgccagctgcgtgccagcttcgccagcgtgaaggcgatgcaggatgtgctgggggcgttgaaggccaacgagaacgtacaggtgagcagcctggcgccgacctattcgggcgaagtggcgctgcgccgcgaactcaagggcgaggcagcggcccagacccgcgagtccgcgcagggcctggccaaggcctatggaacaagagtgcgtggcctgtacagcatctccgatgtggcgccggacttcgcctacggcatccgggccgggcaatggccgcagcagggcgaggacggcggggacctcgacaggatctcggtgaccggcagctacgcgcccgcctccgcgcccgcgcccgcgcccgctgagcccgaatccattgaagccggccccatcacctacaccgaaaacgtgtacgccattttcctgataagcgacggaacctga

SEQ ID NO: 495728 - DNA, 1476 bp, Stenotrophomonas maltophilia
ttgaactcgcacgctcagtttcagcagcaggccgctgaaggccacacccatattcccgtcgtccgtgaagtgctgtccgacctggacacgccgctttcggtctatctgaagctcgccgacggccccaatacctacctgtttgaatccgtcgaaggcggcgagcgctttggtcgttactcgatcatcggcctgccggcgcgtcgcgtgtacgccttccatggccacacgctgaccgtgcgcgaagacggccaggtggtggacacccgcgaagtggccgacccgttcgccgaggtcgaggcgctgcgcagcgcccactcggtgccgaagctggacggcctgccgggcttcaccggtggcctggtcggctggttcggtttcgagtgcatcggctacatcgagccgcgcctggccccgccggccggccgcgatgagctgggcacgccggacatcctgctgctggactccaacgagctggcggtgttcgacaatctgaagggccggctgtacctgatcgtgcacgccgacccgcgcgtcgacggtgccttcgagcaggcccaggcgcgcctggatgcactgactgccaagctgcgtgcaccgggtgccggctatccggcgccgctcaacagcgacgtgctggacgaatcggattttgtctccggtttcacccgcgaagggttcgtcgatgcggtccagcgcagcaaggaatacatccgcgccggcgacatcttccaggtggtgctcagccagcgcctgagcgtgccgttcaaggcgcgcccggtggatgtgtaccgcgcgctgcgtgcactgaacccgtcgccgtacatgtacttcctggatgtcggcgacctgcaggtggtcggttcatcgccggaaatcctggtacgccttcaggatggcgaagtcaccgtgcgcccgatcgccggcacccgcccgcgtggcgccacgcccgagctggacctggcgctggaagccgagctgctggccgatccgaaggaacgcgccgagcatctgatgctgatcgacctgggccgcaacgatgccggccgcgtctcgaaggcaggtaccgtggaggtgggcgagcagttcgtgatcgaacgctacagccacgtgatgcacatcgtcagcgaagtgaccgggcagctgcagccgggcctgagctatgccgacgtgctgcgtgccaccttccctgccggaacggtcagcggcgcgccgaagatccgcgcgctggaagtgatccgcgagctggaaccgatcaagcgcaatgtctacgccggcagtatcggctacatcggctggcacggcgatgccgataccgcgatcgcgatccgcaccgcggtgatcaaggatggccgcctgtacgtgcaggccggtgccggcatcgtctacgactcggacccggacaaggaatgggacgagacgatgaacaagggccgcgcgctgttccgcgccgtcgcccaggccgccaagggcctgtga

SEQ ID NO: 495729 - DNA, 936 bp, Stenotrophomonas maltophilia
atgaccaccccgcgctggcgcctgatcctcaatggcaaatccgctggcaacgaggagctgcgcgatgccgtcggccactggcgcggacagggcgtgcagctggacgtgcgggtgacctgggaggacggtgacgccgaacgctacgtggccgaggccatcgatcatggcgtggacgtgatcgttgccgccggtggcgatggcacgctcagcgcggtggccgaaaccctggcgcatcgtgaggaagcggcggatgcgctgccctcgctggcgctgatcccgatggggaccgccaacgatttcgccacggctgcgggtattccgaccgagcctgagggcgcgtttgcgttgatcggacaaaccacgccgcgtgccatcgatctgctgcgcgtggatgccgatggcacgccctggtggtgcgccaacctcgccagcggtggcttcggcacgcaggtgacggtggagaccgatgccggcctgaagaagatgctgggcgggctggcctatgtgatcaccggcatcgccaagctgggccgcatcgagccgatcaccgcgcggctgtccggcccggatttcgcgtgggaaggcgacttcatcgccctgggcatcggcaatggccggcaggccggcggtggccagcagttgtgcccgcaggccgtgatcgacgatgggctgctggatgtcaccgtgcttccggaactggaaggtgaggtcaccgccacgctcggccagatgctgaagtcgggcacccaggcggcgctcgaacagctggccacgcgcgcgcggctgccgtggctgcagatcgacgcaccgaaggcgctgaccctcaacctggacggcgaaccagtccaggcccgccagttccgcatcgcgtgcgtgccgggcagggtgcggatgcacctgccgaccggatgcccgttgctggccgggcaggggtag

SEQ ID NO: 495730 - DNA, 492 bp, Stenotrophomonas maltophilia
atgagtacggtggccgtgttgaacatccgcccggccaccgtagccgatgctggcctgatcctgcatttcatccgcgagctggccatctacgagaaggccgagcattcggtgcagaccgatgagatcggcatcgccgagagcctgtttggtcccgatgccacggcacgcgcactgatctgcgaagccgacggcgaggccatcggctatgcggtgtatttctacaactattccacctggctgggccgcaagggcatctacctggaagacctctacgtcagccaggaaaagcgcggtgcgggcgccggcaaggcactgctgaagtacatcgcgcgccaggccgtggccgagggctgcggccgtttcgaatggtcggtgctggactggaacaccccggccatcgagttctacaccgctgccggtgccaggccgcaggacgagtggaccgtgtaccggttgcagggccaggcgctgcacgatttcgccaacgggtga

SEQ ID NO: 495731 - DNA, 678 bp, Stenotrophomonas maltophilia
atgtccaactgcctcatcgccccctccatcctgtctgccgacttcgcccgcctcggcgaggaagtcgacaacgtcctcgccgctggcgcggactgggtccacttcgacgtgatggacaaccactacgtgccgaacctgaccatcgggccgatggtctgccaggcgctgcgcaagcatggcgtcaccgcgccgatcgacgtgcacctgatggtcgagccggtggatcgcatcatcccggacttcgccgaggccggtgccacctacatcagcttccacccggaggcgagccgccacgtgcaccgcaccatccagctgatccgctcgctgggctgcaagccgggcatcgtgctcaatccggccactccggtggacatcctcgactgggtgctggatgacctggacctggtgctgctgatgtcggtcaacccgggcttcggcggccaggccttcatcccctcggcgctggacaagctgcgcgtggtgcgcaagatgatcgatgccagcggcaaggacatccgcctggagatcgacggcggcgtgaaggccgacaacatcggcgagatcgccgctgccggcgccgacacctttgtcgccggttcggccatcttcaacgccaggaccagctaccaggatgtgatcgcgcagatgcgcgccaacgtcgctgcggcacggggctga

SEQ ID NO: 495732 - DNA, 330 bp, Stenotrophomonas maltophilia
atgcgctggtacggaaaactgctcggattcatcgccggcgccctgctgttccggcccaatccgctgttcggtgcggtggtcggcctgttgatcggccacgccttcgattcggactggttccgcctgaacaaggagaacccgtaccgggagctggggctgacctccgaggccaccgatgccgaggtcgagcgcgcctaccgcaagctgatctcgcagtaccaccccgacaagctgggcggtgccgcccccgagctgcagcagcaggccgagcagaagtcgcggcggatcaatgccgcctacgaccgcatcaagaccctgcgcaagcgctga

SEQ ID NO: 495733 - DNA, 927 bp, Stenotrophomonas maltophilia
gtgccaaccacgctgttgcaatccgatctccccggcctgcccttgcgccatcgcggcaaggtgcgtgatgtgttcgatatcccgcgcgagcggctgccagccggaaccccgccgggcgagtacctgctgatggtcgccaccgatcgcctgtcggcgttcgacgtggtcctgcctgacccgattccgggcaagggcgagatgctctgccaggtctccaacttctggttcgccaagaccgcgcacctgatgcccaaccacctgaccggcatcgacgtggccagcgtgctgcccgaaggcgtggacccagccctgtacgccaagcgtgcggtggtcacccgcaagctgaagccggtgccggtggaagcgatcgcccgcggctacctgatcggcagcggctggaaggactaccagcgcaccggcaaggtcagcggcattgacctgcccgatggcctgcgccaggccgagcagttgccggagccgatcttcaccccctcgaccaaggccgccgtcggcgaccatgacgagaacatcgatttcgatgcgatggtgaagcaggtcggtgcggaactggccgagcgcgtgcgcgacgccaccctgcgcatctacaagttcgcggccgattacgcccgcgagcgcggcatcatcctggccgataccaagttcgagttcggtaccgacgccgatggccgcctgtacatcatggacgagatgctgacgccggattcctcccgttactggccggccgacgaatacgaagtgggcaccagcccgccgagctacgacaagcagttcgtgcgcgattacctggagacgctggactggggcaagaccgccccgggcccgagcatcccggccgagatcatcgagcgcacccgcgccaagtacgccgaggcgctgcagcgcctggccgggatcagcgtcgactga

SEQ ID NO: 495734 - DNA, 486 bp, Stenotrophomonas maltophilia
atgcagacatccacccagcttgcgcggccgatcgaccgctatttcgccagctactccgacgaccaccgcaatgtgatcaaccagcgcatccacgtggtggcggtcccggcgatcctgtggtcggtggtggccctgctgtggtgcctgccgccgctgatcacctggttccagtacggcatctggtcggcgttggcgatgttcagcgcgtggtgcttctacaacaagctgtcgcgcccgctgggcatcggcatgctcatccagttcttcgtgttcggctgcctgtgccggctgctggaggccgagatcggcctgcaggccctgcgctggctggcggcgggcgtgttcgtggtggcctggatcgcgcagttcatcggccacaaattcgagggccgcaagcccagcttcctgaccgacctgacctacctgctgatcggcccggcctgggtgatggccaagttctaccgcaagctggactggcgctactga

SEQ ID NO: 495735 - DNA, 2829 bp, Stenotrophomonas maltophilia
atgctccccagcctgcccctgctgctggccctgccgttcctgatggcagcggctgttgcggccttcccccgtagttcgcgctcgactgctgcctggctggcggcgctggcgccgttgggcgggctggccatcctcggctggctgaccccgtcggtgctcgatggccaggtggtccgcaccctggtgccctggctgccgcagatcgggctggacttcaccctgcgactggacgggctggcctggatgttcgccgggctggtgctcggcatcggcgcgctggtggtgctgtatgcgcgctactacctgagccagcaggacaacgcgcaccgcttctactgctacctgctgctgttcatgggcgccatgctgggcatggtgctgtcgggcaacctgctgttgctgatgatcttctgggaaatgaccagcatcagttcgttcctgctgatcggcttctggtcgcaccgccaggacgcccgcgaaggcgcacgcatggcgctggtgattaccggtggcggtggcctggccctgctcggtggcgtgctgctgatcggccgcatcgtcggcagcttcgacctggacgtggtgctggctgctggcgagcagatccgcgccagcgcgctgtacccctacgccctgttcctggtactggccggcatcttcaccaagagcgcgcagttcccgttccacttctggctgccgcacgcgatggcggcgccgaccccggtctcggcctacctgcactcggccaccatggtgaaggccggcgtgttcctgctggcgcgcctgcatccggcactggccggcagcgacctgttcttctacacggtcagcggcatcggcgcactgaccctgctgatcggcgcctggaatgcgatcttccagcatgacctgaagggcctgctggcgtactcgaccatttcccacctgggcctgatcaccctgctgttcggcctgtccacgccgatggcggtggtggccggcgtgttccacatcctcaaccacgccaccttcaaggcctcgctattcatggccgccggcatcatcgaccacgagaccggtacccgagacatgcgcaagctgggaggcctgcgcaggctgatgccgtttaccagcgcgctggcgatcatcgcctcgctggcgatggctggcatccccctgctcaatggcttcctgtccaaggaaatgctgttcgccgaagcgatcacggccggcggcccgggaatcatgcgcacggcggtgtcgatcgcagcgttgctggcgggcgtattcggggtggcgtacagcctgcgcttcgtgcacgacaccttcttcggccccggcccgcacgacctggaccgcgtgccccacgaaccgccgcgctggatgaaggtgccggtggaactgctggtggtgatctgcgtggcggtgggcgtggcaccggcactgaccgtagcgccggtgctgcacgccgctgcggcctcgatcctcggcgacgccatgcccgagtacagcctggcggtatggcacggcttcaacctgccgctggcgatgagcgcgatcggcgtgatcggcggcgtggcgctgtacttcggcctgcgcaagctgatcaacctgcacgccgtgaccaacgtcagcactggccgcaatgtgttccatgcgcagctggacgcgatctccgcactggccatgcgcctgaccaacggcatcgccaacggcagccttcagcgcatgctgctgggcctggtgctggtggcgatcgtggccgccgccgcgccgttcgtggccaaccccgcctcgccgaactggaccaggccgcagccgatcccgctgctgggctgggcgctgtggctggtgatgatggcctgcgcggtggctaccctgcgtatctacaagcagcgcctgctggcggtgctgctggtcggcggcgtcggcctgatggtggcgctgacgttcgtgttcctgtccgcgccggacctggccctgacccagctgctggtggagatggtgaccctggtgctgatgctgctgggcatgaactacctgcctgcgcagtccgggccggagcggccgcgctggcgcaagcgccgtgacgcggtgatcgcgatcatcgccggtgccggacttggcgccttggcctattccgcgatgaccctgccgccgaacaccatggccggcgagctgctcgcccgtgccctgcccgaggcctatggccagaacgtggtcaacgtgatcctggtcgacttccgcggcttcgataccttcggcgagatcaccgtgttcggcatcgccgcgctggtggtgcatgccctgctgcggcgcacgcggatggcgccggagcagatcatgcccggcccgccgatcaagctgccggtgccggccgacctggcccagatcatgttcccgctgaccctgaccgtgtcgatcttcctgttcctgcgcggccacaacgcgccgggtggcggcttcatcgccggcctggtgctggcggtgccgctgctgatccagtacgtgatccagggcactgcgtcggtggagtcgcgcttcggcttcgactacatccgctgcatcggcatgggcctgctgatcgccctgctcagcggcagcgcgtcgatgctgtttggcgtgccgttcctgaccagcggccacctcgacctgcacctgccgctgatcggcgacgtgccgctggccagtgcgattggttttgacatcggcgtctatctggtggtgttcggcggtgccatgctgatgctgtcgatgatgggcacgatcaagccatcgcgtacccgtaccgcccgcaagggtgagatcgacctgcaacgccgctcggcacgcaccggggagatgcactga

SEQ ID NO: 495736 - DNA, 393 bp, Stenotrophomonas maltophilia
atggaactggccctggctaccgcgatcggcgtgctgaccgccatcggcatctacctgctgctgcgtgcgcgcagcttcgatgtgatcctcggcatgaccttcctgtcctatgcgaccaacctgctgatcttcgccggtggccgcgtggtgctgggcaaggcgccggtactgcaggacggcgtggacagccacctgggcaactacaccgacccgctgccgcaggcgctggtgttgaccgcgatcgtgatcgccttcgcgatgaccgcggtgagcatcgtgctggccatgcgcagccgcagcgacaaccacagcgaccatgtggacgcgcacgagccggatgacgacctgcaggatgatcgcgtgccgccacggcagggcgaggaccgcgcatga

SEQ ID NO: 495737 - DNA, 1536 bp, Stenotrophomonas maltophilia
atgaaccacctggtgatcctgccgatcctgattccgctgctcggcgccgcgctgtcgctgttcgtcgaacaccgccgctacggccccagggtgcagcgcgcggtggcctggaccgcactgtcggcgctggcgctggcggtgggcctgctgttcgcgtcgaccgcgggcggtgatatcaacgtctacctgctgggcgactggccgtcgcggctgggaatcgcgctggtggccgaccggctttcggcgtggatgctgctgaccaccctgctgctggccattccctgcctgctgcacgcctgctcgggctgggaccgccgcgcaccgcacttccatgcgctgttccagttccagctggtcggcctcaacggtgcgttcctgaccggcgacatcttcaacctgttcgtgttcttcgaggtgatgctgatcgcttcctacggcctgctgctcagtggtggccgtggcctgcgcatgcgcatcggcctgcactacgtggtgttcaacgtcaccgcctcgaccctgttcctgatcgcgctgggcctgctgtacgccacgctgggttcgctgaacatggccgagctgtcgcagcgcatcgccgaggtaccgccggcgcagctgaccctggtgaaggcgacgatgggcctgttgctgctggtgttctgcgccaaggccgccctgatgccgctgtacctgtggctgccggaagcctattcgcgcgcaccggcggcggtggctgcgctgttcgcgatcatgaccaaggtcggcctgtactcggtgctgcgcatccagatgctgtggttcggcgacgatgccggcgcgatggccggctacggccgtgactggctgctgtgggccggtgtggcgacgctggtgctgggcggcctgggcgccctcgccgcgacccgcctgcgcgtgctgatctcctacctggtcatcgtgtcggcagccacgctgttcatcgccttctcggtgggcacgccgcaggtgctctcggccggcctgtactacctgccgcacagcagcttcgtcgccgccgcgctgttcctgatcgccgacctgatccgccgtcgtcgcggcggtgccagcgaccgcaaggaagtggtcgcgccgatgccgggcaaggagacacccgccgtgctgttcctgatcggcgcggtgtcggtggccggcctgccaccgctgtccggtttcctggccaaggccgcactgctggccggcatgccggcgcagtacaccgctccggtctggaccgcggtgctggtcagcagcctgctggtgatcatgggcctgacccgcggcggcatccgcctgttctggcgcgtgccgcctgtcgatccggaggcgccgaagccgcgcaaggctcctctgcgccgggtggagctctacgccgcctgcctgttgctggcctacggcatcgggatgacgctggccgctgcaccgttgatgcgctacaccgacgccaccgccgcacagctgctgcaacccagcgagtacgtgcagcagctgcgcgcgaccgcaccggagatccgccagccatga

SEQ ID NO: 495738 - DNA, 507 bp, Stenotrophomonas maltophilia
atgaccgcccagcgctccctgttccgtcgcctgattccctcgccgatgctcagcatcatggtggtggcattctggctgctgatgtccgacagcttcaccctcggccagatcgtgctggggctggtgctgggcgtggtggtgccgctgttcgccgcacgcctggaccgcgagttcgcgcgcatcggcacgttgcggccgctgcccaagctggtatgcgtgaccctgtgggacatcctgatgtccaacatccgcgtggccctgcaggtgctgggcccggagaagaagatccaccccggtttcatctggctgccgctggacatcgccaacatccacggcatcgcggcgctgaccagcatgatcacgctgaccccgggcacggtctcggccgcgctcagcgacgaccgcaagttcctgctggtgcacgtgctgcacctggaggacccacaggacctgatcgatacgatcaagcgccgctacgaggcaccgttgatggagatcttcccatga

SEQ ID NO: 495739 - DNA, 285 bp, Stenotrophomonas maltophilia
atgactggattccagatcatccagaccacgctggtggtgtgcatgcacgtggtcggcctggccatgctgctggccacctggcgcctgctgcgcggaccgaccgtgcccgaccgcatcctcgcactggacacgttgtcggtgaccgccattgccgagctgatgctgttcggcatgtacctcaactccgcgatctacttcgaagccgcactggtcatcgccatgctcggcttcggcagcaccgtggtgctgagcaagttcgtgctgcgccgggacatcgtcgaatga

SEQ ID NO: 495740 - DNA, 390 bp, Stenotrophomonas maltophilia
atgatcaccgcgatacagatcggcctgtcgatcctgctgctgttcggctgcttcttcatcctggtcggcgcactggggctggtgaagctgtccacgttcttcaagcgcctgcacgcgccgaccaaggccagcacgctgggcgtgggctgcgtgctggtgtgctcggtctgctaccacatcttcctgggccaggacccgcagccgcgcgagctgctgatcaccgtattcctgttcatcaccgcgccgatcagcgcccacatgatggccaaggcggcgctgtcgctgctgatggaaacccgtcccagcctgccgggcaacgagccggctgccgaggaacagcttccgccgccggaaccggcgcgggaagaggaagccacgcagaaccggtag

SEQ ID NO: 495741 - DNA, 960 bp, Stenotrophomonas maltophilia
atgatcgccattgccattgcctggttcctgctcggcctgctgttgctggcgctgggcggggattccatcgtcaaggccgtgtccggcctggcccagcgcttcggggccagcccgttcactgccgggctgctgctgctcggggtgaccacctcgttgccggaactggcggtcaatgcgcgcgcgctggcggtcggccaaccggagctggcactgggcaatgccgtgggcagcagcatcgtcaacctgggcttcaccctggcggtggcagccatcgccgcgcccctgttgctgcgcgcgcgcctgcagacggtgctgtggtggtcgctgctggtggccggcgtgctgctggtcctgttcgggctggatggtcgcctggcgcgctgggaaggcggcgtgctggtggcaggcttcatcgtcgtgcaggtgctgctgctgcgccgcggccgcgttgagcgtgccgaggtgcaggcggccatcgccgagtccgccctgagccgcaccagcctgccgttgaacgtgctgcgggtgctgatcgcagcgctgacgctgtactggggcgcgcgcctggtcgtgggcgccgccgctgacttcggtgccgcgctgggctggacaccgctgctggtcggcctgctgccggtggcgatcggcaccgcactgccggaggtggcaaccgcaattgctgccgcgcgtcgcggccacggcgacatggtgcttggccacgtgctgggctccagcgtggtcaacctgctgctggtgatcggggcgatggcggtgttgcagccgttggcgttgccggcctcgttcgtgcgcctggaactgccggcactgctggcgttcgccctggtgctgtacccgatgctgcgtggcgatctgaagatcagccgcagtgaaggcggaatcctgctggtcgcgttcgccggctggttcgtgctggagctgctgctggtcggcgcggcatga

SEQ ID NO: 495742 - DNA, 657 bp, Stenotrophomonas maltophilia
atgaagcaccttccgcttgctggtctgttgctcctttcgctcaccgcctgcagtgctggccccgacaagcagggggcggccggcagtggcagcgacactccggccgaaaccgcctcggcgaccgggcccgcgcagtcggcggatcccgacctggccgcccgcccggccaacgacctccgcaaggacagtccagcgcgcctggacggcttcggcggcgtcacgctgggcgccggcatcgccgaggtccgcagcggcttcggcacgccgctgcagggactgggcaccgacgccaatggcaagcccctgccggccgacgacagcaacgacggctgctacttcctgcgtccgcagggcgccgaagaccctcgcctgatgatcgaggcacgcaagctggtgcgctatgacgtgcgcagtgcggcgatcgtcgctccgggcggcggcaaggtcggcatgaccctgggcgagctgcaggtgctgtacccagagcgcgcggacgtcggccctgacaagtacgacgagaaggcgcagcacctgcgcgtgcggccggcgcaggaaggcggggcggtcatcgacttcgcgctcggcgccgatggtcgggtcagcgcctggcgggtcggccagaccccgcaggtcgattacgccgaaggctgtggctga

SEQ ID NO: 495743 - DNA, 543 bp, Stenotrophomonas maltophilia
atgcaaccgcgcaagaccgaactcgcccgaaccgcgctgcaggcccatcgcgcgccgctggacatgcgccagcgccggctgctgatcctgtgcgacggccagcgcagcatcgccgacctgaccggcctgctcggccaggacgcgcccgccatggtcatccagctggtgcaggccggctacctgagcaccggtaccggcgccacagccgcaccgccaccacccgcagacgcggcagcaccggcacccaccacgccggcggcggcaccggctgcacccgcaaccggcagcgagcgccgccgctcgttggtggccgcgcgcatctatgtactgggcatcctggaaatgcagcgccacccgcaggcggcggcgctgttccgcgacctgcagcaggcgcgcgccgaaagtgaagtactgcaggtgctgcactcggcgatgcagatgctgcccgggctgacctcggagggttattgccagcgtgtgcggcaacgcctgctggaagcgctgccgctggagcattgcgaagcgttcaccgaggccgcctga

SEQ ID NO: 495744 - DNA, 1299 bp, Stenotrophomonas maltophilia
atgtcccccgccatctccgcccgcggctaccagtccggcttcggcaatgaattcgccaccgaggccgtcgccggcgcgctgccggtcgggcagaactcaccgcagaaggtggcccacggcctgtacgccgaacagctgaccggcaccgccttcaccgcgccgcgcggcagcaatcgccgcagctggctgtaccggatccgcccggcggtgacccatggcgagttcactccgttcgcgcagtcgcagctgcagtgtgatttcggcgcacagccggcttcaccgaaccagctgcgctggagcccgctgccgctgccggagctgccgaccgactttgtcgaaggcctgtacacgatgggtggcaacggctcgcccgacgcgcatgccggcgtgggcatccacctttacgctgccaaccgcgacatggtcggccgctacttctacgacgccgacggtgaactgctgatcgtgccgcagctgggcgcactgcgcctgctgaccgagctgggcgtgatcgagatcgagccgcagcagatcgcggtgatcccgcgcggcgtgcggttccgcgtggaactgcccgatggcccgagccgcggctacatctgcgagaactacggcgcgctgctgaagctgcccgaccttggcccgatcggttccaacggcctggccaacccgcgtgacttcgagaccccgcacgcggcgttcgaggatgtcgatggcgatttcgaactgatcgccaagttcgagggccgcctgtggcgcgcgccgatcgaccattcgccgctggacgtggtggcctggcacggcaattacgcgccataccgctacgacctgcgtcgcttcaacgccatcggttcgatcagctacgaccatccggacccgtcgatcttcctggtgctgcattcgcccagcgacacacccggcaccagcaacatggacttcgcgatcttcccgccgcgctggctggtggcgcagaacacgttccgcccgccgtggttccaccgcaacatcgccagcgagttcatgggcctggtgcatggtgcctacgatgccaaggccgaaggcttcgtgccgggtggcgcatcgctgcacaactgcatgagcggtcacggcccggatgcgccgaccttcgacaaggcctccaatgccgatctgtccaaggccgatgtgatcaaggacacgatggccttcatgttcgagacccgcgcggtgatccgtccgaccgcgcaggcgctggccgccggccatcgccagggcgattaccagcagtgctggaacggcctgcgcaacaactaccgctga

SEQ ID NO: 495745 - DNA, 1113 bp, Stenotrophomonas maltophilia
atgaataccgcagtcccgaccgcctcgcatcccaatcccggcatgcaggtcaccaccttcgagaacccgatgggcatcgacggcttcgagttcgtcgaattcgccgccccggccggccgtggccaggagctgcacgagtacttccggaagatgggcttcagcgcggtgctcaagcacaagcagcgtccgattaccgtctatcgccagggcgacgtcaacttcctggtcaacgaagaccccgattcgttcgccgccgacttcgccgaaaagcatggcccctgcgcctgtggctttgccatccgcttcaagaagccgggccaggaggtctaccagaccgcgctgggcaacggcgccgaagccatcgccttcaagccggacagcaaggcggtcagcgcgccggtcatcaagggcatcggcgactgcatgctttacctggtcgaccgctatggcagcgccggcagcatctacgacggcgactacgagccgatcgcaggggccgacctgcacccgttcggcttcggcctgaccttcatcgaccacctgacccacaacctgtacttcggcaacatgcagcagtggtcggactactacgagcgcctgttcaacttccgcgagatccgctacttcgacatcaagggcctgaagaccggcctggtgtccaaggcgatgaccgcaccggacggcatcgtgcgcatcccgctgaacgaatcgtccgacccgaagagccagatcaacgagtacctggacgcgtacaagggcgagggcatccagcacatcgcctgcttcaccgagaacatctacgagaccgtcgaagcgatgcgcgcgcagggcgtggatttcctcgacacgccggaaacctatttcgacgtgatcgaccagcgcgtgccgaaccacggtgaagacgtggcgcgcctggccaggaacaagatcctgatcgacgccgatccggaaacccaccagcgcaagctgctgcagatcttcacccagaactgcatcggcccgatcttcttcgagatcatccagcgcaagggcaacgaaggcttcggcgaaggcaacttcaccgcgctgtttgaaagcatcgagcgcgaccagatccgccgcggcgtgctgtaa

SEQ ID NO: 495746 - DNA, 558 bp, Stenotrophomonas maltophilia
atgcagggtctggacccaccccttatagttacacttgaaaccaccagcaaggtgcaccgcaacatgagccccgccgatcccgtttcgacccgcctgcgtgcctcgcacgtcctgctcgacctggaacagttcctgccgtaccggctgagcgtgctgtccaaccgggtcagcggcaacatcgccaagctgtacggcgatcgttacggtctggcgatccccgagtggcgggtcatcaccatcctggcgctgtacccgggctcctcggccagcgaggtctccgaccgcacggcgatggacaaggtggcggtcagccgcgccgtggcccgcctgctggagcgcggcttcatcaagcgagagacccacggcgacgatcgccgccgctcggtgctggcgctgtcggctgccggtttcgaggtgtacgagaccatcgcgccgatggtgatcgagatcacccgcaagctgatgtcggtgctgagcgaagaggaagagcaggtgctggaaaagctgatcctgcgcctggccggcgaaggcctggagcggatgggcgaaggcgtctga

SEQ ID NO: 495747 - DNA, 1140 bp, Stenotrophomonas maltophilia
atgcacagcgaccacgccgaacgattgcccgaacccgccagcgacctggccgagggtggggcaggcgagggcgtgaccctgccgccgcaggaagcgctgctggatgacgccggtaccggcgaggacagcgtcgacctggcgccgccacgccatcgcctgccgcagatcgcgctgcccgacaacgtggtgctgaagggggcggtgcagaagctggtcgagcagaagtcccggcttgatgcgctggccgctgaaggccagctggccgggctgctgccgcccgaatggcagggccacggcgcgcgcgcgatcgagctgtccaccttcatccagggcgtgctgcccttcctgcagaccggcgagcgtggcgagaccgcccccgcgcgactgccggtgcgccatgtgttgggtgacgacagccgctggggcctggacgatgtggccgaaccgaaatcactggcgtggtatctggccagtgacgagcgcgccacggccggcagcaaggacgtcgccgaggcgtatctggtgggcgcactgggcctggcgtggatgcaggaaggtcgcagccgccccggcttcctgcgcgcgatgggccaggacagcctggccgcgcgggtgaccatgctcggctatccgccggccaacgaactggcgctgtacagcgtcactgcgcacggccagccgcagatctggtgcgtgcacgggcgccgccgcatgcgcccgctggtggcgccgtggttgagcgtgccgctgctgaccgcctacggcgtgccggcgccggttgcatggccgtccagcttcccgccggtggaagcggtggcagagctgctggcgaccgcccgcctggggcgcgcgctgccggaagtggacctggccaaggccgtggcgaagatcgccgaggacgccgcctctgacgcctggcagccggtcagcctgctgcagctcaacacctggtcaccgcgctggcacttcttcctgggcaccttcgtcggcctgccgtcgttgctgctggtggcggcggcgctggcgctgccgggggcggtcgaagcagcgacggtggccgcatcgctgggcttcgccggcggcgccatcgcagcactggccgtgccgtggatccacgcacgccgcaagcacctcagctga

SEQ ID NO: 495748 - DNA, 606 bp, Stenotrophomonas maltophilia
atgcgcagcaagctcggtggtgcaatggtggtggtctgtgcggcgctgatcggcgcctgttcgcaaccgcaaccgcctgccgccgccgagcccacgcagcccctggatacccgacccaccgagccaccggttgctgaccccagcgaaccggtggcctcgggcaacaccccggtggcggcggacatcgccgccatcgccgggctcggcgcgcagttcgacccggcccgcaaccccgccgacgacctggccaccgccaaggtggaagcccagcgtggcaagaagcggatcctgctggaggtcggcaacgccgcctgtgagcgctgccgggcgctggacgacgtggtggaaggcaacggcgacctgcgtcgcttccgcgatgcccactacgtgtgggtgaaggtcaacgccagcgacgagcagcccaacaccgccttcttcgcccagtacccggtgatggcgcgcgactacccgtacctgctggtgcttgatgcagatggcggcctgctggtatcgcaggccaccggcgagctgcgcaggggcgaggcgttccagcctgcgcgggtgagcgccttcctcaagcagtgggcgcctgacaaaccggaatag

SEQ ID NO: 495749 - DNA, 1500 bp, Stenotrophomonas maltophilia
atgagcgtaaacgccactgcgaacaccccagagccggcgctgccggacttcaagaccacgctgggccacccgcgcccgttgtggatgctgttcatgaccgagttctgggagcgctttgcgttctacggcatccgctgggcgttggtgctgtacatcgtcgcccagttctacaacggcagcgctgccggtgaaggcgacgccagccgcatctatggcgcctacctggccctggtatacgccgcggcgatcttcggtggctacgtggccgaccgggtactgggctaccagcgctcgatcctgaccggcgcgatcatcatggccgccggcctgttcatgatctcgctgccgcaggagcacatcttcaagcttggcctggccacgatcatcgtaggcaacggcctgttcaagcccaacatctcgaccatggtcggcaagctgtacggcctgaaggacgagcgccgcgactccggcttcaccatcttctacatgggcatcaacatcggcgcgatgatcgccccggtgctgaccgagtacctggcccgcaaggtgttcggtaccgacgcgatgccgtcctacaaggtcgtgttcatcgcctctggcgtgggcatgctgatctcgctggtgtggttctacatcggtcgcgccggcctgaagggcatcggtgcaccgccggccggcgctgaaggcttcggccgcatcatcatggtgctggccggtgccgtggtcgccatcccggtggcgtacttcctgctggctaccggcgccaccgcgctggcctggatcctgggtgcgatgttcaccgcgctggccgtcctgctgctggtcgagggcatccgcgaaggcaaggtgcagcgcgaccgcgtgatcgccatgctgatcatcttcgccttcaacgtgatgttctggatgttcttcgaacaggccggcagctcgttcaccttcctggccgagaacatcgtcaaccgccagttcggtgactggaccttcccgaccgcgtggttccagtcggtcaactcggtggccatcatcaccctggcaccggtcatcgcctggatctgggtggccatgggccgcgccaatccgtccatcccgcgcaagttcggcctgggcctgctgttcaacggcgccgccttcgccctgctgatgttcgccctgtcgcagatggtcgttgacggcaagatcccgttctggaccctgttcatggtctacgtcatccagtccgtgggtgagctgtgcctgtcgccgatcggcctgtcgatggtgaccaagctggccccggtgcgcctggtcggcttcggcatgggtggctggttcctgtccaccggcatcggcaacaacctgtcgggcatcttcgccggcgtggtcagtggtgaaggcggcatgacggtcgagtcggccctgaaggggtataccttcgggttctgggccctgatcggctccggcgtggtgctgttcctgatcgccccgctgatcaacaagctgatgcacggcgtcaagtaa

SEQ ID NO: 495750 - DNA, 876 bp, Stenotrophomonas maltophilia
atgtccgtcgacaacaaccaacgcgatctcgaagccggcatccacaccgacctgcagggaagcctgacctacggcggctacctgcggctggaccagctgctcagcgcgcagcagccgctgtccaacccgccgcaccacgatgagatgctcttcatcatccagcaccagacctcggagctgtggctgaagctgctcggccacgaactgcgtgcggcgatcggcttcctgcagcgcgatgaagtctggcagtgccgcaaggtgctggcgcgcagcaagcaggtgctgcgccagctgaccgagcagtggtcggtgctggaaacgctgaccccgtccgaatacatgggtttccgcgacgtgctgggcccatcgtcgggcttccagtcgctgcagtaccgctacatcgagttcctgctgggcaacaagaacgcgcagatgctgcaggtgttcgagcacgacccggccgggcaggcgcagctgcgcaccgtgctggaggcgccgagcctgtacgaggaattcctgaagtacctggcccgcttcggccatgccgtgccggcggtctacgaggcccacgactggacccagccgcacgtggctgacgacgcattgcagccggtcttcgaacgcatctaccaggacaccgatcgctactggcgcgagtacgcgctgtgcgaggacctggtggacctggagaccgccttccagctgtggcgattccgacacatgcgcacggtgatgcgcgtgatcggcttcaagcgcggcaccggcggctcgtccggcgtgggcttcctggccaaggcgctggagctgaccttcttccccgaactgttccaggtgcgcaccagcctgcaggcggcacccccggcagaactgggctga

SEQ ID NO: 495751 - DNA, 1083 bp, Stenotrophomonas maltophilia
atgacggttgccgctgaattcaagatcgaatacctgcagtacctggatacggacggcaaactcgtccgcgatgacctgcccgcgtcgctgcgcgacccccaggtcctggtaccgctgttcaagcagatgctgttcgtacgtacgttcgacagcaaatccatcgcactgcagcgcaccggcaagctgggcacctatgccgcctgcctgggccacgaagccgcgcacgtgggtatcggcgcggcgatgcagaaggacgacgtgttcgcgccttcgtaccgcgagtatggcgcgatgttcatgcgtggcgtgcgcccgcacgacgtgctgatgtactggggcggcgacgaacgcggcaacgattacggcggcaacgcggccaaggacttcccgttctgcgtgccgatctccacccagtgcctgcatgccgcaggcgccgcgctgaagttcaagctcaacaaggaaccgcagatcgccgtggcggtgtgcggcgacggcggcagctccaagaccgacttctacgcggcactgaattcggccggcgcctacaagctcccgctgatcctgtgcatcgtcaacaacggctgggccatctcggtcccgcgttcggcccagaccggtgccgaaacgctggcgcagaagggcctggctggcggcctgcactgcctgcaggtggacggcaacgacctgatcgccgtgctggctgccatggagcaggcgcgcgaacgtgcgctggccggcgacggtggcaccgtgctggaactgatgacttaccgcctgtccgaccacaccaccgccgatgacgcgcgccgctaccgcgacgatgctgaagtgaaggatgcctggcagcgcgagccgatgctgcgcctgcgcaagtacctgatcaacgccggtgtgtggagcgaggatgaggaaagcgcctgggtcgccgagtgcggcaagcgcgtggacgaggaagtgaacctgtacctcaacacgccggtgcagccggtcgaggcgatgttcgacttcctgtatgccgatccgccgccggacctgctggcccagcgtgcccaggcgatcgccctggagaagcgccatggatga

SEQ ID NO: 495752 - DNA, 1068 bp, Stenotrophomonas maltophilia
atggatgagatcaagaacggcgcgcccggcgcgcacaccaacgccgccgacagcgctgcggtcgcgcgcggagaagagagcatgaccaccaccccgatcaccctcatcgaagccatcacccaggcgctggcctgggagctggaacacgacccgtcggtgctggtgctgggcgaggacgtgggcgtcaacggcggcgtgttccgcgccaccgccgggctgcagcagcgcttcggctcggaccgcatcctcgataccccgctggacgaaaccaccatcgccggcctgaccatcggcctggccgcacagggcatgaagccggtggccgaagcccagttcgacggcttcatgtacccgatggtcgaccatatcgtctgccacgcggcacgcctgcgttaccgcacgcgtggccgcctgcactgcccgatggtgctgcgcgtgccgtggggcggtggcatccgcgcgccggaacaccacagcgaagccaacgaggcgatcttcaccaacgtgccgggcctgcgcgtggtgctgccgtcgtcgccgcagcgtgcctatggcctgctgctggccgcgatccgcgagccggatccggtgatctacatggagcccaagcgcatctaccgccagtacaaggaagtggtcgtcaacgacggcgaagccttgccgctggacgtctgcttcgtgctgcgcgacggcaccgacgtgaccctggtgacctggggcgcgcaggtgaaggaagcgctggaagcggcggacaagctggccggtgaaggcatcagtgccgaagtcatcgacgtggccacgctgcgtccgctggacttcgccaccatcgccgaatcggtggccaagaccggccgctgcgtgatcgtgcaggaggccccgaagaccgcgggcttcggcgccgagatcgccgcgcgcctggccgaggaatcgatctacgacctgctggccccggtcgagcgcgtcactggctacgacacccacattccgctgttccgcctggaaatgaagtacctgccgagcgttgagcggatcgtggctgcggccaagcgcgcggtggcggccggctga

SEQ ID NO: 495753 - DNA, 354 bp, Stenotrophomonas maltophilia
atgcgggcccgccttatgggggcttaccgtagccagtatcccaacccgctccggttccacaccggccagatcgtcgaagtaggtgtccgtgacgaggaatggccggcgtttgcctgggtacgcaccaacgatgggcgcgctggatgggcgcccatcgcctggttgcagctgctggacgagggtcgcgccgaagcgctgtgcgactacgacgcccgcgagctggatgtggaaagcggcgagatggtgaagcttcatcacgaacacggcgggtggtggtggtccgagcgcgccaatggcgcgacgggctggctgccggcccgcgaactggaactgctggaagagaactgcaaatga

SEQ ID NO: 495754 - DNA, 1389 bp, Stenotrophomonas maltophilia
atgagccagaccaagaacttcaacctgcccgacctgggcgaaggcctgccggacgcgaccatcgtcgagtggttcgtcaaggaaggcgatgtgatcaagctggacgagccgctggtgtcgatggagaccgccaaggccgtggtggaagtgccctcgccgttctccggcaaggtgctgaagctgtccggcggcgccggcgacatcatcccgaccggctcggtgctggccagcttcgaactggacccgaacctgccgcagcgagccgatggccaggacaccggccacagccatggccacgctgcaccggcggccgcaccgaccccgccgccgctgccggctgcggccgctccggttgccgccgaggaggccaagcccgccgcggccgagcgcgatgacgccggtaccgtggtcggcgcgatgcagagctccaatgccgtgcatgccgaacaggcgctggccgtcggtggcgtcaaggccgtgccggccgtgcgtgcgatggcgcgcaagctgggcgtggacctgagccgcgtggccgctaccggcaccgatggcgcggtgaccatggccgacgtcaagcaggctgccgccaacggcagcgccaagctcggcgctgctccggcaccggttgccgctgctgcctatgccgcgccggccccggcgcaggtgtctgcccccgtgcagagcgaagcccgcaccccgctgtccgccgccggcaagccgatgcgtacccagccgcccggcgtggtcgccaagggccagccggaaccgctgaagggcgtgcgccgcaacatggcccgcgtgatggccgatgcgcacagcaaggtcgtgccgaccacgctgaacgacgacgccgacatccatgcctggctgccgggcaacgacgtcaccgcccgcctggtgcgttcgatcgtggtcgccgcgcagaaggtgccggcgatgaacgcctggttcgacggtgaagcgctgacccgtaccctgcacgcgcaggtggacatcggcatcgccgtggacaccgacgacggcctgttcgtgccggccctgcgcaacgccgacatgctcgacgcacgcggcatccgcgaaggcgtcaaccgcctgcgcgagcaggtggaatcgcgttcgatcgcggcgtcggaactgagtggctacaccatctcgctgtccaacttcggcatgttcgccggccgctacgcgaccccggtcgtggtgccgccgtgcgtggccatcgtcggtgccggccgagcccgccaccagatgaccccggtgatgggcggcgtggaagcgcacaaggtgatcccgctgtcggtcaccttcgaccaccgcgcagccacgggtggtgaagctgcccgcttcctgcgcgcgatgatggacgacctggcactggccagctga

SEQ ID NO: 495755 - DNA, 387 bp, Stenotrophomonas maltophilia
atgttcacgcccagcaccctgctgcagtacgtgcgcgacgtcgccaccagcgccaccttctacagcggcatcctcggcaaaccgccggtcgagcagtcgcctggcttcgccctgttcctgctcggcgatggcgccgcactcggcctgtggcaacgtgacggcgtgcaaccgccggtgtctgcgcaggctggcgccgccgaactggcgatggtggtcgcaaaccccgaggccgtgcagcagatgcacgatgcgtggcgtgggctcggcgtgcagatcctgcagtcgccggtgacgctggagttcggccacaccttcgtcggtgccgaccctgatggccaccggctgcgtgtgtacagccgcgccgaaggcatggtcgcgcgcgattga

SEQ ID NO: 495756 - DNA, 708 bp, Stenotrophomonas maltophilia
atgtcgcgtgcgctgcgcctgacccagctccaacagctgctgcgccgccatcggcggccggtggccggccaggtgctggccgacgcgctgggagtcagcctgcgcacgctgtaccgcgatatcgaaaccctgcgcgagcagggcgccgacctgcgcggcgaggccggcgtcggctaccagctgacgccgagcgataccctgccgccgatgaccctgccaccggccgagatcgacgcactggtgctgggcctgcgctgggttgcggcccgtaccgaacccgcgttggccgaagccgcacgcgatgccctggcgcgcatcgcccatgtgttgcccgcagcgcggcgcgaggccctgcgtgacagtggcctgcgggtgggcccttcgcgtgcggcggccaaggttccccctgctcgtctgcaggccgtgcgagaggctgtcggttcacagcagcgcctgaagttcggctacgaggacgcgcacggccagcgcagcgagcgcatcgtctggccgttcgcgctgggctacttcgatgaggtgccgatgctggcggcgtggtgtgagcgccgcgaggattttcgccatttccgcctggatcgcatccgccaggtgcgcgtgctggaggagcactacctcgtaccacgcgccacgctgctgcggcgctggcagaaggcgcagggcatcgcgccggactggctggaccgttcgtag

SEQ ID NO: 495757 - DNA, 636 bp, Stenotrophomonas maltophilia
atgcgcgtgatgttgctgggggcgaccggcctggtcggtgggctgaccctgccccggctgcttgacgacccgcgctgcagcgccgtgatcgccccgacccgtcgcccgttgggcgcagcccacgggaagctggagaacccggtactggccttcgatgcgctgcctgccgcagccgggtgggcgggcgtggacgcggtcatctgcgcgctcggcagcaccattgcccaggctggcagccgcgaggccttccatcgcatcgaccatgattacccgctggcgttcgcccgtctggcgcaggcgcagggtgcgcagacctatgtgctgaattccgcagccggtgccgatccgcggtcgtcgatcttctacagccgggtgaagggtgaattggagcgcgatctgcgcgcgctgggcttcacctcgttgaccctggtccgcccagggttgatcggtggcgagcgcaacgaggtgcggcgcggtgagcgtctcgcgctgaaggtgctgggcgtgctggggccggcactgccacgggcgtggcggatcaacccggcgagcgagatcgccaaggcgctggtcgaggccgcgctggccccgcaaccgggtgagcacgtggtggcatcgagcgcactggccggctga

SEQ ID NO: 495758 - DNA, 1539 bp, Stenotrophomonas maltophilia
atgacggaccagcccgaccaccaccctgcccccggtaccgcccttgggccgccggcacgcgtgcgcgcggtggtggacgatgggctgggcgaccgcgtggtgctgcagggcggcggtggcgtggcgctgcagcagctgttcgccggtgccgacgcgccggaaccgctgctggccgcgttcgccaacggcatggccaccctgcccggcgagctgggcgacatgggcgaccgcctgcagtcggcgcaggccagtgccgattggccgcgctacgggcgcgcgatgcgccagttgatcgacaaatacatccgcaccatcgaacagcattcgccggatgggcaacccgaaagcctgcgcctgtccgagcagctgcggctgctgctgggcggcgcggtggtggcgctgctgcagcacgacccggacctgcgcgaacaggcgcaggcactggccatgcacctgcgccagtggcagccaggcacggcgctggaaccgatcgagcagggcgtgcgcgaacttggccaccaggtcggcgtgcgtgccgagagctggcaggagcagcaggcactgctgctggagctgttcgcgctgctgctggagaacgtgagcgagctgctggatgaccgcagctggctgcagggccagatcgccgcggtacgccagctgctggacgggccgttggaagctgaggcggtcgagcgcacccgcgccgaactgcgcgaagtgatctacaagcagggcctgctgcgccagggcatcgacgattcgaaggcggcgatgcgcgggctgatgggcgagttcatcgagcgcatggatggcatggccaccagcaccggcgagtaccacgatcgcatcggcagctacgcactgcagctgcgcgaggcgcgcagcatcgccgacctcaaccagctgctgcaggacgtgatgcgcgacaccggcaaggtgcagcagcaggccgcgcaggcgcgcgatcacctggccaacgcacggcaggaagtggagcgtgccgagcagcgcatcgccgagctggagcaggaactgcgcgcggccggtgacctggcacgcatcgatccactgacccaggcgctgaaccgccgcggcctggacgaactgctgcaacgcgagctggcccgtgccgcacgcaacaactcgccgctgggcgtggcggtgatcgatctggatgatttccaccagaccaacgatgcacatggtcatgccggtggcgatgcactgctgcagcacctggtggccgtctgcaagctgctgctgcgcgccaccgatggcatcgcgcggctgggcggcgacgagttcgtactggtgctgccggaaacccagggcgccgacagcatggccacggtgcagcgccttcagcgttcactggcgcatcgcgtgctgaccgtgcaggaccggcgcgtaccggtgcatttcagtgccgggctggcgcaatggcaacccggcgacgacaccgaggccctgctgcgccgtgcggatgacgcgttgtatgcggccaagcgacagggcaagaaccgcgtgcaggcaggctga

SEQ ID NO: 495759 - DNA, 927 bp, Stenotrophomonas maltophilia
atggccggtgccagcctgttcgccctgctcgacgatatcgccaccctgctcgacgatgtctcggtgctgaccaaggtcgccgcgaagaagaccgccggcgtgctcggtgacgatctggcgctgaacgcgcagcaggtcaccggggtcaacgccaaccgcgaactgccggtggtgtgggcggtggccaagggctcgctggtcaacaaggtgatcctggtgccggcggccctggcgatcagtgcgctggaaacctggctgcacagccgcggctggaacgtgcccctgatcgtgccgctgatgatgatcggtggtgccttcctgtgcttcgagggcgtggagaagctggcgcaccgcttcctgcattcggccgacgacgatgccgagcgccagaccgaacgccgcaaggcgctggccgacgcgcaggtggacatggtcgcgtgggagaaggacaaggtgaagggtgcgatccgcaccgacttcatcctttcggccgagatcatcgtactgaccctgggcgtggtcgccaccgcatcgttcaccaaccagctggtcacgctggccgtggttgcactggcgatgacggtcttcgtctatgggctggtggcgggcatcgtcaagctggatgacgtgggcctgtacctgtcgcgcaagggtggggctgttgccgccttcggtcgcggcctggtcgcgtcggcaccgtggctgatgaagttcctttcggtggccggcaccattgccatgttcctggtcggcggcggcatcctggtgcacaacgtgccggcgctgcaccacgcagtacaggcgctgggcggcgagggccagtggggctggctggtcagcgcggcgggcaacatggtggtgggcatcatcgccggcgccatcgtgctggcggcggtgaccgggttccagaagctgcgcggcaagtag

SEQ ID NO: 495760 - DNA, 1692 bp, Stenotrophomonas maltophilia
ttgagcaatccgtccgccgccaatggcaatcccccgctggtcaaaggcatgagccggcgcagccagatcctgcgcctgctgatgcgctaccgccattcgggcgtgttctcgggcatgaacctggatgcggcaagcaaccaggccgacgtgcccgccgacggcaatccggaacagttcgtcagcgacctggaagcgttggggccgaccttcgtcaagctgggccagatgctgtccacgcggccggacatggtgccggtggagttcgccacggcgctggagcgcatgcaggagaaggtggcgccgatcccggtcgagcgcatccacgcgatcatcgagcaggaactgggcgtaggggtgaacaagctgtttgcctcgttcgatcccgagccgttgggctgtgcttcgatcgcgcaggtacatcgcgcggtgctgcacgatggccgccaggtggcggtgaaagtgcagaagcccgaagtggccgcacagctgcgctcggacctggaggcactgcgcagcttcgcgctggccgccgaccacctgacccaggtgggtcgccgcgtgcggttgcgcgactggctcaacgagttcgccaagaccctgatgcaggagctggactaccacgccgaggccgagaacctggcgcgcttcggacggcacctccggccgttccgccggctgtgggtgccgcaaccgatctgggactacagcagccagcgcgtgctgacgatggagcttgccaccggcgtgcgcgtggatgcgatctccggcgtacgccgcaccgagcaggacatggacccgttggcggcggcgctgatccgcggctacctggaccagatcttcgtgcatggcgagatccatgcagacccgcacccgggcaacctgcgggtgatgcccgacggccggctggcgatcttcgacctgggcatggtcgcgcacatgccgccgcgcctgcgcgagcgtctgctgaagatcctgttcgcggcggtcgacggccgtggcgaggaagtggccgatgacctgatcagtatcagcacgcggctggaggccttcgatgaagagcgctacctgcgcgaaaccggtcagctgatcgcgcgctatgcggccagtggcagcttctccgaaggccgcgtggtgctggacatggtgcgcatcgccaccgcctgcggcctgcgcacgccgccggaactgagcctgctcggcaaggccctgctcaacctggaaaccgtgtgccggctgctggcgccagagctggacacgcgccgcatcgtcgagcgccagctgcagcacgtgatgcgtgcgcgcctgaagaagtcgctgtctgcagccaacatcgccagcgaggcgatggagctgcagcagctgctgcgtgatgggccgcgcaagctgtcggacatcatggcgctgctggccgagaaccgcctgcagatgaaggtcaccggcctggaagaatcgcggctgatggagaacctgcagaagatcgccaaccgcgtggcggccggcatcatcagcgccgcattgatcatggccgccgcgatgatgatgaggatcgacaccggctggcacctgttcggttacccgctcatcgccctgatcctgttgttcatcggcgtggtgctcggcctgggcatcgtaaccagtgcattgctgttcgaccgtcgtgcgcgggcacgcgaagaacgcgggcatcgctag

SEQ ID NO: 495761 - DNA, 2193 bp, Stenotrophomonas maltophilia
atgcatgtgcttgcggcagcgccggtcggatggacacgcgtcggtacgacgtccatcaccaccaccccgtcactgccgaagctgcctatgctctggatactgctgctgtcgttgttgctgttgtgctggttgttcctcgcgtccgacaagtgggtgtggtggaaggccggcgcgttctcgctgctgctgctcatgctcagcgcgtggtggctgatcgacaagctgtccggtgatgggctcaatgccgccaccctgtaccacctcggcgccgacatggaaggtgccggtgtctccgacttcaagggctacatcgccggcttcgtcgtgttggcgctggtctcgctgctgccactgttcgccacacgggtgaagcgctggcgccggcccggccacggtggcgcgttgttcgccggtttcgcggccgtgtgggtggccacgatcatgatcagcccgctggcccgtgacggccagcgcctgtaccagcagctgcgcccggtcgacttcgcccgcatcgcccctgagtaccaggtgccgacgcagccgctgcagcgcccgcgcaacatcgtctggatctacggcgaaagcctggaacgcacctatctggacgaggccgtgtttcccggcctgatgcccaacctcaaccgcttggcgtccgagtcgctggacgtgcgtgggctggcctcggccgaaggcagcggctggaccatcgccggcctggtgtcgtcgatgtgcggcgtgccgctgaccacctcgcagggcgatgaaaacagcatggaccgcatgggcagcttcctgcccaaggcggtctgcctgggcgactacctgaagcagcagggctacaccaaccactatctggggggtgccaacggccagttcgccggcaagggccagttcctggccagccacggctttgatgaagtgcatgacctcgcttggttcaagcagcagaagaagatcggccgcatccactactcggcctggggcgtgcacgacgacgtgctgctggataccgcctaccagcgcttcgaacagctctcgcgcgccggttcaccgttcatgctgaccacgttgaccatggacacccaccacccggcgggccacctgccggtatcgtgcaagggcgagcgctaccagagccagtacggcaacatcaacatgctcaacgcgctcaagtgcagcgaccggctgatctcgcagcttgtgcagcgcatccaggccagcccgtacggcaaggacacgctgatcgtgatcgcctccgaccacctggcgatgcccaacgatctgacccacatcctgacccggcagaagcgcgagaacctgctgctgttcctgggcgatggcattgccccgcagcagctcagcgccgacgccggcaccaccctggattcgggtgcgaccctgctcagcctgctggacccgaacctgaagacgatgggctttggccgctcgctgatcgacagccaacgcgcacccagcgccagcgtggcggcccggcgcgatggtggccgcgactacccgcagtacctggccttcgcccgctcactgtggctgggcgaaccgacccgcgaactgaagatcgatggcgatgaccaggtggtggtcggcctgcagcacgtgcagccaccggtgctgctggagtacggcaaggactgggggctgaagtcggtctacctggagaacacctcgcgccagttcgatgacgcggatccggacaacacgctggcctatgttgatcgctgcaccgcattcgaggacggttcggccgacggcgactggtgtgcgctgctcgtcaaccgcgacaacggcatcaagctgtaccgcgacaatgacctgcgcggcggcatcgcggtcgatgcaccgctggacgcattccagggcccgcgcccgagcgtgcgccaggcgcacatgatcacccagaagggccgccgcacccgtgccggccagtacatgctgcagctggtggcgagcacgcgcccggatcgcggtttctggatcgaggcggtgtcctcgcagcgcaaggtggtgctggcccagcagtgggtgcagcccgatgccgacggcaagatcaacgtgtcgttcgggctggaccacgaagtggatgatctggagatccgcgcgtggttgaaccatgccgagaagctggcggtggatacgttcgcactggtgccctcgcgcagccgaccacggggatag

SEQ ID NO: 495762 - DNA, 762 bp, Stenotrophomonas maltophilia
atgagcgaatccccctacaaagccggtaccacccatttcgggttccgcgacgtcgccgccaaggacaagcagaagctggtcggccaggtcttcacctcggtcgcgcgcaactacgacctgatgaacgacctgatgagcctgggcgtgcaccgggcgtggaagcgctactacgtggccaccgcgcaggtgaagccgggcgaccgcgtgctcgacctggccggcggcaccggcgacatcgccgccctgctgaaggagcgcgtcggcgccgagggctcggtggtgctgggcgacatcaacgccggcatgctgtcggtcggccgtgaccgcctgaccaaccgcggcctcgtgctcggcctggactacgtgcagtgcaacgccgaagccctgccgttcccggacaacagcttcgatctggtcaccattgccttcggcctgcgcaacgtgaccgacaaggacgctggcctgcgcgagatgtaccgcgtgctgaaggtgggcggccaggcccgcgtgctggaattctccgaagtcaccgcggactggttcaagccgatctacgacttccactcgttcaagatcctgcccaagctgggcaagctgttcgccaacgattcggacagctaccagtacctggccgagagcatccgcaagcacccgccgcaggacgaactgaaggcgatgatggggcaggccggcttcgagcgctgccactacaagaacctgaccggcggcatcgtctcgatccactccggctacaagctgtaa

SEQ ID NO: 495763 - DNA, 453 bp, Stenotrophomonas maltophilia
atgatcaccacgcccgactaccaggccctgctgcagaccgccatcgccgaagcccgccagggcctggccgagggcggcgtgccgatcggcgcggcgctgtaccacaacgacggccgcctgctcggctgcggccacaaccgccgcgtgcaggaaggcgacccgtcggtgcatggggaaaccgacgccttccgcaaggccggccgccagcgccgttaccaggacaccatcatggtcaccaccctggccccgtgctggtactgctcgggcctggtgcgccagttcaacatcggcaccgtggtggtgggcgaatcgcgcaccttccagggcggcatcgactggctgcgcgaaaacggcgtcaacgtgatcgacctggacaaccaggaatgcgtggacctgctgggcgatttcatcagccgtcatcccgacatctggaacgaggacatcggcgaatga

SEQ ID NO: 495764 - DNA, 261 bp, Stenotrophomonas maltophilia
atgtgcgcgcacgccgtacgccctacgacagacccgatcctcgatccgatccgcgaacgcttgcagcagcaatatgcgctgcaccggcgcggcgcgccgttctggactgcctatcagcacatgcaactggagctggtccgccgccacccgctcgaccacgaacgcctgtgcaatgcgatggccactctggccgaagacctcggtgcggtcgaacatgcgcagttgatcggccatgccaacgcaggctccacatcccgctga

SEQ ID NO: 495765 - DNA, 336 bp, Stenotrophomonas maltophilia
atgcacgctgaagtccccaccattcctccggtcatcaacgttgacgccgagcttgaccactggcgccgccaacatgccgaaggcgcactgccgcacaactcgttcggctcgtacgtgccgtggatcaagttcgcctgtgattcgctgatcacccagccgcgcgccagcgaggccgaacgtgacgagatgttccagacccaatacgccctgcagatcatgccgcggctgagcgaagcccaggcccgtgagttcgtcgaccgttgctggcagcacgtctaccagagcagcccggtgcgcagcctgcaggcgccacgactgcagcgcatgcgcgcctga

SEQ ID NO: 495766 - DNA, 423 bp, Stenotrophomonas maltophilia
atgaaagcacgcaacctgttcaatacgatcgccaagaaggccgcggccgccaccggctcgccgtggaccttcctggctgcagtagcgatcgtggtgatctggggcatcagtggcccggtgttcggtttcaacgacacctggcagctggtgatcaacaccggcaccaccatcatcaccttcctgatggtgttcctgatccagcacacgcagaacgcggatactgccgcgatgcagatcaagctggacgagctgatccgggcgacggccgaagccaacaacgaactgttggatctggaagaactggatgaagcgcgcctggaagagatccgcgccgagtacgagcagatggcgcgcgaagccggcgatgcgctggcgcgcgttcgcgcctgccatgcggcgcgacgcgacgatgaagcggtatag

SEQ ID NO: 495767 - DNA, 1386 bp, Stenotrophomonas maltophilia
atgaaaagtgcatccctgttcctctccattgccgccacgctcgcgctggccggctgctccaccctggcgccgaagaacaccgccgtcgctccggcgattcctgcgcagtggccggccgaggccgcgcagggcgaggtggccgatgtcgccgccgtcggctggcgcgatttcttcaccgatgcgcgcctgcagcaggtgatcgagcagtcgctgcagaacaaccgcgacctgcgcgtggccgtgctcaatgtcgagcgcgcgcgtggccagtaccgcgtgcagcgcgccgatcgcgtgcccggcgtggccgtgaccggccagatggaccgccgtggtaccgatgccggtgtcaccgagcagttcagcgcgggcgtgggtgtggccgagttcgagctggacctgttcggtcgcgtgcgcaacctcagcgaggcggcgctgcagcagtacttcgccgtggctgccaaccgccgcaacgcgcagctgagcctggtggccgagaccgccaccgcgtggctgacctatggggctgatgcgcagcggctgaagatcgccgatgccacgctgaagacctacgaggattcgctgcgcctggccgaggcccgccacgaacgcggcggcagttcggcgctggagctgacccagacccgtaccctggtcgagaccgcacgcaccgatgccgcgcgcctgcgcggccagctggcccaggaccgcaacgcactggcgctgctggccggtggccagctcgatccggcactgctgccggacagcatcgaaccgcagctgctggcgctggccccgccgccggccggcctgcccagcgacgtgctgctgcagcgcccggacatcatggccgccgaacaccagctgctggccgccaatgccaacatcggtgcggcacgcgcagcgttcttcccgagcatctcgctgaccggcagcatcggcagcggctccagcgaactgtccaacctgttcgacagcggcacccgtgtgtggagcttcctgccgaagatcaccctgccgatcttccagggcggcaagctgcgcgccaacctggccatcgccaacgcggatcgtgatatcgcactggcgcagtacgagaagtcgatccaggtgggattccgcgaaacggccgatgcgctggcgttgaatgtcagcctggatgagcaggtgagttcacagcagcgcctggtggaagcggccgaacaggccaatcgcctgtcgcaggcacgctacgacgcggggctggacagctttgtcaccctgcttgacgcgcggcgtaccgcctacaacgcgcagcagacccagctgcaggcgcagctggcgcagcaggccaaccgcatcaccctgtacaaggtgctgggcggcggctggcacgagcgcgggtaa

SEQ ID NO: 495768 - DNA, 3123 bp, Stenotrophomonas maltophilia
atggcacgctttttcatcgatcgacccatctttgcgtgggtgatcgccatcatcatcatgctcgccggcggcctggcgctgttcaagctgccggtctcgatgtaccccaacgtcgcaccgccggcggtggaaatcagtgccacctacccgggtgcatcggccaaggtggtcgaggactcggtgacgcagatcatcgagcagaacatgaagggccttgatggcctgatctacttctcctccaacagctcgtccaacggccaggccaccatcaccctgaccttcgagagcggcaccaacccggatatcgcccaggtgcaggtgcagaacaagctgcagctggccatgccgctgctgccgcaggaagtgcagcggcagggcatcaacgtggccaagtccagctcgggcttcctgaacgtcatcgcgttcgtgtccgagaacggcagcatggacgccaacgacatcgccgactacgtcggttccaatgtcgtcgaccgcctgagccgcgtgccgggcgtgggcaacatccaggtgttcggtggcaagtacgccatgcgcatctggctggacccgaacaagctgcatacctatggcctgtcggtgccggaagtgaccgccgcgatcaaggcgcagaacgcccaggtggcgatcggccagctcggcggtgcgccgtcggtgaagggccagcagctcaacgccaccatcaacgcgcagtcgcgcctgcagaccccggaacagttccgaaacatcatcgtgcgcggtgcgcaggacggtgccgagctgcgcctgggtgatgtcgcccgcgtcgagctgggtgccgagtcgtacgacttcgtcacccgctacaacggccagccggccagtggcctggcggtcaccctggccaccggcgccaacgcgctggataccgcggccggtgtggatgccgcgctggaagacatgaagggcttcttcccggccggcctgaaggccgagatcccgtacgacaccaccccgttcgtgcgcgtgtcgatcaagggcgtggtgcagaccctgatcgaagcgatcgtgctggtgttcgtggtgatgtacctgttcctgcagaacttccgcgccaccctgatcccgaccatcgccgtgccggtggtgctgctgggtaccttcggcgtgctggcgatgctgggcttctcggtgaacatgctgaccatgttcgcgatggtgctggcgatcggcctgctggtggacgatgccatcgtggtggtggagaacgtcgagcgcatcatgtccgaggaagggctgtcgccgctcgaagcaacccgcaagtcgatgggccagatcaccggtgcgctggtgggtatcggcctggtgctgtcggcggtgttcgtgccgatggccttcatgagcggctccaccggcgtgatctatcgccagttctcggccacgattgtctctgcgatggcgttgtcggtgctggtggcgatcgtgctgaccccggcactgtgcgcgaccatgctcaagccgctgaagaagggtgagcaccacgtcgcccaccgtggcctggccggtcgcttcttcaatggcttcaaccgtggcttcgaccgcaccagcgaaagctaccagcgcggcgtgcgcggcatcatccaccgtccgtggcgcttcatgggcatcgtggcggcgctgttcgtgctgatgggcgtgctgttcgtgcgcctgcccagctcgttcctgcccaacgaagaccagggtgtgctgatggcgctggtgcaggcgccggtcggtgccacccaggaacgcacgctggaatcgatcgcggcactggaaaaccacttcttgcagaacgagaaggatgcggtggactcggtgttctccgtgcagggcttcagcttcgccggcatgggccagaacgcgggcatggcgttcgtcaagctgaaggactggagcgagcgtgacgccgacaatggcgtgatgccgatcaccggccgtgcgatggcggccctgggccagatcaaggatgccttcatcttcgccttcccgccgccggccattccggagctggggaccgcctcgggctacaccttcttcctgaaggacaacagcggccagggccacgaggcactggtggccgcgcgcaaccagctgctcggcctggccgcaggcagcaagaagctggccaacgtacgcccgaacggccaggaagacacgccgcagttccgcatcgacatcgacgcggccaaggcgacctcgctggggctgtcgatcgaccagatcaacggcacgctggcggccgcgtggggcagctcgtacatcgatgacttcgtcgatcgtggccgcgtcaagcgcgtgttcgtgcaggccgaccaggcgttccgcatggtgccggaggacttcgatctctggtccgtgaagaacgacaagggtgagatggtgccgttcagcgccttcgctaccaagcactgggattacggttcgccgcgcctggaacgctacaacggtgtgtcggcaatggaaatccagggcgaaccggccccgggtgtcgcctccggtgatgccatggccgagatcgaacagctggccaagcagctgccggcgggtttcggcatcgaatggacggcgatgtcctaccaggaacgccaggccggctcgcagacgccgctgctgtacacgctgtcgctgatgatcgtgttcctgtgcctggccgcgatgtatgaaagctggagcgtaccgaccgcggtgctgctggcggccccgctgggtatcctcggcgcggtgctggccaacaccttcaagggcctggagcgcgacatctacttccaggtggcgatgctgaccacggtgggcctgaccagcaagaacgcgatcctgatcgtcgagttcgccaaggaaaacctggaaaagggcgccagcctgatcgagtcgatcatgcacgccgtgcgcgaccgcctgcgcccgatcgtgatgacctcgctggccttcggcatgggcgtggtaccgctggcgatctccaccggtgccggctccggcgccaagcaggcgatcggcaccggcgtgctcggcggcatgatcgtcggcaccgtgctcggcgtgttcttcgtgccgctgttcttcgtggtggtgcagcgcgtgttcaagcgcagatccacgacgtga

SEQ ID NO: 495769 - DNA, 1185 bp, Stenotrophomonas maltophilia
atgttgctgagccgaatccgaccctttgcactgtcgctggcaatcgccgcgaccgtggctgcctgcggcggccaaccccaggcccccgagcagggcccgggtgacgtcaccgtggtcacgctgaagtccgagaccgtgggcctgacccgcgaactgccgggccgtaccaatgccttcctggtcgccgaagtgcgcccgcaggtcaatggcatcgtggccaagcgcctgtttaccgagggcggcatggtcaaggccggcgagccgctgtaccagctcgacgatgccagctaccgggcccaggccaacaacgcccgcgcccagctggcccgcgccgaagccaccgccaatgccgcgcgcctgagtgccaagcgcatcaccgagctggccaaggtcgatgcggtcagccagcaggacctggagaacgccgtcgccgcgcagaagcaggccgaggccgacgtcggtgccgccaaggcctcgctggatgcggccaacgtcaccctgggctacgcccgcatcaccgcgccgatcagcggccgcatcggcaagtccagcgtcacccagggtgcgctggtcagcgccggccaggccaacgcactggccaccgtgcagcagctggacccgatctatgtcgacctgacccagtcctcggccgagctgctgcagctgcgccgcgaactggccgccggccgcctgcaggacaaccagaccctgccggtcagcatcctgatggaagacggcagcaccttcgagcacaagggcacgctggagttctccgaagtcagcgttgatccgaccaccggcagcttcggcctgcgcgtgaaggtggacaacccggacggcctgctgatgccgggcatgtacgtgcgtgcggtgatcggcggcggcgtgcgcagcgacgcggtgctggtgccgatgcagggcatcgcgcgcgatccgaagggcgacaccaccgcgatggtggtcggcaaggacaacaaggtcgaagtgcgcccggtcaaggtcagccgcacggtcggcgacaagtggctggtcgaggacggcctgaaggccggtgacaaggtcatcgtcgaaggcctgcagaagatcggccccggcatgccggtcaaggccaccgagaagggcgacgcaccggccaagccggcggcagccgcccagcctgccgccccggccggcgacgcgaagtaa

SEQ ID NO: 495770 - DNA, 660 bp, Stenotrophomonas maltophilia
atggcccgcaagaccaaagaggacacccaggcaacccgggaaggcatccttgacgccgccgaagcctgcttccatgaacacggcgtggcccgtaccacgctggagatgatcggtgcccgcgccggctacacccgtggcgcggtctactggcacttcaagaacaagagcgaggtgctggccgccatcgtcgagcgcgtgcacctgcccttcatgcaggaactggagcgcacctccaccgaccagcgcgacaccccggtgcacgacctgcgcgcggtgatgatccactcgttcatcgagctgtccgaggacgagcgcctgcgcaagaccatggagatcatgctgcgcagcgatgcgtcggcggacaccagggtgctgaccgaaatgcagcagcccggattccgcgatgcgctggaccggatggagcgtgccctgcgccgcgcccgcgatctgggccagctgcgcgagggcgccgacccgaaaatcgccgcgcgcatgctgcacgccaccgtgctgggcgtgctgcacggcgcgatggtcgaaccggacctgatggacctcaagcgcgacggcatgctcgctctggacatgaccctggccgcctacgtgaaggatggcgtgttcgttcccggcaccgtccccgagccgctgcccgaggcgtga

SEQ ID NO: 495771 - DNA, 993 bp, Stenotrophomonas maltophilia
atgatcctggacaacgtggtgtggggcttcatcggctgcggcagcgtcaccgagaagaagagcggtccggcgctcgccagtacgcccggctcgcgggtggcggcggtcatgcgccgcaatgccgcattggccgaagactatgcacgccgccacgcgattccgcgctggtacgcggacgccgatgcactcatcgccgatccggaggtgaacgcggtctacgttgcaacaccgccctccacgcacatgcactacgcattgcaggcgattgctgcgggcaagccggtctacatcgaaaagccgatggccatggaccacgacgagtgccagcgcatcatcgcggccagcgcccgcagcggcgtgcccgtgttcgtggcctactaccgccgtgccctgccccgcttcgcacaggtgaagcagctgctggacgacggcgcgatcggcacagtgcgcggcgtgcgcgccaccctgcaccggccgcattcagtggatgccgcatcgcctgacttctggcggaccaaccccgcgatcgccggcggcgggctgttcgtcgacctgggctcgcataccctggacctgctcgaccatctgctggggccgctgagcgatgtgcgtggcctggccagctcgttgaccggcgcctacgccgccgaggacagcgtctcgatgtgcttccgcaccgggacggggacacacggcatcgcgcaatggagcttctgcgcgttccgccgccaggatcagatcgagatcaccggcgaccgtgggcagctgcgctttgccaccttcgaggacgttccggtggagctggaaaccgaagcgggcgtgcaggccttcgacatcccgaacccgtcgtcgatccagcagccgttgatcgcctccctcgtggacgaactgcgcggcaacgggcactcgccctcgaacggcatcagcgccgcccgcaccagtgcagtgatcgaccaggtgctgcgggactaccgcacccggcaatcgcactga

SEQ ID NO: 495772 - DNA, 1374 bp, Stenotrophomonas maltophilia
atgtcgaagatcgaagtttcctccgccaccatgaccccgcgcgagatcgtgcaggaactggaccggcacatcgtcggccagcacgacgccaagcgcgccgtggccatcgccctgcgcaaccgctggcgccgcatgcagctggtgcccgagctgcgcaatgaagtgatgccgaagaacatcctgatgatcggcccgaccggcgtcggcaagaccgagatcgcgcgtcgcctggccacgctggccaacgcgccgttcgtgaaggtcgaagccacccgcttcaccgaagtcggctacgtcggcaaggacgtcgagcagatcatccgcgacctggccgataccgcggtcaagctctatcgcgaacaggccaaggtgcgcgtacgcacccaggccgaagagcgtgccgaagaccgcatcctggatgcgctgctgccgcgccgcagcggtggcatcggcttcgatccggaagtcgcccgcaacgagccgtcggcgcaggacaacgagacccgcatcaagttccgcaagatgctgcgcaacggtgagctggacgagcgcgagatcgaactcgacctggccgccaacgtcagcatggacatcatgaccccgccgggcatggaggaaatgggccagcagctgaagtcgatgttcgccaacctcggcggcggcgccaaggcgcacaagcgcacgctgaccatcaaggccgcgcgcccgctgctgatcgaggaagaagcgggcaagctggtcaacgaggacgacatccgcaccgccgcgatcgaggcctgcgagcagcacggcatcgtcttcatcgacgagatcgacaaggtcgccaagcgtggcgacaacgtgggtggtggtgacgtgtcgcgcgaaggcgtgcagcgcgacctgctgccgctggtggaaggctccaacgtgtccaccaagtacggcacgatcaagaccgaccacatcctgttcatcgcgtcgggcgcgttccacctggccaagcccagcgacctgattccggagttgcagggccgcttcccgatccgcgtggagctgggtgcgctgagcaagaacgatttcgtgcgcatcctgaccgaaccgaaggccgcgctgaccaagcagtacgaagcactgctggccaccgaaggcgtcaaggtcagcttcactgccgatgccattgatcgtctggccgagatcgctttccaggtgaacgagcgccaggaaaacatcggcgcgcgtcgcctgcatacggtgctggagcgcctgctggatacgctcagctacgaggcaccggaccgcgacggcgaaaccctggccatcgacagcgcctacgttgacaagcacctgggtgagctggtgcaggacccggacctgagccgctacatcctgtaa

SEQ ID NO: 495773 - DNA, 552 bp, Stenotrophomonas maltophilia
atggaccccagtcagaaccccaacgttttccacgccaccaccatcgtctgcgtccgtcgcggcgagcacgtggccattgccggcgacggccaggtcacgctgggccacaccgtgatgaagggcaacgcgcgcaaggtgcgccgcctcggccgtgatggccaggtgctggccggcttcgccggtgccgccgccgatgccttcaccctgttcgagctgttcgaggccaagctggaaaagcatggccagctgcagcgtgctgcggtcgaactggccaaggattggcgcaccgagcgccgcctcggcaagctggaagccctgttggcggtggccgacaaggaaacctcgctgatcatcagcggcaccggcgatgtgatcgaaccggaggacggcatcatcgccatcggctcgggtggttcgtatgcactgtcggccgcacgcgccttgatggcgcacaccgaactggatgcgcgcaccatcgccagtgaagcgatcggcatcgccggcgacatctgcatctacaccaaccgcaacgtggtggtcgaggagctgtga

SEQ ID NO: 495774 - DNA, 897 bp, Stenotrophomonas maltophilia
atgagcgcggtacaggccttcctgcagcacctgcaggtggagcggcggatgtcggcgcatacgctcgacgcctaccgccgcgacctggacgcgctgtcggcctgggccgagccgcgtggcgtggcggtggaggcactggatgccgaggcggtgcgccagttcgttgccgatgagcaccgccgtggcctgtcggccaagagcctgcagaggcgcctgtcggcctgccgaagcttctatgcctggctgctcaagcacgggcgcatcgaggtcagcccggcagcgacgctgaaggcaccgcgcgcaccgcgccgcttgccacaggtcctcgacgccgatgaggcggtgcagctggtcgagctggagccggagggtgagctcggccgccgtgaccgcgcgttgctggaactgttctattcctctggcctgcgcctgagcgaagtctgcgcgctgacctggcgcgatctggatttcgacagcgggttggtgaacgtgctgggcaagggcaaccgccagcgccgggtgccgttcggccggccggcgcgcgaagcgctgcaggcgtggcgcgcggaaagtggcggcggcccggcctcgccggtgttccccggccgcaacgggccgatcagccagcgcgcggtgcagatccgcatccgccagctggcgcagcgccagggcctgttcaagcacgtgcacccgcacatgctgcggcacagtttcgccagccacatcctggaatcgtccggcgacctgcgcggtgtgcaggagctgctgggccacgccgacatcgccaccacgcagatctatacccacctcgatttccagcacctggccaaggtctacgacgccgcgcatccgcgcgcgaagcgtcgacgcagcaacgagggcagcggagaaagctga

SEQ ID NO: 495775 - DNA, 675 bp, Stenotrophomonas maltophilia
atgaccgaaaccgtcgacaagctcggggcccatgaagtcgctgcctggttgcggcgtcatcccggcttcctcaagcagttcccggacctggccctgaccctggtggtgccgcgtgacgacggcccgaccgcgtcgctggccagctaccagctggaagtgctgcgcgagaagaaccgcgagctggcacgacggttggccgatctgggcgcgaccgcccaggtcaatgagcgcctggcggtgcgcacgcaccagctgaccctggcgctgatgaagcaggacaacgcggctgacaccctgcgcgcgatggccgcctcgctgcaggaagacttcgccggcgacctggtgcggctggtggtgcacacgccagtggccgggctggaacaggccgactggctgcaggtgattgccgcggatgatccgcagctgggcccgttccgcgattgcctgaacgatggcgagccgatctgcggccgcctgcagccggaaaagaatgccgtgctgtacggcgtgcgcagcgaggaagtgcagaccaccgcgctgctgccgctaccgggcgtgggcctgatcgcggtcggcagccacgacccgaaccgcttctacccgggcatggggacgttgttcctgcgcatgatgggtgacgcgctggtcactggcctgaagcgcttcccgggctga

SEQ ID NO: 495776 - DNA, 852 bp, Stenotrophomonas maltophilia
atgagtaaggccggttccaaggccctgcgtttcagcaagatgcatggcgcgggcaatgatttcgtagtgatcgacctgcgtgacggcaccgcaccgcccacgcccgagctggccgcgcgcctggccgaccgccacaccggcgttggctgcgaccagatcctgaccatcgaggcaccgcgtgcggacggttcggtggcctcgtaccgcatctggaatgccgacggctccaattccgagcagtgcggcaacggcgcgcgctgcatcgccgcctggctggtgcgcgagggcagtgcgcagggcgatgcattcgtcatcgacagcccgctggccagccatgaagtgaaggtgctgggcgaagggcagtttgcggtgacgatgggcgtgcccgccttcgagccggccaacgtgccgctgatgggctttgcgcacgcgcgcgaggaatacctgctgccgctgcagggcgagagcgtacgcttcgccgcggtgtcgatgggcaacccgcatgcggtgatcgaagtgggcctggtcgatgctgcaccggtcgagcgcgtcggtgcgctgctgcagcagcatgcgtcgttcccgcgctcggtgaacgtgggcttcgcccaggtgatgagcccggcccacgcccgcctgcgcgtgttcgagcgcggtgtcggcgagaccctggcctgcggcagtggtgcctgtgccgccgcggtgaccctgatgcagcgcggccgcctgcagcgcgatgcccgcatcagcctgcccggtggcgacctgcgcatccagtggccgggcgatggccagccggtggtgatggcgggcccgaccgcattcgtctttgaaggggagtggatggcatga

SEQ ID NO: 495777 - DNA, 273 bp, Stenotrophomonas maltophilia
atgaagatcccccatcgaaacgccatcctgattccgctggcagcggcctcgctgctgctcctcgccgcctgcggcaacaagggcccgctggtactgccgcagaagccggtgccggtggaagaaactgtcgaacccgctgccgagcccgccaccgaggcgactgcgccgcagacccagggcagcggcaccccggccacgaccgtggagccggccgcaccggccacccagccggcgcccacgcccgcgaagaaggcgggcagcgggaatgagtaa

SEQ ID NO: 495778 - DNA, 429 bp, Stenotrophomonas maltophilia
atgagcctgcccgagccatctgcaccccgcgatagcgccacgccgccgcgcgtggtgcgtttccgctgggcatggtggctgctggcgtacgtcagcctgggcaccggcatcgtcggcatcttcgttccggggctgccgaccaccgtattcatcctgatctcggcctgggccgcctcgcgcggttcggagcgcctgcatacctggctgctgcagcatccgcgtttcggcccggccatcgccaactggcaggcacacggggcggtcagccgctacggcaagtggatggccacgatcaccatggcggtatgcgccggcatcatgctgtggtgcgtgccgatcgcctgggtgaagtggttctcgatcggcagcatgaccgtggtcgcaatctggctgtggacgcggccgctgccaccaccgcccgcggattga

SEQ ID NO: 495779 - DNA, 2112 bp, Stenotrophomonas maltophilia
atgaagtccaccctctgcctgttgctcgccagcctgatgaccacgactgctaccgccgccacgccgcccgttccgccggatgccgccaagcatccgcacgtggtcaaggcgccgttcggcgcgacccgcaacgatgactattactggctgcgcgacgacaagcgcgagaacaaggacatgctggcctacctgcaggcagagaatgcctacgccgaccagctgctggcaccgctgaagccactggaagacaccctgtacaaggagatcgtcggccgcatcaagcaggacgattccagcgtgccggcgcgcgagcgcggctactggtactacagccgcttcgagaccggccaggattaccccatccacgcgcgccgcaagggcagcatggaggcggccgaggaagtcctgctggacgtcaacgcgatggccgccggcaagggctacttcagcgtcggttcgatggaagtcagccaggacaaccagctgctggcctgggccgacgatgacgtcggccgccgccagtacacgatccgcttcaaggacctggccaccggcacggtgctgcccgatgtgatcaccggcagctccggcgatctggtctgggccgacgacaaccgcaccgtgctgtatgtcgagaacgatccggaaacgctgctgaccgtgcgcgtgaagaagcacgtgctgggcaccccggccagcgccgacaccgtcgtctacgaagagaaggacgacagcttctacatgggcatcggccgcacccgcgacgatcgcttcatcaccatcggcgtgcacagcaccgtgtcctcggaagagcgctatgcgccggccagcgacccgaccaccttcaccgtgctggcgccgcgccagcgtgacgtcgaatacgatgccgaccaccatgacggccgctgggtgatccgcaccaacgatggtgcgaagaatttcaagctggtcaccgcaccgaccgatgccacctcgcgcgcgcaatggaaagactggatcgcgcatgacgatgcggtgttcatcgaaggcttcgaactgttcgacacgtacaccgccatcgccgaacggtccgagggcctggagcgcatccgcctgctgttcaaggacgggcgcagcgactacgtgaaggccgacgagccggcctattcgatgggcctgggcgataacaccgaggccgatacgccgtggctgcgctacgtctacacctcgatgaccaccccgaccaccgtgttcgagctgaacaccgccaccggcgagcgtcgccagctgaaggtgcagccggtggtcggctatgacgcctcgaagtacgagaccaaccgcgtctggatcaccgcgcgcgatggcgtgaaggtgccggtgtcgctggtctaccgcaagggctaccagaaggacggcaagggcgcgctgttccagtacgcctacggcagctacggcatgtcgatggatccgtacttcaaccagaccgcggtcagcctgcttgatcgtggcgtggtgtatgccatcgcccacatccgtggcggccaggagatggggcgcgactggtacgagaacggcaagctgctgcacaagcagaacaccttcaacgacttcatcgacgtcacccgtggcctggtagcacagggctgggcggcgaaggatcgcgtggccgcgtccggtggcagcgccggcggcctgctgatgggcgcggtggccaaccaggcgccgcaggattaccgggtgatggtggcgcaggtgccgttcgtcgacgtggtcaccaccatgctcgacccgaccattccgttgaccaccaacgaatacgacgagtggggcaacccggagcagaagccgtattacgactacatgctgtcctactcgccctatgacaacgtgaagcagcaggcgtacccggcgctgtacgtgggtaccggcctgtgggattcgcaggtgcagtactgggagcccgccaaatgggtggccaagctgcgtgacgacaacaccggccactacccgatcctgttccgcaccaacatggaagctggccacggcggcaagtcggggcgcttccagcgctaccgtgaactgtccgagtcgtacgcgttcgtgctgcagcagctgggcatcgcccagccgtaa

SEQ ID NO: 495780 - DNA, 1194 bp, Stenotrophomonas maltophilia
atgagcaccccgccccacacgccgggctacagccggcgcagccatgaaatcgctccgttccacgtgatgtccctgctggcccgcgcgcaggcgctggaacaggcaggccacgatgtgatccacctggaaatcggcgaaccggacttcactaccgccgagcccgtcgtgcgtgccggccaggccgcactggccgccggccacacccgctacaccgccgcgcgcggcctgccggcgctgcgccaggcgatcagcggtttctaccgcagccactatgggctggatgtcgatcccgaacgcatcctggtcaccccgggtgggtccggtgcgctgctgctggccagcagcctgctggtcgatcccggccgccactggctgctggccgaccccggctacccctgcaaccgccacttcctgcgcctcgtcgagggcggcgcgcagctggtgccagtcggcccggacaccgcctaccagctgaccccttcgctggtggaacagcactggaatgacgacagcgtcggcgcgctggtcgcctcaccggccaatccgaccggcaccgtgctgtccgccgacgaactggcggcactgtcgcaggccctgcacgcgcggggcggccatctggtggtggacgagatctaccacggtctgacctacggcctggatgcgcccagcgtgctgcaggtggacgacagcgcgttcgtgctgaacagtttttccaagtacttcggcatgaccggctggcggctgggctggctggtggcaccgcctgcagcggtaccggacctggaaaagctggcgcagaacctgtacatcagcgcctccagcatcgcccagcacgccgcgctcgcctgcttcagcgaggaatcaatggcgatcttcgaacagcgccgtgaagcgttccgccaacgccgcgacttcctgctgcccgcgttgcgtgagctcggcttccgcattgaagtcgagccgcagggcgcgttctacctgtacgccgatgtcagcgcgttcaccgacgacgcgcaggcgttctgcgcgcacttcctggaaaccgagcacgtggcgttcaccccgggcctggatttcggcttccatcgcgccaaccagcatgtgcggctggcgtatacccagcaaataccgcggttgcaggaggcggtggcgcggatcgcgcgcgggttgaagcgttggcagggatcacgttga

SEQ ID NO: 495781 - DNA, 2097 bp, Stenotrophomonas maltophilia
atgtctcgactcgcttccgcctgcctgctggctggcatgatgaccgctgcctcggtggggaccgccgtggctgctgaagacgccgatcgctacgcctggctggaggatgtcaccggcgacaagccgctgtcctgggtcaaggaacagaatgccaagtccgaggcgcgcctggcgcagaccccggccttcaagcagatggagaccagcatccgcgaggtgctcgactccgacgccaagattcccggcgtgcagaagatcggcgattactactacaacttctggaaggaccagcagcacgagcgcggcctgtggcgccgcaccaccctggccgagtaccgcaaggcctcgccgcagtgggagaccgtgctcgacctggatgcactgaacaaggccgagggcgagaactgggtctggcacggcgccgattgcctgcgcccggattacagccgctgcctgatcgcgctgtcgcgcggcggcgccgacgccgacgtcacccgtgagttcgacctggccaacaagacctggatcaaggacggcttcttccgtccggagtcgaagggcggtctcaactgggtcgatcgcgacaccgtgttcgtctacaccgacttcggtgccggctcgatgaccacctccggctacccgcgcgtggccaagctgtggaagcgcggcacgccgatggcctcggccaccgtggtgtacgaaggcaagccggaggacatgtacatcgcggcgatgcacgatgacaccccgggcttcgaacgcaacctggtcagccgcaccctggcgttctacaacaacgagctctacctgcgtggcgatgacggcacgctgaccaagatcgatgcgccgaactcggccgagaagggtttgcacaagcagtggctgaccctggaactgcgcgatccgtggaccgtgggcggcaagacctacgcgtccggttcgctgctggcgacgaagctggacgacttcctggccggcaagcgcgacttcgacgtgctgttcaccccgaccgcgaccacctcgctggccagtgccagctggaccaagagccacctggtgctgaatgtgctggacgacgtcaagaaccgcctgtcggtgctgaccccgggcgccgacggctggcagaccagccgcttcgtcggcgccccggcctttggcacgctgggcgtggctgcggtggacagcaatgacagcgacgcggtgtggctgaccgccaccgattacctgacgccgaccacgctggccctggccgagatcggccaggcaccggaaacgctgaagaccatgccggccttcttcgatgccaagggcaaggtgatcgagcagcacttcgccaccagcaaggacggcacccgcgtgccgtatttcgtggtgcacgacagggcgatgaagctcgatggctccaacccgaccctgctgtatggctacggtggtttcgagatctcgctgaccccgagctattccggtggcatgggtcgcgcctggctggagaagggcggcgtgtacgtggtcgccaacatccgcggcggcggcgagtacggcccgcgctggcaccaggcggcgctgaagcagaaccgtcacaaggcctatgaagacatggccgcggtggcgcgggacctggtcaagcgcaagatcaccagcgccaagcacctgggcgtgcagggcggcagcaacggtggcctgctgaccggcaacatgctgacccagtacccggagctgttcggtgcggtggtggtgcaggtgccgctgctggacatgaagcgctacagccacctgttggcgggcgcctcgtggatggccgagtacggcaacccggataccagcgactgggaattcatcaagaccttctcgccgtaccacctgttcaacgcgaagaagaactacccgccggtgctgttcacgacctccacccgcgatgaccgcgtgcacccgggccacgcccgcaagatggcggcgaagatgatcgacgccggcaaggacgtgacctactacgagaacatcgaagggggccacggcggcgcagccaacaatgcacaggccgcgcatatgtccgcgctggcctacagcttcctgtgggagcggttgggcggcaagtaa

SEQ ID NO: 495782 - DNA, 324 bp, Stenotrophomonas maltophilia
atgaacgctcgttccgtccgtcgccctgcaactgaacgcgtcaccgaacgcgccgacccgcgcctgctgcgcggcgtgcggcagctgaccctggctgggctggcgctggtactggtctggccggcggcgcgtggcagcagcgcatggctgggctggctgccgatgtggctggtgggcatgccgctcgcggcctggtgggcgctgctgcgctttccgctgccgcacccgtcatggcgatggcgggcgcggcgtaccggtggacaggcgcgccgtcgaccggctcccgccgcacgcgggcggcgcggtccggcggccacggcctga

SEQ ID NO: 495783 - DNA, 603 bp, Stenotrophomonas maltophilia
atgacttcgatccgcccgttctgcgccgtgctgctggctctgtccctggcaggtcctgccatggccgccagtgagccgccgtcgccccgcgccagcgcccccgacgcggccgacccgggggcgccgatcgacctgaagcgcttcatgggcacctggtatgtgatcggccgcgtgccgaacttcatcgaacgcgggcatgtcgccagcgtcaacgagtacgagctgcgcgacgagcacaaggtcgccatcacctaccgctaccgtgatggcttcggcgaaccactgcaggaaattcgcgcacgtgccagcgtcgatccggacagcggcaaccatggctggcgaacctggttctatcgcgtggtgccgacccattcgcgggtactggaagtggccccggactattcatgggcactgatcggttatccgggccgcgaaatggcctggatcttcgcgcgcacgccggacatggacaaagccctgtacaaggagctggccgagcgcctgcgcgacgagtacggcgtgaacaccgacaagctcaagcgcgtgcctcagcatccggaacaggtcggcaagctgggctacgaagtaccgaacgcgcgttga

SEQ ID NO: 495784 - DNA, 690 bp, Stenotrophomonas maltophilia
atgatcatcgccactgccggcggtttcttccgtcacctggatgcgggcaagtgggccgacatcggccaggccaccatcgacaccctgctgatgctgctcggttcgctgccgctgaccctggccatcggcctgccgctgggcgtgctgctgtacctgttcggggcgccgcagatgaagcgccggccgtttgcctatggcgtgctggctctggtggtgaacctgctgcgctcggtgcctttcatcatcctgatgatcgtgctgatcccggtcacgctgttcctgatgggtacctcgctgggcgtgcgcggcgcgatcgtgccgctggtgatcggcgcggcgccgttctacgcgcgccttgtcgagaccgcgctgcgcgaagtggatcgtggcgtgatcgaggcgacccaggcgatgggtgccaccacctggcagctggtcacccgggtgctgctgccggaagcacgaccggggctgatcgccggggcgacggtcaccaccgtggccctgatcggcttcaccgcgatgggcggtgcgattggttccggtggcctcggcgacctggcgttccgcgatggttaccagcgttcgcacaccgacgtggcgctggtcaccgtggtcctgttgctggtcctggtgcagctgctgcagatgctcggcgaccgcctggtcgcgcattacagccgcaagtaa

SEQ ID NO: 495785 - DNA, 1008 bp, Stenotrophomonas maltophilia
gtgatcgagttccagcgcctgcacaaatcctatgccgttgccggccgcgaagtcagcgcgctgcaaccgctggacctgaccatcgaggccggtgaggtattcggcatcatcggccattccggcgcgggcaagtcgaccctgatccgcatgatcaaccgcctggaagaacccagcggtggccggctgctgatcggtggcgaggatgtcaccgcactggacgcggacggcctgcgcacgctgcgccggcgcatcggcatgatcttccagcacttcaacctgctgtcgtcgcgcacggtggctggcaatgtcgccttcccgctggagctggccggcacgccgcaagcggagatcgacgcgcgcgtggccgagctgctgcagaccgtgggcctggaagcgcatgcgcagaagtatccggcgcagctgtccggcggccagaagcagcgtgtcggcatcgcccgtgcgctggcgacccgcccgcagatcctgctgtgcgacgaggccaccagcgcgctggatccgcagaccaccgcctctgtgctgtcgctgttgtcgaagatcaaccgcgagctgggcctgaccatcgtgctgatcacccacgagatggacgtgatccgccgtgtctgcgaccgcgtggccgtgctcgatgctggccagatggtcgagaccggcccggttacccgggtgttcctgcatccgcagcacccgaccacgcggcggttcgtcagcgaatcggagcacgtggacgaaggggcgttgcaccgcgatttcgacgtggtgggcgggcgcatcgtgcgcctgaccttcctcggcggcgacacctacgaacccctgctcggcagcgtcgcgcgccagaccggggtcgactacaacatcctgtccggccgtatcgaccggatcaaggacaccccctatggtcagctggtggtcgccctggtgggcggtgaccagtccgccgcgcaggctgccttcgtggctgccggcgtgcatgtcgaggagctgcgtcgatga

SEQ ID NO: 495786 - DNA, 897 bp, Stenotrophomonas maltophilia
atgaacgtgcaacgctccccttcgcgtgcggtggcctggatggtcgctgcggtcgcctgtttctcgctgatggacgctggcatgaagcagctgtcggccagctatccgaccctggaagtgaccttcctgcgcggcgcggcctcgttgccgttcgtgctggtctgggtgttggccagcgccggcccgcgctcgctggtgccgcgtcgctggggcctgcacctgctgcgtggcgcgctgggcatggcgatgattggctgcttcgtgttcgccctgcgcgacctgccgctgtccaccgcctacaccatctatttcgtcgccccgctgctgatcgccgccttgtcggtaccgctgctgggcgagcgggtcgggccacggcgctgggtcgccatcggcatcggcctggtcggcgtgctggtggtgctgcggccgggcgtggacggtttcatctcggtgcccggcctgatggtgctggctgcggccaccgcctatgccgtggcggcgatcacggtcagcctgctgacccgcaccgatacctcgcagtcgatggtggtctggttcctggtgatcatggccatcggtgccggcctgctgtcccttcccggctgggtgccgctgcagctggcgcatgcgccgctgatcgccggcatgggcctggccggggcgctgggccagatcgccctgaccaaggcgttccagctgggagaggcctcgatgatcgcgcccttggagtacagtggcctggtctgggtgatcggttgggacctggccttctggggccagctgcctgatggctatacctgggtgggcgccgcgatcatcgtggcttcgggactgtacctgctgcatcgtgagcgcctgaaccgggtgcagccaccgaagccgctggaccatccctga

SEQ ID NO: 495787 - DNA, 483 bp, Stenotrophomonas maltophilia
atgccttccttcgacgtcgtgtccgaagtcgacacccacgagctgaccaacgccatcgaccaggccaaccgcgaactggccacccgcttcgacttcaagggcgtggacgcaaagttcgagcgcgacggcgatgtcatcaaccagaccgcgccgaccgaattccagctcaagcagatgaacgacattctgcgtgctcgcctggccgcacgcggcatcgacgtgctcagcctggagttcggcgacatcgagaccaacctggcccaggcccggcagaagatcaccgtcaagcagggcatcgagcagaagatcgccaagaagatcgcggcggcgctgaaggatgccaagctgaaggtggaaagccagatcaacggcgacaagctgcgcgtgcagggcaagaagcgcgacgacctgcaggacgccatcgccgtgctcaaggccggcaagttcgagctgccgctgcagttcaacaacttccgcgactga

SEQ ID NO: 495788 - DNA, 597 bp, Stenotrophomonas maltophilia
atggcggccccgccagccgacgtgcccgccatgaccgattcccccctgcccaccgatgacccgatcgctgccacccgcctgtggctggagcgcatcgtcatcggcctgaatctgtgcccgttcgccaaggcggtgtatgtgaaggaccaggtccgcatcgtgctcagtgatgcgaccacgccggaagcgctggttgagcagctggccgaggaactggtgctgttgcgcgatacgccggccgagcagatcgataccacgctgatcgtgcatccgcaggtgctgacggacttcctcgactacaacgatttcctcgacaacgccgacgccgcgatcgaggcactggacctgcagggcatcctgcaggtggccagcttccacccggactaccagttcgacggcgtggcagcggacgacgccagcaactacaccaatcgcgcgcccttccccaccctgcacctgctgcgcgaagacagcgtggcgcgcgcagtggatgtctatccggacccggacgtgatcgtcgagcgcaacatccagaccctggaccgcatcggtgtggacggctggcatcgccgcctgcgtggcgaagacctgacgtga

SEQ ID NO: 495789 - DNA, 804 bp, Stenotrophomonas maltophilia
gtgagcacggtgccgccgattgccgcatggccggccgcgccgctgtcgggcaaggtggtgctggtcaccggcggcgccaacggcatcggccgtggcatcgcccaggccgtgctcggtgccggtggacgcgtgctgatcggcgacctggacgtggaggccggcgaggcgtgcctggcggaatggcagcgtagtggcgaggccgcattccagcgcctggacatcaccgacgaagccagcgtgcgcgacttcatcgccgtggccctgcggcgtttcagccgtatcgacgggctggtcaacaacgcgggcatcgccggaccgcatggcacgcagctgcaggacatggactgggatgagtggcagcgccgcctgtcctcgctgcacggtgccttcctgtgcagcaagcacgcactaccggcgctgactgccagcgccgccggcgcaatcatcaacatcgcctcgacccgcgcctggcaatccgaagcgcacagcgaggcctatgctgcggccaaaggcgggctggtggcgttcacccatgcgctggcgatcagtgccggcccaacggcgcgggtcaacagcatcagtccgggctggatcggcaccacggcctggcaggccccctcgcggcgacacgcacctgagtactccgccatcgaccaggcacagcacccggtcggccgggtcggccgccccgaggacatcggcgcgctggcggtgtacctgctgtcgtcgctgtccggcttcagcaccggccaggacttcatcgtcgacggcggcatgacccggaagatgatctacgccgaatag

SEQ ID NO: 495790 - DNA, 2031 bp, Stenotrophomonas maltophilia
gtgaccgttgccaaccccctgctcgatttttccggactgccgcgctttgacgcgatccgccccgagcacgtcgcgccggcgctggatgtgctgctggccgaggccgaagctgccgtcagcgcagccgagcgggtgcagccggtgcgttgggacaccttcgtcaccccgctggatgacgccaccgagcgcctgtggcgtgcctggggcctggtcggccacctgcagggggtggtcaacaccccggaactgcgtgaggcctacaacggcaacctgccgcgggtgacccgtttcgccagcgcgctgggccagaacctggcgctgtatcgccagtaccaggcactggccgccagcccggaggcggcgcatttcaatgaagcccagcgcaaggtgctggacaacacgctgcgtgacttccgcctgggcggtgccgagctggcacctgaggcgcagcagcgctttgcggcgatcaaggaggaactgtcggcgctgtcggcgaagttctcgcagaacgtgctcgacgccaccgatgcatggtcgctgtacatcgaggacgaagcgcgactgctgggcctgccggaagacgtgaaggctgccgcgcgcgctgcggcagagaaggacggcaggaccggctggaaactgaccctgcagatgccgtgctacctgccggtgcagacctgggctgaagaccgcgacctgcgcgagatcctgtaccgtgccagcgcgcagcgtgcatcggagttcggcgatgacgcgctggacaacagtggcaacatcgaccgtatccttgccctgcgcgccgaactggccgcgttgctcggcttcgattcgtacggccattactcggtggcgaccaagatggcgcaggacccggccgaagtgctgggtttcctgcgtgaccttgccgcgcgagccaagccgttcgcggccaaggaccgcgccgagctggagcagttcgcacgcgagcagctgggcatcgatgacctgcaggcctgggacctggcgttcgccgccgaccgcctgaagcaggcgcgttacagctattccgagcaggaggtgaagcagtatttcaccgaaccgaaggtactgggcggcctgttctcggtgatcgagcagctgtatggcctgcatgtgcaggaagacagcgcaccggtgtggcacgaagacgtgcgcttcttccgcctggtcgatgcgcagggcgcgctggtcggccagttctacctggacctgtacgcgcgcgagggcaagcgcggcggtgcgtggatggacgattgccgcaaccgtcgcgtgcgtggcgacggcagcgtgcagacgccactggtctacctggtgtgcaactttggccggggcgccaacggcaggccggcgaccttcagccacaatgaagtgaccacgctgttccatgagatgggccacggcctgcaccagctgctgacccgcatcggcgaactgggcgtggccggcatcaacggcgtggaatgggacgcggtggagctgcccagccagttcatggagaacttctgctgggaatgggaccatctgcagggcatgaccgcgcacgtggacagtggcgagccgctgccgcgcgcgctgtacgagcgcatgctggcggcgcgcaatttccatagcggcatggccacggtgcgccagctggagttcggcctgttcgacatgctgctgcacagccagttcgaaccggcgcaggacagcgtgctggcgctgctggaccgcgtgcgcgcggaagtggcggtgaaccacccgccggtctggaaccgcttcccgcaccagttcagccatatcttcgccggtggttacgccgcgggttactacagctacaagtgggccgaagtgctcagcgccgatgcctacgccgcgttcgaggaagcgccgcaggcactggctgaaaccggtgcacgcttccgcgatgagatcctgtcgcgtggtggcagccgcccggcggcggagaacttcaaggccttccgcggccgcgcgccgcagatcgacgcgctgctgcggcactcgggcatggcgtaa

SEQ ID NO: 495791 - DNA, 405 bp, Stenotrophomonas maltophilia
atggaaggtctggctgcagtggcatccatctcaccggcgcgctcgctggcgctgtccgccagcccggcagaactggcctggatcgccgcgctgtgcgatgccggcgacgacgccccccgccatttggagcagctgcaggcagtattgcagcagggcggcacgttcaacgatgcccaggagtggtacccgttcgaggtgatcgagcgcggcgccagccagttgcagctgggccacgagcgcgagttcgtgatctgcgtgctgctgtggctgcaggcattggcccagggacgcgccagcatcctggaccccagcctgcacctggatgaccgcgcgatggacatcgaggcgttgcctgatgcgctgcgcgatgcggtgctggatgcgttcaccgcagcggggtattga

SEQ ID NO: 495792 - DNA, 1113 bp, Stenotrophomonas maltophilia
atgtcgcagcgtgaatgggtggccgccgccatccgcaagatcgaagccgatttcaaccgttccgccgatacccatctgatcccgctggcgctgcccgggttcgagggcatcgacctgtacctgaaggacgagtcgagccatcccaccggcagcctcaagcaccggctggcgcgctcgctgttcctgtacgcgctggccaacggttggttgcgcgagggccggccagtgatcgaggcctccagtggctcgaccgccgtgtccgaagcctatttcgcgcgcctgctgggcctgccgttcattgcggtgatcccggccaccacctcgccggaaaagatcgcggcgatcgagttccatgggggccgctgccacctggtcgagcgcgcctgcgacctcaactgcgattcggaaaagctggcccgcgaaaccggcggccacttcatggaccagttcacctatgccgagcgggcgaccgactggcgtgccaacaacaacatcgccgaatccatcttcaagcagatggccgaagagcccagcccggttccggaatggatcgtgtgcagcccgggtaccggcggtaccgccgccacgctgggccgttatgtcagctaccgccggcatgacacccgcatcctgtgcgcggacccggaagtgtcggtgttcttcgacggctacaaggctgccgtggccggtgaacaggactggcgtggactgacctgcagcggtggctcgcgcgtggaaggcatcggccggccacgggtggagccgagtttcatcccgaccagtgtcgatgcgatggtgaaggtgcccgatgcgctgagcctggccgcgatgcgccatgtcagccgccagctcggccgccgtgtcggtggctccaccggcaccaacttcatcggcgtgctgcaggccgcgcaatggatgcgtgaggcgggccaccagggcagcatcgtcagcatcctgtgcgacagtggcgagcgctatgcgcagagctattacgacccggcgtggtatgggcggcagggaatcgatgtcgacggcgccgatgcgcagctggcggcggcggtggccgggcaggggttgcccgaactgccgtggtgcagcctggaagcgttgtaa

SEQ ID NO: 495793 - DNA, 516 bp, Stenotrophomonas maltophilia
atgaccattcccgccctgcgcgatgtccccggcgtcgccgcccaggccccggccgaaaccagcggcttcgtgttcaaccacaccatgctgcgggtgaaggacatcaccgcctcgctggacttctacacccgcgtgctgggttaccagctgatcgacaagcgcgacttccccgacgcccagttcagcctgtacttcctggcctacgtgccggccggcgcagtggtgccagaagacgacagccagcgccgcctgtggatggccggcctgccgggcgtgctggaactgacccacaaccacggtaccgaaacccaggccggtgcggtgtaccacgacggcaacagcgacccgcgcggcttcggccacatctgcgtgtcggtgccggacatcgaggccgcctgccagcgcttcgaggacctcggcgtgaccttccagaagcgcctgaccgacggccgcatgaagaacctggccttcatcaaggacccggacggctactgggtcgaaatcatcgccaactga

SEQ ID NO: 495794 - DNA, 429 bp, Stenotrophomonas maltophilia
atggaaacgatggaactgcaccgcggccgcctgatcgaccacatccagctggtggtgcgtgacctggccgccagccgccgcttctaccaggcggtgttcgacaccatcggcatcccgatcgccggcgaaggcgatgattacttctgggccgatgagctgttcatttccagcgccagcagcgaggccgccgccggccagctgaccggccggcaccatctggccttccaggcccgcgacagcgccaccgtcgatgccttccataccgccgcgatcgccgccggcggcaccgataacggcgcgccgggcgaacgcccctaccacccgggctactacggcgccttcgtgctcgacccggacggcaacaacatcgaagtggtctatcacggtccggcgaactacagcgccgactcggtgaaggtcacgttctga

SEQ ID NO: 495795 - DNA, 432 bp, Stenotrophomonas maltophilia
atgaacgtccgcgaactcctgcaatccaagaaagaagctgtcatcaccatcgacgccgaggacaccatcggtgccgccgcccacaagatgagcgcgaacaggatcgctgcgctggtggtgatgaaggacgatgccccggtcggcatcatttccgagaaggacatcgtgcgtaccctggccgacgacggcccgcaggccggccgccgggtgatctccagcctgccgtccaccggcctggaaggcattgcgccggacgcgacgctgaagcaggccatgtcgttgatgacgtactcgcggcgccgtcatctgatggtgaccgacggcaaccagctggtcggcatcctcagcctgggcgatatcgtgaagaacctgctgggcgagctggaactggaaaaggccgtgcttcaggacatctacatggccgcccactga

SEQ ID NO: 495796 - DNA, 1839 bp, Stenotrophomonas maltophilia
atgtgtggaatcgtgggtgcaatcgccggtcgcgacgtggtgccggtgctgatcgaaggcctgaagcggcttgagtaccgtggttacgactcctcgggcatcgcggtgatcgatcacgccgagcgccccgaagtacgtcgtgtccgccgcaccggtcgcgtgtcggaaatggccacggcggccgaggccgaagggttcaatgcggtgctgggtatcggccacacccgctgggccacccacggcggcgtcaccgaggccaacgcgcatccgcacatcagccacggcgtggcgctggtgcacaacggcatcatcgagaaccacgaagagcagcgcgagaagctgcgcgcgctgggctacaccttcgagtcgcagaccgacaccgaagtcatcgcgcacctgatccatcatcacctgaagggcggcgatgacctgctggtggcgctgcagcacacggtgaaggagctgaccggcgcctacgcgctggccgtggtcagccgcgccgagccggagcgcttcgtctgcgcgcgcatgggctgcccgctgctggtgggcctgggcgagggcgagaacttcgtcgcctccgacgtctcggcggtgatctcggccacccgcaaggtgatcttcctggaagagggcgacaccgccgagatccgtcgcgatggcgtgcgcatcttcgatgagcatgaccggccggtcgagcgcgatgtgcacctgtccgacgtgtcgctggcatcgctggagcttggcccgtaccgccacttcatgcagaaggaaatccacgagcagccgcgcgcgctgggcgacaccatcgaggcggcgatcgacgccggtggtttcccggccgagctgttcggcaagaatgccgaagcggtgctgtcgggcatcgagggcgtgcagatcattgcctgcggcaccagctactacgccggcctgaccgcgcgctactggatcgaggccatcgccggcctgccgtgcagcgtggagattgccagcgagtaccgctaccgcgccgcgtatgccaacccgaagcacctgatcgtcaccatctcccagtccggcgaaacgctggatacgatggaggcgctgaagtacgccaaggcgcttggccacaagcacacgctgtcgatctgcaacgtgccggaaagcgcgattccgcgcgccagcgagctggtctgctacacccgcgcgggcgcggagatcggcgtggcttcgaccaaggccttcaccacccagctggccgcgctgttccagttgaccgtggtgctgggcaagctgcatggccgcatcgacgcggcgcaggaagcggattacctggaacagctgcgcttcctgccgggcagcgtgcagcacgcgctgaacctggaaccgcagatcgcggcgtgggccgaacgcttcgcgcgcaagtccaatgcgctgttcctgggccgtggcctgcattacccgatcgcgctggaaggctcgctcaagctcaaggagatttcctacatccacgccgaggcctacccggcgggcgagctgaagcatggcccgctggcgctggtggacgaggacatgccggtggtggtgatcgcccccaatgacagcctgctggagaaggtgaagtcgaacatgcaggaagtgcgcgcccgtggtggcgagctgttcgtgttcgccgaccaggacagcaacttcaatgagtccgaaggcgtgcacgtgatccgcacgccgcgccatgccggcgtgctcagcccgatcgtgcacaccattccggtgcagctgctggcctaccacaccgcgctggcacgcggcaccgacgtggacaagccgcgcaacctggccaagagcgtgacggtggagtaa

SEQ ID NO: 495797 - DNA, 1278 bp, Stenotrophomonas maltophilia
atgatccgcgacacttccgcacaggaccagatcgtttcctccgcccccgccggcgccacccgcgtcaactggcagcgctaccgctggccggcgctgggcgccatcgtgctgctggccggcatcggctgggccgtgcatgcctggtccaatgccagccgctccttcgacagcagccgggtgcgcatcgccgaagtgaagcgcggcgacctggtccgcgacatcgccgccgacggccgggtgatcgccgccaacagcccgatcctgtacgccatctcggccggcaccgtggacctgaaagtggtcgccggtgacgtggtcaagaagggccaggaactggcggtcatcgacagcccggaactgcgcagcaagctggcccaggaacaggccaccctggccggcctggaagccgaggccagccgtgccgcgctggacgccaccctggcccgcgccaagtcgcgcaaggaaaccgaccaggccaccatcgagcgccaggccgccgaccgcgacctgcagcgcttccagcgcggctacgacggcggtgcggtgccacagatcgacctggccaaggccaaggactcgctgaagaaggccgacatcaccctggccaacgccaccaccgatgcgcgcctgcagagccagggcgccgacctggatgcccgcaacaagcgcctgctggccgaccgccagaaggccgtggtggccgaagtgcagcgccaggtcgacgcactgaccctgcgcgcaccgtttgacggccaggtcggccaggtgcaggcggtccagtccaccaacctggctgccaacgcgccggtgctgggcgtggtcgacctgtccaagttcgaggtcgagatcaaggtgccggagagcttcgcccgcgacctggcgatcggcatgccggcgcagctgaccggcggcaatggcaagccgttcccgggcgagatcagcgcggtgtcgccggaagtggtcaacggcgaggtcaacgcccgcgtgcgcttcgccagcgcgcagccggaaggcctgcgccagagccagcggatgtcggtgcgcgtgctgctcgatacccgcaaggacgtgctgaaggtcgagcgcggcccgttcgtcgaacagggcaatggcgtggcctacgtgatggatggccgcaccgcggtgcggcgtccggtggaactgggcgtcagcagcctgggcgaagtggaaatcaagtcgggtgtgcagccgggcgaccgcatcgtggtctccggcagcgacctgttcaaggacgccgaacgcgtctccgtcaactga

SEQ ID NO: 495798 - DNA, 726 bp, Stenotrophomonas maltophilia
atgtacatgctcgaaatgcgttcggtcgccaaggtcttccgcaccgaacaggtggaaacccacgcgttgcgctcgctggaactgcaggtcaaggaaggcgagttcgtcgcggtcaccggcccgtccggctccggcaagaccaccttcctcaacatcgccggcctgctggaaaccttcaccagcggcacctacctgcttgacggccaggacgtgagcacgctgggcgatgacgcccgcagccgcctgcgcaaccagaagatcggcttcatcttccagggcttcaacctgattcccgacctgaacctgttcgacaacgtcgacgtgccgctgcgctaccggaagatgagtgccaacgagcgccgcgaacgcatcgagaaggcgctcacccaggtcggcctgggctcacgcatgaagcattacccgaacgaactgtccggcggccagcagcagcgtgcggcgatcgcgcgtgcgctggccggcagcccgcgcctgctgctggccgacgaaccgaccggcaacctggatacgcagatggcccgcggcgtgatggaactgctggaggagatcaatgccgccggcaccaccatcgtgatggtcacccacgacccggaactggccgcgcgcgcgcagcgcaatgtgcacatcgtcgatggccaggtgaccgacctggtgcgcgaaccggtgctggctaccccgccgcgccacatcgttgccgtcaacgagtga

SEQ ID NO: 495799 - DNA, 1302 bp, Stenotrophomonas maltophilia
atgttcgcctattacacccgattggcggtacgcagcttccgccgcaacaagatcctgaccgcactgatggtggtcgccatcgcgctcggcatcggtgcctcgatgaccacgctgacggtgttccacgtgctgtccggcgacccgattcccggcaagagcgaccagctgttctacgtgcaggtcgatccgcgcccgcgcggcggctataccccgggtgaggagcctgaggaacagatgacacggcgcgacgccgagaccctgctgcgcgagaagcgcggcatccgccaggcgatgatgagcgcgggcggcggcacggtggaaccggagctcagcacgctcaagccgttctcggtggacacgcgctggacgtcggccgatttcttcccgatgttcgacgtgccgatgcagtacgggcgtgcctggaacagcagcgatgatgacaatcgcagccgggtggtggtgctgtcgaaagcgatcaacgacaagctgttccagggtgccgacagcaccggtcgcgagatccgcctgagtggccattcactgcgggtgatcggcgtgatgaagaagtggaatcccgaaccccacttcttcgatctgaccaccggcaactacggcaaggatgaagacctgctggtgccgttttccactgcgatggacctggagttcggcagcaacggcaacatgaactgcttcggcgagaatccggatggcagcagcaactcgatcagcgcgccctgcagctggatccagtactgggtggagctggatccggccaaggtcgaggactaccgcagctacctggccaactactcggaccagcagcgcgcagcgggccgtttcgagcgccccaccaatgtgcgcctgcgcccggtgatggagtggttgacgttcaagaatgccgtgcccagcgacgtgcgcctgcagatgtggctggcactgggctttctcggcgtctgcctggtcaacacggtgggcctgctgctggcgaagttcctgcgccgcagcggtgagatcggcgtgcgccgcgccctcggtgccagccgtgggcagatcttcctgcaatgcctggttgaagccggtgcgatcggcgttgccggcggcgtgctcggcatcggcctggccctgctcggcctgtatgcggtacgccagcaacccgtggactacgcgagcctggcccacctggacggcagcatgctgctgctggccattggcctgaccctgttcgccagcctcgccgctggtttcctgcccgcctggcgcgcgatgcaggttaccccggccatccagctcaagtcgcagtaa

SEQ ID NO: 495800 - DNA, 1215 bp, Stenotrophomonas maltophilia
atggatatccgccccatcctcagcaccatgcgccggcacaagacagccgccgccctgatcgtgctggaagtcgccctgacctgcgccatcgtctgcaatgccctgttcctggtcacccagcgcgttgaacggatcagccagaccagcggcctggccgagaacgagctggtgttcgtccgggtcagcggcatcggcaagcagaccaatggccaggcccgcacccaggaggacctgtccgccctgcgcgccgttcccggggtcaccgccgccgcgaaggtcaaccagctgccgttccgcccgaactcctccaataccagcgtttcgctgaagcaggaacaggaacgtccgaccgccttcgtcaccatgtacatgttcggcgaaggtggactgtccacgcttggactgcagctgaccgccggccgcgacttccagcccagcgaatacagcaatgtcgaggatgcacagaagaacgcctccaccaataccgcctcctcggtgatcatcagccgcacgctcgccgacaggctgtaccccggcgagaacgcactgggcaagacgttctacatgggcaagcagccactgcacgtggtgggtattgtcgcgtcattggccacgcccaccgattacaacaacaacaccacgctgtcgatggtgctgcctgtgcggaccgatttcacccagggcccgtacgtcctgcgcaccgctccggaacggcgcgaggaagtactcaagggcgcgatcgccgcgcttgaacgcaacgaccccaaccggctggtgcgcgagaagctgacctatgaggcgcagcgcaatgactacttcaagaacgacagggccatggtcgggctgctgatcacggtgtgcatctcgctgctggtggtcaccgcactgggcatcatcggcctggccagcttctgggtgcagcagcgcagcaagcagattggtatccgtcgcgcgctcggcgcgacgcgtgggcagatcctgcgctacttccagaccgagaacttcctgctggccacgctgggcatcgtgctgggcatgctggccgcctatgcgatcaacctggcactgatgaacatgtacgagctgccgcgcatgccgctgcactacctgccgctgggcgcactgctgctgtgggtgcttggccagatcgcggtgttcgggccggcccggcgcgcggcagcggtaccgcctgcggttgccacgcggggcgcatga

SEQ ID NO: 495801 - DNA, 393 bp, Stenotrophomonas maltophilia
atgcgtatccgctggatgctgatgatgatgctcctgccactgccggcactggccggcggtggcagctcgcagacactggagtggcgccaggacgatgcgcgcctggcattgcgttcgagcgaaggccaggtgcgcgtggaagccgccggcccggaagcccgcttcggcgtgcgcagcggcgatcgcatcctgcgggtggatgacaccaccgtacgcaggatcgagcatcttgccgaggccctgcggcgttcaagcgccgccagggcctatctcctgctgcagcgcgacaggcaggaactgacggtcgcggtggacgccgctgtctggcgcatggcgctggtcgctccgcctccgccagcaccgccaccgccaccgccgccgccccgacgctga

SEQ ID NO: 495802 - DNA, 1347 bp, Stenotrophomonas maltophilia
atgccttcgatcctgatcatcgacgacaacgccagtgtgggcactgcactggacgtgctgttctccctgcacgacatcgacaccctgcaggcgcagtgcccggccgaggggctggcactgctcgagtcgcagccggtcgacctggtgatccaggacatgaacttcagcgaggacaccacctccggcgaggagggcgaagcgctgttcgcacagatccgcgcacgccacccggacctgccggtgatcctgctgaccgcctggacccacctgagcagcgcggtggacctggtcaaggccggcgccgccgactacctggccaagccctgggacgaccgcaagctgctgaccacggtcaacaacctgctggagctgtccgaggcgcggcgcgaactggaccgccgccgcagccgcgagctgcgccagcgcaatgcgctggaagaaaagtacgacctgtgcggtgcggtcttcgccgatccggccagcgagcgcgtcatcgccctggcctgccaggtcgcgcgctccgagctgccggtgctgatcaccggtcccaatggtgccggcaaggagaagatcgcgcagatcatccaggccaattcactggtggccaagggcccgttcatcacggtcaactgcggcgcgttgccgtcggagctgatcgaggccgaactgttcggtgccgaggccggcgcctacaccggcgccaacaaggcacgcgagggcaagttcgaagccgccgacggaggcacgctgttcctggatgagatcggcaacctgtcgctgggcgggcagatgaagctgttgcgcgtgctggaaaccggccgcttcgagcgcctgggttccaatcgcgaacgccaggtcaaagtccgcgtggtcagcgcgaccaatgccgacctgccggcgatgatccgcgacggcacgttccgcgaagatctctactaccgcctcaatacagtggaactggtactaccgccgttggccgagcgcgcgggcgacatcgtgccactggccgagcgtttcctgacggccggcaagccgctgtccagtgccgccagtgccgccctgcaacggcacccgtggccgggcaacgtgcgcgaactgcgcaacgtgatccagcgtgccgaactgctggcgaccggcaaccgcatcgaggtggccgacctgaacctaccgcgcaccgcaccggcgccacgacctgcaccgagcgctggcaacgatcccgaccgtgagcgcatcgaggacgtgctggcacgcaaccacggcgtcatcgcccaggcggctgccgaactcggcctgagccgccaggccctgtaccggcgcatggaccgccacggcatcccacgcgaatga

SEQ ID NO: 495803 - DNA, 1353 bp, Stenotrophomonas maltophilia
atgaaacggcgctcgttcaccttccgcctgttcctgcgcctgctgccggtgctggcgctggccgctgcgctgccgtggctgctggcgtactggatgaaccatggctgggtggtgaccacggcgtcggccgtgatcctgctggcgttgatgtggtggaccctgcgccgtgccaccgcaccggtgcgctcgctgatgcgcgcactgtccggcaccaccagcagctaccgcgacggcgagtacaacttcggcgtgtactggccgggcaacgacgaactgggcgacctggtgcaggcgcaccgcgagctgggcgatgtgctgcgcgaacagcggcagggcctggtgcagcgcgaactgctgctggacaccatggtgcagaacacgccggtggccatgctgctgattgcctccggcggcgatggcatcgcccgcgtggtgttctccaacctggctgcgcgcaagctgctgcatggcggctggaagctggaaggccagcgtctggaagaggtgctggaacaggtgccggtagagctgcgcgatgccatcgcccgtggcggcgacagcctgttcgcggtgcatgccgagggcgaggacggcgacgaggatgacgagcaggtctaccacctgtcgcgccgcgccttccagctcaacggccgtccgcacgacctgctgctggtacgcctgctcaccgccgaactgcgccgccaggaagtgcagacgtggaagaaggtgatccgggtaatcagccacgagctcaacaactcactggcaccgatcgcctcgcttgcccactccggtggcgtgctggtgcagcgcgaacgcttcgaccggttgccggagatcttcaccaccatcgaggaccgcgcacgccacctggaaggcttcatccgtggctatgcacgcttcgccaagctgccgcagccgcaactgcagaccgtgcactgggcgccgttcctgtccagcctgcgccagcagatcccgttcaccatggaacgcgagccggacgaggacctgagcagccgcatcgacatcgcgcagttcgggcaggcgctgttgaaccttctgaagaacgcgcatgaagcctgcgccgaggccgatccgcccaacgatgacgtacaggtgcaactcacacggctgccgcaatggctgcgcctggacgtactggatcgcggcaagggcatgaacgagcaggtgctgcagaacgccttgatgccgttctattcgaccaagcgcaacggcaccggcctggggttggcactgacgcgcgagatcgtggaagcgcacggtggccgcgtgtcgctgcagaaccgcggcgatggcgggttgtgcgtgtcgatcctgttgccggtgggttga

SEQ ID NO: 495804 - DNA, 534 bp, Stenotrophomonas maltophilia
atggctggaagcgcccggtcaagaagtcctgagccacgtattccgcatgccgacgagctcggcgtgctgccggcaattgaacagcgtgccggcgaactgctgaaggatcacgaagcccatccggtatttgccagccacggcctggatctgccgacgctgcaggacggccttcagcggggccagttgtgggttgtggatggccccggcggcgacattgccggctacctgctgggcggcgagctgtgtggcgagttccatgtcctgcagatggatgtggacccggcgcacgcgcgtcgtggccatggccgtgcattgctgcggcacgccttggcgcaggccagggccaccggctttgctgcagcggtgctgaccaccttgagcgatgtgccatggaatgcagccttctatgccagcgaagggttcgacgtagtgcctgaggctgagtggaacgacggcctgcgcgccgtcatggccgaagaggctgcgctcgggtttccgatgcacctgcgggtggcgatgcggcgggcctggtag

SEQ ID NO: 495805 - DNA, 1368 bp, Stenotrophomonas maltophilia
atgacccaagccctgcacgtcatcatcctcgccgccggcgccggcaagcgcatgaggtcggtgctgccgaaggtgctgcagccgatcgccggccaaccgatgctggcgcacgtgatcgatgcggcccgcgaactgcaaccggcggccatccatgtggtctacggccatggcggtgaggcggtgcggcaacagttcgccgaccagcccgacctgcagtgggctgaacaggcgcagcagctgggtacgggccacgcggtggcgcaggcgatgccgcaggtgccggatgccgtgcaggtgctggtgctgtacggcgatgtaccgctgatccgcgcgcagaccctgcgcgatctgctggcgcagccagggcggttggcggtactggtcgccgaggttgatgacccgaccggttacggccgcgtgctgcgcgatgccgaaggcaaggtgggagcgatcgtcgagcagaaggacgcgaccgacgaccagctgcgcgtgcgcacgatcaacaccggcatcatcgccgcggagtcgaccgcgctgcgccgctggctgtcgcagctgtccaaccgcaatgcacagggcgagtactacctgaccgacgtgttcgcgtttgccgcgcatgagtacaccccggccgaaatggcgctggtggccgacgcgcaggaagccgagggggcaaacgatccctggcagctgtctcagctggagcgtgcctggcagcatcgcgccgtgcgtgcgctgtgcgcacagggtgcacgcgtgcgcgacccggcacgactcgacatccgtggcaccgtcaccgtgggcagtgacgtgctgatcgatgtcgatgtcgttctcgaaggcaacatcgtgctcggcgacggcgttaccatcggcccgttcaaccgcctgaaggacgttactctcggccccggtaccgaagtacgcgcgcactgtgatctggagggtgtggtcaccgaaggcgcggcactggtcggtccgttcgcgcgcctccgcccaggtaccgtgctggccgatggcgtgcacgtcggcaacttcgtcgaaaccaagaaggtcacccttggcgtcggcagcaaggccaaccacctcacctatctgggtgatgcggtgatcggcagcaaggtgaacatcggtgccggcaccatcacctgcaactacgacggcgtgaacaagtcgaccaccaccatcggcgacaacgcgttcatcggttccaacagttcgttggtggcgccgctgacgatcggcgagggcgcgaccatcgctgccggttcggtcatcacccgcaccgccccggccggcaagctgacactggcccgcgcacgacaggaaaccatcgatggctggaagcgcccggtcaagaagtcctga

SEQ ID NO: 495806 - DNA, 384 bp, Stenotrophomonas maltophilia
atgagccttgtccgccagggaagcgcctacctcgtgatcgggctcgtgcagctgctggtcgattggctggtgttcgtggtcgccaccgcgcttggcatgccggtcgcaccggccaacgtcgccggacgcctggccggcatgctgctgggcttctggctcaacggccgctacacctttgccgaggccggcacccacaagctgggctggaggcgctttgtacgcttcttcgggctgtggctgctgctgaccgcggcaagcacgttgctggtgagcctggtcgaccacgcgctgggcctgcagtacacctggctggccaagccactggtggaaggcgggctggcgtgcgtgtcgttcctgttgatgcgctatgtggtgtaccgctga

SEQ ID NO: 495807 - DNA, 2214 bp, Stenotrophomonas maltophilia
atgcagcaccactcgacagcgattgaaggcagcagctggcagcggccgtggcgcacaccggcaggcgtgttcctgattgcgtggatcgttctgtgcctgccatggctcagtggcatcaagaccattccctttgatgccgtgcagcagttcttcccggcggtcagtttcagtgccgagcagttgcgtcacctgcaggccccctggtggaatccgtatctctacggtggctacccgcaggtggccgatccgcagatgatgacgctgcagccgacgatgctgctgccgatgctgctggcgccgggctccctgcacctgttcacggtggtggtgctgctacatgtgctggcaggcggcctgggtgcactgcggttgagccgcgtgcagggcatgccgccgccggcgcagctgctgttcgcactcacgctgatgtttggtggcgtggccgcgtcgcgcctgcagcacacgccgatggtcatcagctactgcctgctgccctggctgtggctgggcctggagcaggtccgccggcggggacggatgcgcgacatcctgctggccggtgtggccggcgggatgtgtgcgcttcaactgacccaagtcacctatttcatcatcctcgcgtgcgtgatctacgccgtggctgctgtcgtgctggcacaggggcagcgcatgcgcctgctgtggcagctgggcgtggtggccattctcgccggtggtgtcagtgcgccgcagtggctgtccacgctggcctggctggaccagaccaatcgcaatggcctgacgctggaagccgcgctgccgggtgccatccactggcagacactggtgacactgctgtcgggcaacgtgttctcgcaggggcgcggcgacagctgggccttcggtgatatcagcgccgattacctctatgtgggggcagtgccgctggcgctgtggctgctctggggcggtgaggtgctgcggcgcaagccggcggcgacgcgcgtcgcgctgtgtgcgctgacgctggcgatcatggtcgcggtgggtggcgccacgccgctgttcccctggttgttcggctggcttccggggctggacctgttccggcgcccgtccgatgcgctgttccttaccgtgcctgcggcggcgtggctgggtgccagtgccctgcaggttgccctgcagcggcagccattgcgattgcatcgggtgtccgtggcggtcgtcgcagtgctgggcgcgtgcgctgcgtggctggcgatcgatcatggtcatccgctcgctttcgcctggcttgcggtcagcgccgcgctgggcgtagccgcggtgtgggtgctgcgccgccaccagtcacctgcgcgctgggtgctggcgctggtgctgttggacctgctgctgttcaacgtcggcaccaggttcaacgcgggcagcggcacaaagtcggtgctcaccgccgatcgtgcgggtcctgcgcagcgcgcctatgcgctgctggcggcagagcggcatatcggcatacccgagcgcgcggtggtcttcggcatcggcggactcaccaacggcgcggcggtgcatgccattgcgctggcaaacggctacaacccgctgctggcaagcgactatctgcagatgaccgggatgccgggcgagccggtggataccttccagcagaaggtccccactgcctggatgccagacaccgctgctcccctgtacgacctgctgggcgtgcgttggctgctggcccaggagccgttcccgggctccagcgcgcagggcgaccaggtggaacttgcgcggcgtgacagcgtgctgccacgggtgctgaatccgcggcaggtgcgccgccatgaggagcgtctaccgcctgcgccgctgttcaaccagaccgatttcaaccggcagctatggctgccggcagccgccagcagccactgtgccgaacaggatgccggcgaggccacggtacaggtgctgcactaccagccgggacgcatcgagctgacggtggtggccgacgatgcagcatgggtggtgatcaacgaaaccaccggtcgtggctggcaggcgcagctcgaggatggccaggtactgccgctgctgcgcggcaatggcctcttccatgcgttgtgcgtgccggccgggcagcatcaggtgcggttgcgctacagcgcgctgcagctgtggcgtgagggactgggagcgcgcctgcgccgtgacggtgatcgctga

SEQ ID NO: 495808 - DNA, 423 bp, Stenotrophomonas maltophilia
atgagcacgatccgttgcgacatcgtcagcgccgagcaggaaatcttccgtggcgaagcgaccctggtcgtggccaccggtgagctgggcgaactgggcatcgcgcccaagcacgcgccgctgatcacccgcctgaagccgggcaaggtggtggtgaccacgccgaacggcgagcagctggatttcgccatttccggcggcatcctggaagtgcagccgcaggtggtgaccgtgctggccgacaccgcgatccgcgcgcaggacatcgacgaagcctcggtccgcaaggccaaggaagaagccgagcgcatcctggccaaccgcggcgaagcgatggaagtggctgaagcccagcagaagctggccgaagccgtcgtccagctgcaggcgctggagcgcctgcgcaagaatctcaagcactga

SEQ ID NO: 495809 - DNA, 1407 bp, Stenotrophomonas maltophilia
atgagtcagggcaagatcgttcagatcatcggcgcggtcgtcgacgtcgaattcccgcgtgaatcggtgccgaaggtgtacgacgcactgaaggtggaaaacaccgagatcaccctcgaagtccagcagcagctgggcgacggcgtggtgcgtaccatcgccctcggttccaccgacggcctgaagcgcaacctggttgccgtcaacaccggccgtggcatctcggtgccggtcggcgccggtaccctgggccgcatcatggacgtgcttggccgtccgatcgacgaagccggcccggtcgctgccagcgacaactgggaaatccaccgcgctgcgccgtcgtatgaagaccagtccccggccaccgagctgctggaaaccggcatcaaggtcatcgacctgatgtgcccgttcgccaagggcggcaaggtcggcctgttcggcggcgccggcgtcggcaagaccgtcaacatgatggaactgatcaacaacatcgccaaggcgcacagcggtctgtccgtgttcgccggcgtgggtgagcgtacccgtgagggcaacgacttctaccacgaaatgaaggactccaacgtcctggacaaggtggcgatggtgtacggccagatgaacgagccgccgggcaaccgtctgcgcgtcgccctgaccggcctgaccatggccgagtacttccgcgacgagaaggacgaaaacggcaagggtaaggacgtcctgctgttcgtcgacaacatctaccgttacaccctggccggtaccgaagtgtcggcactgctgggccgcatgccgtccgccgtgggttaccagccgaccctggccgaggaaatgggcgtcctgcaggagcgcatcacctcgaccaagaacggttcgatcacctcgatccaggccgtctacgttcccgcggacgacctgaccgacccgtcgccggcgaccaccttcgcccacctggactcgaccgtgaccctgtcgcgttcgatcgcctcgctgggtatctacccggccgtcgatccgctggactccaccagccgccagatggatccgctggtcatcggccacgagcactacgacaccgcccagcgcgtccagcagaccctgcagaagtacaaggaactgaaggacatcatcgcgatcctgggcatggacgagctgtccgagcaagacaagcaggccgtgtcgcgcgcccgcaagatcgagcgcttcttcagccagccgttccacgtggccgaagtgttcaccggttcgccgggcaagtacgtgccgctgaaggacaccatccgtggcttcaaggccatcgtcgatggcgagtacgaccacctgccggagcaggcgttctacatggtcggcggcatcgaagaagcggtcgagaaggccaagaagatggccgagaaggcctga

SEQ ID NO: 495810 - DNA, 864 bp, Stenotrophomonas maltophilia
atggcaagcggacgcgaaatcaaaaccaagatcaagagcgtgcaaaacacccgcaaggtgacgcgcgccctggaaatggtctcggcctccaagatccgcaaggcgcaggatcggatgaagacctcgcgtccgtacgcgcaggcgatgaagcaggtgatcggtcatctggcccaggccagcaccgactaccagcatccgttcctggtcgagcgcgagcaggtcaagcgggtcggtttcatcgtgatctcctccgatcgcggtctggccggcggcctgaacaacaacctgttccgcaagatgctgggcgaagccaaggcatggcaggacaagggtgccgaagtggacctggtgaccatcggccagaaggcttcgaccttcttccgccgcgtgaaggtcaacatggtcggcagcgtgacccacatcggcgacgtgccgaagctggaatcgctgatcggtgtgatcaaggtcatgctcgacgccttcaccgaaggcaggatcgaccgcgtgtacctggtctacaaccgcttcgtgaacaccatggtgcagaaggccagcttcgatcagctgctgccgctgccgccggctgagaagcaggtcgctcaccacgactgggactacctgtacgaacccgatgccgcgaccgtgctcgagcacgtgatgacgcgttacatcgagtcgctggtgtaccaggcactgctggaaaacgtcgcctccgagcatgcggcacgcatggttgcgatgaaggcggcgagcgacaacgccaacaagctgatcggcaccctgcagctcgtctacaacaaggcgcgccaggcagcgatcacccaggaaatctccgaaatcgtcggcggcgcggcagcagtctga

SEQ ID NO: 495811 - DNA, 1548 bp, Stenotrophomonas maltophilia
atggcaaccacgctcaacccctccgaaatcagcgaactgatcaagaaccgcatcgagaaggtcaagctggccgcggaatcgcgcaacgaaggcaccgtgaccagcgtgtccgacggcatcgtgcgcatcttcggtctggccgacgtgatgcagggcgaaatgatcgaactgccgaacaacaccttcgccctggccctgaacctggagcgcgactcggtcggcgccgtggtcctgggtgactacgagcacctgcgcgaaggcgacgtcgccaagaccaccggccgcatcctggaagtgccggtcggcccggaactgctgggccgcgtcgtgaacgcgctgggcgagccgatcgacggcaagggcccgctgggcaccgacctgaccgctccggtggaacgcgttgctccgggcgtgatctggcgcaagtcggtcgaccagccggtgcagaccggttacaagtcggtcgactcgatgatcccgatcggccgtggccagcgcgagctgatcatcggtgaccgccagaccggcaagaccgccatggcgatcgatgcggtgatcaaccagaagggcaccggcatcaagtgcgtgtacgttgcgatcggccagaaggcgtcgaccatcgccaacatcgtgcgcaagctggaagagaacggcgcgctggcccacaccatcgtggtggccgcgaccgcttccgaatcggctgccatgcagtacatcagcgcctactcgggctgcaccatgggtgagtacttcatggaccgcggcgaagacgcgctgatcgtgtacgacgatctgtccaagcaggccgttgcctaccgccagatctcgctgctgctgaagcgtccgccgggccgtgaagcctacccgggtgacgtgttctacctgcactcccgtctgctcgagcgcgctgcccgcgtgtccgaggaatacgtcgagaagttcaccgaaggcaaggtcaccggcaagaccggttcgctgaccgcgctgccgatcatcgagacccaggccggcgacgtgtccgccttcgttccgaccaacgtgatctcgatcaccgacggccagatcttcctggaaaccgacctgttcaacgccggcatccgtccggccgtgaacgccggtatctcggtgtcgcgcgtcggtggctcggcccagaccaagatcatcaagaagctgtcgggcggcatccgtatctcgctggcccagtaccgcgagctggctgcgttcgcgcagttcgcctcggacctggacgaagcgacccgcaagcagctggagcgtggccagcgcgtcaccgagctgatgaagcagaagcagtacgcgccgatgtcgatcgccaaccaggcgctgtcgatctacgccgtcaacgagggttacctcgacgacgtgccggtcaacaagctgctggcgttcgaagaaggcctgcacgcccacttcgccaacacccagggcgagctgatcagcaaggtcaacgccaccggcggttgggacaacgacatcgaaggtgccttcaagaagggcatcgccgagttcaagaccaccggcagctggtaa

SEQ ID NO: 495812 - DNA, 528 bp, Stenotrophomonas maltophilia
atgagccaggccctcacgcttgcccgcccgtacgcccgcgccgcgttcgcgaccgcgcgcgacgaaggtgcgttcgcgccgtggtcggacgccctggcgttctccgcccacgtcgccgccgacccgcgcgtggcggccctgctcgccaacccggagctgggtcgtgacgacgccgtcgccctgctggcgccggtgtcgcacggcgagacctactcgcgcttcctggccatcctggccgaatcgcatcgtctgccgctgctgccggaaatctccggcatgttcgacgccctgcgcgccgaagccgagcacgtggtcaaggccacggtgacctcggcttccgagctgtcggccggcgagctggacgcgatcaaggtcgcgctgcgcaagcgcttcaaccgcgaggtcgacgtgaccaccgcggtcgatgcttcgctgatcggcggcgccgtgatcgacgccggcgacgtggtcatcgatggttcgctgaagggcaagctggcccgtctgcagaccgcgctcgctaactga

SEQ ID NO: 495813 - DNA, 522 bp, Stenotrophomonas maltophilia
atgtgccgcttcggcggcacgtccaccccgaaaccagcgatcgagctaaccatgaatatcaatttcacccttcttgcgcaggcgctggccttcgctggtctgatctggatcatcgcgaccaagatctggccgccgctgatgaacgcgatcgaagagcgccagcagaagattgctgaaggcctcgctgctgccgaccgcagccagaaagatctggcccaggcgcaggagaaggtcaacgaagcgctgaaggaagcccgcaccaaggccaacgagatcatcgatcaggcccacgcgcgtgccaaccagatcgttgatgcagcccgtaacgaagcgatcaccgaagccacccgtcagaaggaactggcccaggctgaaatcgacgccgccgccaaccgtgcccgtgaagatctgcgcaagcaggtgtccgcgctggccgtgaccggtgccgaaaagctgctcaagcgcgaaatcgacgccaacgcccacaaggcgctgctcgacgagctggcctcggagatctaa

SEQ ID NO: 495814 - DNA, 306 bp, Stenotrophomonas maltophilia
atgtacttcgccgtcctgaccaacttcgcgcagattcagagctccaccgcccttgccgtcggcatcatgatcggcctggccgcgctgggcgccggtctgggtctggccatcatggctggtaagttcctggagtcggccgcgcgccagccggaactgatcccggtcctgcaggtccgcatgttcatcaccgccggcctgatcgacgccgcgttcatcatctcggtcgccgttggcctgctgctggccttcgccaacccgctgtcggctgcctttgctggcgccgtcaccaaggctctggccggctga

SEQ ID NO: 495815 - DNA, 801 bp, Stenotrophomonas maltophilia
atggcgggcgaggctctaacccctaccagctacatccagcatcacctgcacaacctgaccgcaccggtcggcaagggtgagggtatgttctggcatatccacgtcgataccttcctcaccgccgtcctgatgggcctggtgatcgttgtcgcgttctggctggggacccgcaaggccaccgccggcgtgccgggcaagtggcaggccttcgtcgagatctgcctggagttcgtcgaccgccaggccaaggacacctaccacggcaagagcaagctggtcacgccgatcgccatcacgatcttcttctggatcctgttgatgaatctgctgaagatgatcccggccgatttcatcgccaagccgctggaatgggtgggcgtgcactactggaagccggtgccgaccgctgacgtcaatgccaccctcggcatggccatcagcgtgttcttcctgatgctgttcttcgcgctcaagtccaagggcctggtcggcttcgtcaaggaattcctgacggcgccgttcggcaagtggatgatgccgttcaacctgatcctcaacatcgtcgagtggctgagcaagccgatctcgctggcgatgcgactgttcggcaacatgttcggcggcgaaatcgtgttcctgctgatctgggtgctgggtggtgccggtttcttcggtgccatcgcgggtggtgtgttcggcctcggctggatgctgttccacctgctggtgatcccgctgcaggccttcatcttcatgatgctgtcgatcgtgtacctgagcctgtcggaagacgctcactga

SEQ ID NO: 495816 - DNA, 333 bp, Stenotrophomonas maltophilia
atgctgcgcgccgcggtctacccgctggccgcggtggctgtcctggccctggccttcctgctggtaggtccgaagtatgccctcggcgcgctggcgtccggtgtggccatttcggccggcggctgggttgcggcacggatggctctgggcggtggtgcggtggccgcaggatcggcgatggctcgcctgatcattgcgatcgtggccaagtgggtcgtggttttcggcgtcctgctggtggggttcctggtcttcaagctgcctgcattggcgctgttggccggtatcgccgtcggcttgatgttccaggtcctggccatggccaggcgttga

SEQ ID NO: 495817 - DNA, 819 bp, Stenotrophomonas maltophilia
atgcgccccgtacccaccctgctcgccctttccctgctcgctgccggcgcctcgttcgccaatgccgcccacgccgccgaaggcgacgaccgcttcgccatccgtctgggtgcgatgaacatcgattcggacaacacgctgcgtggcagcaccaccgtggccggccaagacatctccctggaccaggacttcaagctgggtggcaaggaatgggagccgcgcatcgacggcatgttccgcatcagcaaccgtcagcgcctgctgttcaactacttcaagtacgacaaggaccgtcgcgagacgcttgaccaaggcatttccttcggcggtgagagcgtgccggccggcagcttcgtgaagggcgagctgaagtaccaggtggccagcctggtctatgactactcggtcgtcgataccgacaccttcgacctgggcctgcagatcggtggcgagtacgccaaggtcagcaccaagggctacgcggacctgggcacggtgtatgaaggccagttcctcaacgagaaggccgatggcgtggcaccggtggtgggtgcgcgcatgaccttcactccgtccgagcgctggatgatcacgctgcagggccagtacctgaacacgcgctggggcagtttcgatgactacaagggcgacctgagccgcgccaatgcgatcgtcgattaccgcttcaccaagaacttcggtgtgttcgccggctacgactggttcaagctggacgtggacaagaagggcagcgacggcacggtcggcctgaagcaggaattcaagggcccggtggccggtatcagcttcgtgttctga

SEQ ID NO: 495818 - DNA, 1803 bp, Stenotrophomonas maltophilia
atggccacgattgaagtcaaggttcccgacatcggcgattacagcgatgtgccggtgatcgaagtgttggtcgccgtcggcgacacggtgaagaaggaccagggtctggtaaccctggagtcggacaaggccaccctggaagtgccgtcctcggccgctggtgtggtcaaggaaatcaaggtcaagctgggcgataccctgtccgaaggcgccgtggtcgtggtgctggacgctgaaggcgccgccgcagccccggccaaggccgccgcgccggctccggccgccccggccagcaagccgccggtgaccccgtcgcaccgcgccccggccgaaccggctgcgccgaagccggcgctgtccagcggcaagccggccgacatcgaatgcgagatggtcgtgctgggctccggcccgggcggctacaccgcagccttccgcgccgccgacgtcggcctggatacggtgctggtcgaacgttacgccagcctcggcggcgtctgcctcaatgtcggctgcatcccgtccaaggcgctgctgcatgctgctgcggtcatcgacgaagtggcccacgccggtgatttcggcgtcgagttcggcaagccgaccatcaccctggacaagctgcgcgcgtacaaggaaaaggtcgtcaaccagctgaccaagggcctggccggcatggccaagcagcgcaaggtgcgcagcgtgcagggcgttggcaggtttgtctcggccaacgagctggaaatcaccgcggctgacggcagcacccagctgctgcgcttccagaaatgcatcatcgccgccggttcgcaggcggtgaagctgccgaacttcccgtgggacgacaagcgcgtgatggattccaccgatgcgctggagctggccgaagtgccgggctcgctgctggtcgtcggcggcggcatcatcggcctggaaatggccaccgtgtacagcgcgctgggcagcaaggtcaccgtggtcgagttcatggaccagctgatgccgggcgccgacaaggacctggtcaagccgctggccgaccgcctgaagaagcagggcatcgacgtgcacctgaagaccaaggcctcgggcgtcaccgccgatgccaagggcatcaccgtgaccttcgaagccgccgaggaaggccaggcgcctgcgctggcgcaaggcaccttcgaccgcgtgctggtggccgtgggccgctcgccgaacggcaagaagatcgatgccgagaaggccggcgtgcaggtcaccgaccgcggcttcatcccggtcgatcggcagatgcgtaccaacgtgccgcacatctttgccatcggcgacatcgtcggcaacccgatgctggcccacaaggccacgcacgagggcaagctggccgctgaagtggcagccggccacaagaaggagtgggtcgcccgcgtgattccgtcggtggcctacaccaacccggaaatcgcctgggtcggcgtgaccgagaccgaagccaaggccaagggcctgaaggtcggcgtggccaagttcccgtgggccgccagtggccgcgcgatcggcatcggtcgcaccgagggcttcaccaagctgatcttcgacgaagagacccaccgcatcatcggtggcgcgatcgtcggcgtgcatgccggcgatctgctggccgagatcggcctggccatcgagatgggtgcggaagcggaagacatcggccacaccatccatgcgcatccgacgctgagcgagtcggtggcgatggcctcggaaatctacgacggcacgatcaccgatctgtacatgccgaagaagaagtaa

SEQ ID NO: 495819 - DNA, 1773 bp, Stenotrophomonas maltophilia
atggccgaaatcaaggaagcacttgtccccgatatcggtgactacagcgatatcccggtaatcgaggtgcttgtcgccgtcggcgacacggtcaagaaggaccagggcctggtgacgctggaaagcgacaaggcgaccatggaagtgccgtcctcggtggcgggcgtggtcaaggagctcaaggtcaaagtgggcgacagcctgtccgaaggcaaggtcgtggccctgatcgaagtggccgaaggcgaagccgaagccgaagccgccaagccggccgctgccgcaccggcaccggcaccggcatcggcaccggcaccggcaccggcaccggcaccggcaccggcaccggccaaggccgctgccccggctgccgccacccagagcgcgccggccgcagctgcgccggccgctccggctgccagcggtggtgcggttgaagccctggtgccggacatcggcgactacgccggcattccggtcatcgaagtgctggtcgccgtgggcgatacggtcaagaaggaccagggcctggtcacgctggaaagcgacaaggccaccatggaagtgccgtcgtctgtggccggtgtggtcaaggagatcaaggtcaaggtgggcgacaatctgtcgcaaggcgacgtggttgccatcatcgaagccgagggcgctgccgcgccggcgccgagcaaggccgctgctgctgccgctccggctgccgcagagaccgccaccaaggtcgagccggtcgctgtgccggcgctgccggacaagctggcggcccgcgagatcgcctcggccggtaccccgtccagcccgccggtgcagttcaatgccgatggcgtgctgccggccaaggtgccgtacgccaccccggcggtgcgcgtgttcgcccgcgagctgggcgtggacctgctgcagatcaacggcaccgagaagggtggccgcatcaccaagggtgacgtacagaagttcgtcaaggccgcgctcagcggtggcgtgccggccgctgccggtggcgccgtcgccgctggtggtggcctgaacctgctgccgtggccgaaggtcgacttcagcaagttcggcgagaccgaagtccagccgctgtcgcgcatcaagaagatctccggtgcgaacctggcccgcaactgggccatgatcccgcacgtcacccagttcgagcaggccgacatcaccgacctggaaggcctgcgcgtggcgttgaacaaggagaacgagaaggccggcatcaagctgaccatgctcgccttcctgatcaaggccagcgccgcagcgctgaagaagttcccggaattcaacgcctcgctcgatgccagcggtgaaaacctgaccctgaagaagtacttccacatcggtttcgccgccgacacgccgaacggcctggtcgtgccggtcatccgcgacgtggacaagaagggtgtggtgcagatcgcgcaggaaaccggcgaactggccaagaaggcacgcgacggcaagctgggcccggcggacatgagcggcggctgcttctcgatcagctcgttgggcggcatcggcggcaccgcgttcaccccgatcgtcaacgcaccggaagtggccatcctcggcgtctccaagtcctccatccagccggtctggaatggcaaggagttcgcgccgaagctgatgctgccgctgtcgctgagctacgaccaccgcgtcatcgacggcgcactggccgcacgcttcaccacgtacctgtcgcaggtactggccgacatgcgccgcgtgctgctgtaa

SEQ ID NO: 495820 - DNA, 516 bp, Stenotrophomonas maltophilia
gtgagcacggcaacgttgtgcattggcctgccagcgcaggtgaacgtcgattgcagggtgctgctgctgggctcgatgccaggcgtggcatccctgcaggagcagcgctactacgcgcatcctcgcaaccgcttctggccgctgatggccgatatctgcggtttcgacgcggatctgccctatgcgcaacggctgcaggcgttgaaggccgcaggcatcggcctgtgggatgtgatcgggcgctgcgagcggcgcggcagcctggatgcggacatcgtgcgtggcacggaagtggccaatgcactgccggaactgatcgccacgttgcctgagctgacgctgatcggctgcaatggcggcgcgtcattgcaggcattccagcgctgggtgttgccgcggctggaggccccgccgaaggtggtcgcgctgccgtcgaccagccctgccaatgcggcgtggtcgttgccgcgcctgcgccaggcctggcagccagtgcacgacgcgcgggcgacatga

SEQ ID NO: 495821 - DNA, 636 bp, Stenotrophomonas maltophilia
atgcgctccatccgtatcctgagtctcgccctgctgacctccgccgccttcgcgccggccgctttcgcccaggacagcagcaccaccgataccgcttcgggcaagcattttgccgttgttggcggcatctcgctgctggagccgaagaacgacccgatcaccggcgtgaagaagaccgacggtggcccggcgccgaccgtcagcttcagctactacatcaacgacaactgggccgttgagctgtggggcgctgccgacaagttcgacaacaagttcaagggcccgaacaacgcccgcctgggttcggtcgagcagcagccggtcgcgctgagcggccagtaccacttcggccaggctgacaacgtgttccgcccgttcgtgggcgtgggctactaccagtcgagcttcagcaacgagaagctgggcaacggcgctgacaccgacatccgcttcaaggatgccaagggcgtgatcggtaccgtcggcgtcgacatgaacatcaactccacctggttcgcccgtgctgacgcccgctacatgcgcgcccgcccggacatcaaggtcggcggcgagaagatcggcgaagccaagatggatccgtggaccgtcggcttcggcatcggcgcccgcttctga

SEQ ID NO: 495822 - DNA, 1506 bp, Stenotrophomonas maltophilia
atggacgacgtcgacctgctggtgatcggtggcggcatcaatggcgccggcatcgcccgtgacgccagcggccgcggcctgcgcgtgctgctgtgcgaacagcatgacctggccgcgcacacctccagcgccagcagcaagctgatccacggcggcctgcgctacctggagcagggcgagttcgggctggtgcgcaaggcgctgggcgaacgcgaggtggtgcgccggcaggcgccccatctggtccatccgctgcgcttcgtcctgccgtgggaaccgcacctgcgcccgcgctggatactgcgcgcggggctgtggctgtacgaccatctgggccggcgcagccccgccttccccgcgtcacgcgcactggaactgcagcacgatccgctcggccagtggctctccccggcgctgcggcaggccttcagctacgccgatgcgcaggtcgatgacgcgcggctggtactgctcaacgccctggatgccgcgcagcggggcgcacaggtgcaggtgcgcagccgctgcatcgacctgcaccccgtgcagggccggtggcgggccgtgctggaatccgccgatggccagcggcaccccgtgaatgcccgcgccgtggtcaatgcggcgggcccgtgggccgggggcctgctggaacggatgcaggcgcgcagcggcggccctgcgctgcgcctggtgcagggcagccacatcgtgctgcgcaggccctggcccgatgacagcgcctgcctgctgcagcagcccgacgggcgggtggtgttcctgctgcctttcgcccacgaccacctgctggtgggcaccaccgataccgactatcgcggtgacccggcgcgctgcagcgtgctgccttccgaggtgacctacctgtgcgaagcggccaatcgctacctgcgtgaccccatcgccccggacgaggtggtctgggcgttcgccggtgtccgtccattgctggccgacccggatccgcgcgcagcgcagctgagccgcgactaccgcctgcaggtgcaggtggacccggcaccggcgctgcatgtactgggcggcaagctgaccacctaccgggtgctggccgaggaggcactggacctgctgcgccctgccctgccacagatgggaccggcctggacggcgcgcggagacccgttgccgggcagcgactggggcgacgccgcacaggcgtgctcgcgcctgctggcgctggcaccgtggttgcccgcaggtatcgcgcgacgctgggccggggcctatggcagtcgcagcgcggaactgctgcagggtgtacacggcctgcacgatctgggcgaggacttcggcggtggcctgcatgcacgcgaagtggacttcctgcgcgaacgcgagtgggcgtgtgacaccgacgatatcctgtggcgccggagcaagctggggttgcgcctggatgctgcgcaggtggcacggctgcaggcgtggatggagggtcggatcccttttccacggaaagggctctga

SEQ ID NO: 495823 - DNA, 1500 bp, Stenotrophomonas maltophilia
atgacgccccgctacgtgctggccatcgaccagggcaccaccagttcgcgcgcgatcctgttcgaccgcgccggcgacatcgtcggcagcgcgcagcgcgagttcgcgcagatcttcccgcagcccggctgggtcgagcatgacccccgcgagatccttaccagcgtctatgccacattgaccgaactgctcagccgcgggcagatcgacccacgccatatcgccgcgctgggcatcaccaaccagcgcgaaaccaccgtggtctgggaccgtgccaccggccagccgatccacaacgccatcgtctggcaatcgcggcagagccacgccatctgcgagcggctgaagtccgccgggcatgaagcactgatccgcgagcggaccgggctgctgatcgacgcctatttctccgcgaccaaggtgcgctggatcctcgaccacgtggatggtgcgcagcagcgcgccgaacgtggtgagctgctgttcggcaccatcgacagctggctggtgtggaacctcagcggtggccaggcacatgtgactgactacagcaatgcggcgcgcacgctgctgttcaacatccacacgctggactgggatgacgacctgctggccctgctcgacattccgcgcgcgatgctgccgcaggtgcgcgactccagcgcggtgtacgcacacacccggccgcagttcttcttcgaccatccgatccccatcgccggcatcgccggtgaccagcaggcggcgctgttcggccaggcttgtttccagccgggcatggtcaagaacacctatggcaccggttgcttcatgttgatgcacaccggcgcgcaggcggtgcggtcgcgcaacggcctgctgaccaccattgcctggggcctggacgggcgcgtggagtacgcgctggagggttcgatcttcatcgccggctcggtggtgcagtggctgcgcgatggactacgcatgatcgaacgcgccagcgacagccaggcgctggctgcgcaggtgcccgacagtggcggcgcctacctggtgccggcgttcgtcggcctcggcgcgccctattggcgcagtgatgtgcgcggtgcgatgttcggcctgacccgcggcacccgcaaggcgcacttcgtgcgcgccgcgctggaagcgatggcctaccagacccgcgatgtactcgatgcgatgcagtccgatgcgggtatcgcgcggaccgagctgcgcgctgatggcggtgcgatcggcaacgacttcctggccggtttccaggccgacattctcggtgtgccgctgctgcggccgcgactgaccgagaccaccgcgctgggtgcggcctatctggccggcctggcagtggggttctggaacagccgcgaacagatcgccgcgcaatggggcctggaccggcgcttcgagccacggatggaggtggcccggcgcgagaaactgtatgcgggatggcagcaggcggtggccgccaccctcgccttccacgtcgattga

SEQ ID NO: 495824 - DNA, 795 bp, Stenotrophomonas maltophilia
atgaaaaagaccctgttgctgcccctgctcgccgctgcgctggccctgaccgcctgcggcaagtccggcgagccctcgcagaagctggtggtggccgccacggccgtgccgcatgccgagatcctcgaggtggtcaagccgatcctcaagcaggaaggcgtggacctggacgtgcgggtgttcaatgactacgtgcagcccaacgaccagctggtgcagaagcaggtggatgcgaactacttccagaccgagccctacctggatgcctacaaccgcgaccgcaagaccgacctggtgaaggtgatcggcgtgcacatcgagccgttcggtgcgtactcgcgcaaggtcaagtcgctggccgagctgcgcgaaggcgccgacgtggtgatcccgaacgacccgagcaacaacagccgcgcgctgatcctgctgcacaaggccggcgtgatcgagctgaaggacccgaccaacgcactggcgacccagcgcgacatcatcgccaatccgaagaacctgaagttccgcgagctggactcggcgatgctgccgcgcgtgctggaccaggtcgacctggccctgatcaataccaactacgcgctggacgcaggcctcaacccgacccaggatgcgctggcgatcgagagcaaggactcgccgtacgtgaatttcctggtcgcgcgcccggacaacaaggacgacgcccgtgtgcagaagctggccaaggccctgaccagcccgcaggtgaaggcgctcatcgagaccaagtacaagggcgcggtactgccggcgttctga

SEQ ID NO: 495825 - DNA, 972 bp, Stenotrophomonas maltophilia
atggaccgatacgaacgcatcaccgccctgcatcgtctgctcaagtccgcgcgctatccggtgacggtggcgaccctgcaggacaagctcggttgttcccgcgccaccgtctaccgcgacctggccttcctgcgcgatgcgctgatggcaccgatcgagggcgacggcgaggcgggcttccgctaccaggctgacgagagcgaccgtttcgagctgcccggcctgtggctcagctcggaggagctgcatgccctgctggcctcgcagcacctgctggcgcggaccggcggtggtgtgctgtcgtcggtgctggcaccgctgcagcaacgcatcgagagcctgctggcggcccaggccggcgtgtccagctggccggtcgaccgcgtgcgggtgattccgcaccgtggccgcaagtttgacgaaggcagcttccgcagcgtcgcatcggccgtgctggagcgccgccagctggcgttcgagtaccgtgcccgttccaccgacgagccgaccaagcgcaccgtctcgccgcagcgcctgacccactatcgcgacaactggtacctggatgcctgggaccatgaccgcgacgccctgcgcagtttcgcggtcgaccgcatccacaaggcgcgggtggtcgacagcaccgcgcgcgacgtcgccgacagcgagctggacgagcagctcggcgccagctacggcatcttctctggcgcgccgaagggctgggcgaccatcctgttcagcgccaaggccgcgcgctgggtggccgacgagcactggcattccaagcagcagggccgcttcctggccgacggccgctatgagctgaaggtgccgtacagcgtctcgcgcgagctgctgatggatgtgctgcattacggctcggatgccgagatcgtcgagcccatgatgctgcgcgagcaggccaaggcgttgcttgagctggccctgagcaactacgaaaactcctga

SEQ ID NO: 495826 - DNA, 603 bp, Stenotrophomonas maltophilia
atgcgccggttgcctgccctgtccctgctggcctgcctgctgctggccgcctgtgatcgcgcgccggcgccggccggcgccgagcccccggtacccgtcgccgatccgacgcaggcggtgctgggcgccagccagcgtttcgcggccttgcgcagcttccacgccgaactggaggtgctgggcgcgccgcagccggtacgcagcgccatggacttcgtcgcgcccgatcgtttccgggtggagacgccggcggggccgcagaccatcatcggcgacaccatgttcctgcaggccgacggtgcgatccgccaggtgccgaccccgcctggcctgcttgagcagtggcgcaacccgctgccggccgatgccctgtccgccgacctgaaggccgaagacctcggcagccagtcgctggacggggtgcagacccggcattaccggctgcgcggcacccagcccggggaacgcctggaatactgggtggatgcccagggcctgccacgccagatcgtgcgcagcggcagcagcaatggccgcagcttccagctgcgcctgcgctattcgcgcttcaacgaccctgaggtgcgcgtcgatctgccctga

SEQ ID NO: 495827 - DNA, 777 bp, Stenotrophomonas maltophilia
atgtccctgcgcgtgtccctgctgatccccctgctgctgtgtgcgccgctcgcatacgcgcaggatgcctccgagctggcggcgatgtcctcgccgtggagcggcagtggtggcgagctcgggtttgcctcggcacgcggcaacagcagcaccgagagcttcaacggccgtctgcgcctgcgctacaccgacggtgactgggtgcacagcatggacctgttcggcctccgctccagctccaaggtgaccgaaaccaacgacgacggcaccaccacccgccgcaacaacaccaccgccaaccgctacaccggcagtgccggcagcgcgctgcagctgggcgaacaccgccagctgaccgcgacggtgcgtacggaacgcgacgacttcgccacctacgaccgccagagctcgttcggtctgggttacggcacccgcctgtggaacaccgagcgcttctcgttcgacgcgcagatcggccccggtgtgcgccgcacccacagcaccgaggacgaccgcacccgcaccggcctgatcggccgtggcctgttcgacatgaagtattcgctgactgacaacaccgacctggtcaacacgctgctggtcgaatccggttcgtacaacaccttcggccagaacgacttcggtgtctcggtgagcatgaacgagcacctggcactgaaggccggctggcaggcgcgttacaacagtgacgtggccgaggacaagcgcaagaccgatacgctgaccacgatgaacgtggtctacaagttcaagtaa

SEQ ID NO: 495828 - DNA, 912 bp, Stenotrophomonas maltophilia
atggaaaccgtccgcatcgccacccgcaagagcccgctcgccctctggcaaagcgaacatgtcgccaaccgcctgcgccaggcccatcccgggctgcatgtggaactggtgccgatgagcacccgcggtgacgaggtgctcgaccgctcgctggccgccatcggtggcaagggcctgttcctgaaggagctggagctggccatgctgcgcggtgaggccgactgcgccgtgcactcgctgaaggatgtgccgatgcaactggacgaacccttcgcgctgccggcgatgctgacccgccacgatccagccgatggtttcgtctccaacctgtacgcctcgctggacgcgctgccgatcggtgcgcgggtcggcacctcatcgctgcgccgccaggcccagctgcgcgcgctgcgcccggatctggaattgctggacctgcgcggcaacgtcaacacccgcctggccaagctcgacaatggtggttacgacgccatcgtgctggccgtggccggcctggagcgcctgggcctgggcgggcgcatcgtcgcgcgcctgcagccgccgcagtggctgccggcaccggcgcagggcgcggtggcggtggagtgcgacggtggcaatacgcgcctgatggcgctgttcgccacgcttgatgacgccgctacgcgcgcctgcgtggaagccgagcgggcgatgaaccgcgcgttgcatggcagctgccacgtgccggtggcggccatcgcgcagtggcagggcgacgacctgcacctgcagggcctggtcggcagtgccagcgatggtcgtgcggtgcgcgccgaggcggtgggcccggcccgggatccggaggcgctgggccagcgcgtggcgaagatgctgctggaagccggtgccggcgaactgctgaacgtctga

SEQ ID NO: 495829 - DNA, 756 bp, Stenotrophomonas maltophilia
atgcgccgcaagatcgtcgccggaaactggaagctgcatggcagccgtcaattcgccaatgaactgctggggcaggtggccgccgggctgccgctggagggggtggacgtggtgatcctgccgccgctgccgtacctgggcgagctggtcgaggacttcggcgagaccagcctggccttcggcgcgcaggacgtgagcagcaacgagaagggcgcctataccggcgaggtctgcgcggccatgctggtcgaggtcggggcccgctatggcctggtcggccattccgagcgccgccagtatcaccatgaaagcagcgagctggtcgcgcgcaagttcgccgccgcccagcatgccggcctggtgccggtgctgtgcgtgggcgagaccctggagcagcgcgaggccgggcagaccgaagcggtcatcgccagccagctggcgccggtgcttgaactggtcggcgcggccggctttgccaaggccgtggtcgcctacgagccggtctgggccatcggtaccggccgtaccgctacaaaggagcaggcacagcaggtgcacgcgttcatccgtggcgaagttgcgcgcttcgatgctagaattgctgattcactgcccattgtttacggcggtagcgtgaagcccgacaatgccggggaactgttcgcgcagccggatgtcgatggtgggctggtcggcggcgcctccctggtggccgcggacttcctggccatcgcacgggcggcggccgcgaactaa

SEQ ID NO: 495830 - DNA, 438 bp, Stenotrophomonas maltophilia
atgctgatgttgatcctcaatgtcgtctacgtgctggtcgctgtggccatgatcgcgctgatcctgatgcagcgtggctcgggtgcggcggcgggttcgggctttggtgccggcgcctcgggcacggtgttcggtgcgcgtggcgcctcgaacttcctgtccaagtcgaccaagtggctggccgtcgtgttcttcggcatcagtctcttcatggcctggtatgccggtcacggcacccgtccggcggccgaccaggacctgggcctgatgtccgccccggcggccagcgcgccggcggctccggcgggcgaactgccggccgttccgaaggccgatccggtcccggccgccccggttccggcggcgaatgtgccggctcaggcggaatcttcggtttctggtgaagaaaagccttcggaaggctcccagaaacactga

SEQ ID NO: 495831 - DNA, 405 bp, Stenotrophomonas maltophilia
atgccaaagcgcctgcaggcgcggcggcagaggcaagagagaatcgctgtgctggccgaatatttgccttctctgctgtttctgatcgttgccaccggtatcggcattacgctgatgctggttggtcgattcctcggtccccgccgccccgatctggaaaagctgtcgccgtacgagtgcggcttcgaggccttcgaagacgcgcgcatgaagttcgacgtgcgctactacctgatcgcgatccagttcatcgtcttcgacctggaaatcatcttcatcgtgccgtggacccaggtcttcatggagctgggcgcccgttcgctcatcaccatggggctgttcgtcggcatgctgttcctcggtttcatttacgtctggaagaagggagcgctggaatgggagtga

SEQ ID NO: 495832 - DNA, 555 bp, Stenotrophomonas maltophilia
atgggagtgattcagactctcgatggcctcatgaacaacccgtcgccggaaggccgggttgatgacatcctgcggccggaaggcgacaacccgctgctggaaaagggcttcgtcaccaccagcgtcgacgcactgctgaactgggcgcgcaccggctcgatgtggccgatgaccttcggcctggcctgctgcgcggtcgagatgatgcacgccggcgccgcgcgcctggaccttgaccgttacggcgtggtgttccgcccgtcgccgcgtcagtccgacgtgatgatcgtggccggcaccctggtcaacaagatggccccggcgctgcgcaaggtctacgaccagatgccggacccgaagtgggtcatctcgatgggtagctgtgccaacggtggtggctattaccactactcctattctgtcgtgcgcggctgtgatcgcgtggtgccggtggacgtctacgtcccgggctgcccgccgaccgccgaggcgctggtgtacgggatcctgcagctgcagaagaagatctggcgtacacagaccatcgcccgctga

SEQ ID NO: 495833 - DNA, 750 bp, Stenotrophomonas maltophilia
atggcagagcaagcatccttcatcgaccgactctccgcacgtttcgctggtgcgaaggtcatcgtggtcgaaccccgcggcgaagtgacgctggaagtgcctgccgccgagtggcacgccaccgccctggcgctgcgtgacgagtttggttttgagcaggccgtggatctgtgcggcgtcgactacctcggttatggctccgacgaatgggacaccgccgacgtgtcctcgcagggcttcagccgtggcgtcgaaggcaaggcccagggccgcttcgcgtggggcgagttccccaccgaggaaaacggtgccgacggtgcccgcccgcagcacatgccgacccagcgtttcgccgtggtcgcccagctgcgctcgtaccagcacaacctgatgatgcacctgcgctgcttcgcccctgacgaagcgctgccggtggtgtcctcgctgaccagcgtgtggccgggcctgaactggttcgagcgcgaagcgttcgacctgtacggcgtgatcttcgaaggccacccggacctgcgccggatcctgaccgactacggtttcgtcggccatccgttccgcaaggacttcccgctgatcggcaatgtcgaagtccgctacgacgaagaaaagaagcgcgtgatctacgaaccggtcacctcggtggagccgcgtgtcggcgtgccgcgcgtgatccgtgacgacgcccgtctgcagaccgcagccggtgagcgcgcgcaggaggcagtgaagtga

SEQ ID NO: 495834 - DNA, 1308 bp, Stenotrophomonas maltophilia
gtgagccacgtacaccaggccggcgaagcgttcgccagcaacgccgccgaaagccggcaggaaatccgcaactacaccatgaacttcggcccgcagcatccggccgctcacggtgtgctgcgcctgatcctggaaatggacggcgaaaccatcatgcgtgccgacccgcacgtgggtctgctgcaccgtggcaccgagaagctggccgagtccaagccgttcaaccagtcgatcggctacatggatcgcctcgactacgtgtcgatgatgtgcaacgagcacgcctacgtgcgcgcgatcgagaccctgatgggcatcgaggcgccggagcgtgcgcagtacatccgcaccatgtacgacgagatcacccgcatcctcaatcacctgatgtggctgggctccaacgcgctcgacctgggtgcgatggccgtgatgctgtatgccttccgcgagcgcgaagagctgatggactgctatgaagcggtctccggcgcgcgcatgcacgcggcgtactaccgcccgggcggtgtctaccgcgacctgccggaccacatgccgaagtacaaggaatcgcgctggcacaagggcaaggcgctgaagcagctcaatgcttcgcgcgaaggctcgctgctggacttcctggagaacttcaccgtcgagttccccaagcgcatcgacgaatacgaaaccctgctgaccgacaaccgcatctggaagcagcgtaccgtcggcatcggcgtggtcactccggaactggcgcaccagtggggcatgaccggcgtgatgctgcgtggctcgggcgtggcctgggacctgcgcaagaagcgcccgtacgccaagtacgatgccgtcgatttcgacatcccgctgggcaaggaaggcgactgctacgaccgctacctggtccgcgtcgccgaaatgcgcgaatccaaccgcatcatcaagcagtgcgtggcgtggctgaaggccaaccccggcccggtcatggtcaagaacttcaaggtcgctccgcccaagcgcgaggacatgaaggacgacatggaagcgctgatccaccacttcaagctgttcagcgaaggctattgcgtaccggcgggtgaaacctatgcggccgtggaagcgcccaagggcgaattcggctgctacctggtctccgatggcgccaacaagcccttccgcgtgcacctgcgcgcaccgggcttcgcccacctgtcctcgatcgattcgatcgtgcgcggccacatgctggccgacgtggtggcgatgatcggtacctatgacctggtgttcggcgaggttgaccggtaa

SEQ ID NO: 495835 - DNA, 528 bp, Stenotrophomonas maltophilia
atgaaggcgacaggtaatttcgaggcggcgcgcgacgtcgacccgatggtggtgctgagcgacaagacccgcgctcacatcgatcactggctgtccaagttcccgccggaccgcaagcgctctgccgtgctgcagggcctgcatgcggcccaggagcagaaccagggctggctgaccgacgagctgatcgccgccgtcgccaagtacctcgacctgccgccggtgtgggcctacgaggtcgccagcttctactcgatgttcgagaccgagaaggtgggccgcaacaacgtggccatctgcaccaacatcagctgctggctcaatggcgccgaggacatcgtccgccattgcgagaagaagctgggcatcaagcacggtgaatcgaccccggacggccgcgtctacctcaagcgcgaggaagagtgcctggccggttgtggcggcgcgccgatgatggtcatcaacggtcactaccatgagcgtctgaccctggaaaaggtcgacgagctgctggacgggctggagtaa

SEQ ID NO: 495836 - DNA, 1341 bp, Stenotrophomonas maltophilia
atggcacatcaccacgaatccaagggtccggtcggccccgcgccgctgccgcaccaggtggtctacaccaccctgcattacgacaccccgtggtcgtacgaaagctacctgaagaccggtggctacgccgccctgcgcaagatcctcgaagagaagatcccgccggagcaggtcatcgagatggtcaaggcctcgggcctgcgcggccgcggtggcgcaggcttcccgaccggcctgaagtggtccttcatgcccaagggcaacatgcagaagtacatcctctgcaactcggacgaatccgagccgggcacctgcaaggaccgcgacatcctgcgttacaacccgcattcggtggtggaaggcatggcgattgcttgctacgccaccggttcgaccgtgggttacaactacctgcgcggtgagttccaccacgagccgttcgagcacttcgagcaggccctggccgacgcctatgcgaacggctggctgggcaagaacatcctcggcagcggcgtagacatcgacatctacggcgcgctgggcgccggcgcctacatctgcggcgaagaaaccgcgctgatggagtcgctggagggcaagaagggccagccgcgctacaagccgccgttcccggccaatttcggcctgtatggcaagccgtcgacgatcaacaacaccgaaacctacggttcggtgccggcgatcatccgcaacggtccggagtggttcaagggcctgagcctgaccgccaacggcggtccgaagtgcttctcggtgtccggctgcgtgcagaacggcggcaacttcgaagtgccgctcggcaccaaattccacgacctgctggaaatggccggtggcctgcgtccgggccgcacgctgaagggcgcgatcccgggcggcgtgtcgatgccggtgctgaccgcggccgagctggaggacctgccgatggactacgacaccatccgtgcactgggctccggcctgggttcgggcgcgatcgtggtgctcgacgacagcgtctgctgcgtcaagttcgcctgccgcatcagccagttcttccacaaggaatcctgcggccagtgcaccccgtgccgtgaaggtaccggctggatgcaccgcgtgctggagcgcatcgtcgccggcaaggccacgatggaagacctgcaccagctgaaggcggtggccgggcagatcgaaggccacaccatctgtgcgttcggtgaagcggctgcatggcccatccagggcttcctgcgccagttctgggacgaattcgagtactacatcgtcaacggtcattcgatggttgacggcaagaaggtggaggcagccgccgcatga

SEQ ID NO: 495837 - DNA, 2235 bp, Stenotrophomonas maltophilia
atgagcgcgcaacccgtaaacccgaacgtgccaccggatcacgtgaccatcgagatcgatggcaagtcgctggtcgtgcccaagggttcgatgatcatccaggcggccgacaaggccggtattccgattccgcgcttctgctaccacgagaagctgccgatcgccgccaactgccgcatgtgcctggtggacgtggagaagtcgccgaagccggcgccggcctgcgccaccccggtgatggacggcatgaaggtcgccacccgtagcgaaaaggcactgaagttccagcgctcggtgatggagttcctgctcatcaaccacccgctggactgcccgatctgcgatcagggcggcgagtgcgagctgcaggacgtgtcgttgggctatggccgttcggtcagccgcttcaacgagcgcaagcgcgtggtgccggacgaggacatgggcccgctggtcgccaccgagatgacccgctgcatccagtgcacccgctgcgtccgcttcaccgccgacgttgccggtacctacgaactgggtggcatgtaccgcggtgagaacctgcagatcggcaccttcgacggcaagccgctgaccaccgagctgtccggcaacgtcgtcgacgtctgcccggtcggcgcgctgaccaacaaggtgttccagttccgcgcccgtccgtgggaactgaccgcgcgcgaatcgctgggctaccacgacgcgatgggttcgaacctgttcctgcacgtgcgtcgcggtgaagtgctgcgcaccgtgccgcgcgacaacgaagcggtgaacgagtgctggctgtccgaccgtgaccgctactcgcaccagggcctgtacagcgaagaccgtgcggtcaagccgctgcgcaaggtcaatggcgagtggaaggaagtgagctgggctgaaggcctggccgcggccgccgagatcctcaaggccaaccagggcgacaacctgggcgtgctggtgcacccgtccacctcgaacgaggaaggcgcgttgctggcccgcctggccaagggcctgggcacgggcaacatcgaccaccgcatcaacaaccgcgatttctccgacgccgcaaccgccgaagtgttcggcctgccgctggccgaaatcgaaggcgctgaccgcatcgtcgttctgggcagcaacatccgccacgaactgccgctgctgcacgcccgcctgcgcaaggcgcagaccaccaagggcgcgaagatccatgtcgtcaacccggtggacttcgacttcgccttcagcatcgccggcaagcagatcgtcgcaccgtcgaagttcgtcgacgcgctggccaacgccgagctgcgttcggcagtgcagggcggcaacaacaccgtgctgatcgtcggtggcatcgccgaaaaccacccgcaggctgccgcgatccgcgctgctgcgcgtgagttcgccgccgccaccggtgccaagctgtgccgcatcccgcagggcgccaacgccgttggcctgacccgcgccggtgtgctgccggctggcaaggacgtcgccgcgatgctggcgcagccgcgccaggcctatgtggtgtacggccttgagccgggcctggacttcgccgatgcacctgccgcgcgcaaggcgctggccggtgcccaggtggtggctttcagccagttcgcctgtgcctcgacccgcgacgtcgccgacgtgatcctgccgatcggtgcgctgccggaaatcgacgccaccctgaccaaccttgatggtcgcgagcagtcggcacgtgccggcggcaagcttccgggcgaggcccgtgagggctggcgcgtgctgcgcgccctgggcggcgacctggccttggccggattcgagttcatcgacctggccggcctgcgcgccagcctggccccggtaccggtcaccgttgccgcctcggcacagccggcggttgctggcgaaggcctggaagtggctttgaccgccgcgatctaccgcaccgatgcggtggtccgtcgcgcgccggcactgcagtcgcatccgctcaacaacgccccgcgcatcgtgctgaacgctgaagatgccgctcgcctgcagctgcaggaagggcagatggccaaggtcggcaccgatgccggcaaggccaccctgccagtggtggtcgacgcccgcgtcgctgcgggttcggtctggattgaatcgggccacggcgcgaccgcgccgctgggtgccgctcgcgtaacggtggtggctgcatga

SEQ ID NO: 495838 - DNA, 1095 bp, Stenotrophomonas maltophilia
atgaacgaattgctgttgaacgcggtcgacccgctgcaccagtggctgcttggcctcggtgacatcggcgcgctgatctggatcatcctgaagatcctggtgatcaccgttccggtgatcatctcggtggccttctacgtggtctgggaacgcaagctgatcggttggatgcatgtccgccacggcccgatgtacgtgggcatgggcatcttccaggccttcgccgacgtcttcaagctgctgttcaaggaagtggtccagccgagcagcgccaacaaggcgatctacctgctggccccgctgatcaccctggccccggccttcgcggcctggtcggtggtgcccttcgattcgcagatcgtgctgtccaatgccaatgccggcctgctgtacctgctggcgatgacctcgctgggcatctacggcatcatcctggccggttgggcgtccaactcgaagtatgcgttcctgggtgcgatgcgcgcctcggcgcagatgatcagctacgaaatcgccatgggcttcgccctggtcggcgtgatgatcgcctcgggcagcctgaacctgagcaacatcgtgatggcgcaggccggcagttccggcttcttcgactggttcctgctgccgctgttcccgctgttcgtcatctactgggtctcgggcgtggctgaaaccaaccgcgcgccgttcgacgtggtggaaggcgaatcggaaatcgtcgccggccacatggtcgaatactccggcggtgccttcgccctgttcttcctggccgaatacgcgaacatgatcctgatcagcttcctgatctcgatcttcttcctcggcggctggctgagcccggtccagggctgggtcaacttcggcgatgtctcgccgctggtcgactggatctggaaggggggcgcgccgtggctgttcgtcaaggtgttcttcttcgccagtgcctacatctggttccgtgccagcttcccgcgcttccgctacgaccagatcatgcgcctgggctggaaggtcttcatcccgctggccattctgtggatcgcggttaccgccgtcatggtgttcttcggcgtgattcaaaagggcgtctaa

SEQ ID NO: 495839 - DNA, 489 bp, Stenotrophomonas maltophilia
atgaacaggattacccattacttcaagagcctgctgctgctcgaactgctggcgggcctctggctgacgctgaagtacagcttcaagccgaagtacacgatgatgtacccgatggagaagttcccgcagtcgccgcgcttccgtggcctgcatgcgctgcgccgttatcccaacggcgaagagcgctgcatcgcctgcaagctgtgcgaagcggtgtgcccggcgctggccatcaccatcgactcggccaagcgcgaggacggcacccgccgcaccacgcgttatgacatcgacctgttcaagtgcatcttctgtggcttctgtgaggaaagctgcccggtggactcgatcgtcgaaacccacatcctcgagtaccacttcgagaatcgtggcgaaaacatcgttaccaagccgcagctgctggccctgggcgaccgtctcgaaaacgagatcgccgagcgtcgcgccgccgatgccgcttaccgctga

SEQ ID NO: 495840 - DNA, 657 bp, Stenotrophomonas maltophilia
atggattgggtaaatatcgctttctgggtgttcgccatcgcggcaacggtttcggccggtgcggtgatcagcgtgcgcaacccggttcacgccgtgctctgcctggtgctgaccttcttctccatcgcctgcgtgtggctgctggtgggcgccgagttcctcggtgtggcgctggtgctggtctacgtcggtgcggtgatggtgctgttcctgttcgtggtgatgatgctggacatcgaccccaccaagctgcgtgagggctgggtgcgctacctgccggtcggcctgattgtcgcggtcgcgatgctggcgcagatgctgatcctgatcggggtcaaggcgcgttcggtcacgccgttcccggccgacaacgccgctgcggtcgccgccgacagctccaacatcacctggctggcacgcacgctgttcaccgagtacctgctgccgttcgagttcgccgccgtcatcctgaccgtggccgtggttgccgccgtgatgctgaccctgcgtcgccgtaccggcgtgaagagccagaacccgggccagcagaccatggtcaaggccggccagcgcctgcgcatggtcaagatgggtgccgaagcaccggtcgtgcacagcaacagcaagccggtcgccggcgaggagacccagccgtga

SEQ ID NO: 495841 - DNA, 306 bp, Stenotrophomonas maltophilia
gtgatcacccttggccatatcctcgcgctgggcgcggtgctgttcgccatcagcctggccggtatcttcctcaaccggaagaacgtcatcgtcctgctgatgtcgatcgagctgatgctgctgtcggtgaacatcaatttcgtcggcttctcgcgtcagctgggcgatccgtccggccagctgttcgtgttcttcatcctgaccgtcgccgccgcggaagccgccatcggcctggcgatcctggtgaccctgttccgtacacgccgcacgatcaatgtcggcgaagtcgattcgttgaagggctga

SEQ ID NO: 495842 - DNA, 2175 bp, Stenotrophomonas maltophilia
atggaaatcactctctccaagagtctgttgatcgcagtggtgctcgcaccgctgttcggcagcatcatcgccggcctgttcggtcgccaggtcaagcgctttggcgcgcagaccatcaccatcctcggcgtcgcggtggcctgcggcctgtcgatgtacacgctctaccagctgctgtggggcggggcgcagccgttcaaccagaacatctacacgttcttcgaagtcggccagtactcggcccacgtcggtttcatggtcgacaagctgaccgcgatgatgatggtggtggtgaccttcgtgtcgctgctggtccacatctacacgatcggctacatgcaggacgatccgggctaccagcggttcttcagctacatctcgctgttcaccttctcgatgctcaccctggtgatgagcaacaacttcctgcagctgttcttcggctgggaagcggtgggcctggtgtcgtacctgctgatcggcttctggttcaagcgcccgaccgcgatcttcgccaacatgaaggcgttcctggtcaaccgcgtcggtgacttcggcttcctgctgggcatcgccggcgtgctgtgggtgttcggcaccctggactactcgcaggtgttctcgcaggccggcatgctggccgacccgcgcgcccagctgcagatctgggacggcacgctgctgggcatgcagctgctgaacgagccggtgatctggtcgatcgccaccgtcatctgcatctgcctattcatcggtgccatgggcaagtcggcccaggtcccgctgcacgtgtggctgccggactcgatggaaggcccgaccccgatctcggcactgatccacgccgcgacgatggtgaccgccggtatcttcatggtcacccgcatgtcgccgctgttcgagctgtcgcagaccgcgctgaacttcgtgctgttcatcggtgccaccaccgcgttcttcactggcctgatcggcatcgtgcagaacgacatcaagcgcgtggtcgcgtactcgaccctgtcgcagctgggctacatgacggttgcactgggcgtgtcggcctattcggctgccgtgttccacctgatgacccacgccttcttcaaggccctgctgttcctgggcgccggctcggtcatcatcgcgatgcaccacgagcaggacatgcgcaagatgggcggcctgcgcaagtacatgccgatcaccttcatcaccatgtggatcggtaccctggcgctggtcggcacgccgttcttctccggcttctactcgaaggacaccatcatcgaggcggccgagctgcacgcgcacctgtccaacagctgggtggccacctatggctactgggcggtgctgggtggcgtgatcgtcaccagcttctacagcttccgcctgctgttcctgaccttccacggcaaggagcgtttccgcgacgcgcatgacgatcacggccatggccatgacgatcaccacgccgccgacgcccaccacggcgatgcacaccatggtgatggccacgacgaccacggccatggccacggtccgcacgagccgcacgaaaccccgtgggtggtgaccctgccgctgatcctgctggccatcccgtcgatcgccatcggtttcttcagcatcggcccgatgctgtacggcaccgactgggccggcaaccacgcgcacgatgccatcaagggccaggcgcacacgttcttcaccggcatcgtcgacttctacgatccggccaagaacaccatcggcttcctgggtgaggagttccatggcccggtcgccttcgcgctgcatggcatgatggctccggcgttcatgctgaccgttgcgggcttcctgctggccgcactgttctacctgtggaagccggacctgtcgggcaaggcccgcaagacctttgctccgctggtgtcggtgcttgaaaacaagtacggcttcgacaagctgtggatcgatggctttgccggtggcagcgtcaagctgggcaaggtctcgcgctggatcgacagcaacatcgtcgacggcgtggtcaatctctcggcacgtgttgtggacgtcgcagccggcgtgctgcgtcgtacccaatccggtttcctctatcactacgccttcgcgatgatcatcggcctgattgccctgctgggcgtgctgatgcattacctgcgttga

SEQ ID NO: 495843 - DNA, 1509 bp, Stenotrophomonas maltophilia
gtgtcgaactggcctctactcagtgtcctcatctggctgccgatcatcggtggtgccctgatccttgcgatccgtgatgcgcagaccgcccgctgggcgtcgctgggcgtagcggtgctgaccttcgtggcgagcctctcgctgctgagcggctacaacgcaggcgtcgatggtctgcagttcgtcgagacccatgcctggatcccggcgtacaagatcggctacaacctgggcgtggacggcattgccgtggcgctgatcctgctgaccaccctggtcagcgtgcttgccctgatcggcgcctggagcgccatcgacaagcgcgtgaaccagtacgtggcggccttcctgatcctggaaggtgtcaccgtcggcatcttcgccgcgacggacgcgatgctgttctacgtgttcttcgaagcgatgctgatcccgatgttcctgatcatcggtgtctggggcggtccgcgccgcatctacgccgcgctgaagttcttcctgtacaccttcctcggctcggtgctgatgctggtggcgctgatctacctgtacatgaagggcggcagcttccagttggccgacctgtacgcgctgccgctgtcggccaaggagcagacctggatcttcttcgccttcctgatcgccttcgcggtcaaggtgccgatgttcccggtccacacctggctgccggacgcccacgtggaagcgccgaccgccggttcggtgatcctggccgcgatcgccctgaagatcggtggctacggcttcctgcgcttcaacctgccgatcgtcccggacgcatcgcaggaatgggcctggctggtgatcgcgctgtcgctgatcgcggtgatctacgtcggcctggtcgccctggtgcaggacgacatgaagaagctgatcgcctattcgtcgatcgcgcacatgggctttgtcaccctgggcaccttcatcgccctgtggctggtgcgcgaagccggcaacgccgacgccgcgcgcctgggcctgcagggcgccatggtgcagatgatctcgcacggcttcgtgtccggcgcgatgttctcctgcgtcggcgtgctgtacgaccgcatgcacagccgccgcatcgccgattacggcggcgtggtcaacgtgatgccgtggttcgccaccttcgcgatgctgttcttcatggccaacgcgggcctgccgggtaccagcggtttcgttggcgagttcatggtcatcctctcggccttccagcgtaatccgtggatcgccctgggcgcggccaccaccctgatcatcggcgccgcctacaccctgtggctgtacaagcgcatcttcttcggtgaagtggccaacagccatgttgccgaactgaaggacatcaacggccgcgaatggctggtgctgggcgtgttcgccatcggcgtgctggccctgggcatctaccccaagccgctgaccgacctgatggagccctcgatcgcgaagctggcgatgcagatcgcatccagcaagctgctgtaa

SEQ ID NO: 495844 - DNA, 1461 bp, Stenotrophomonas maltophilia
atgaccacctcgccgctgctgccattgaccgccgctgacctgccaccgctcgctcccgagctggtgctgatcggcagcgccttcgccctgatgatcctcgacctgttcgtcagcaaccggaacaagatcgtcacccacctgttctcgctcgctgcgctggccgtggtgctgttcatgctggccaccggcgtgggcgggcagggggaggtcttccatggcatgttcgtgcgcgataccgccgcggacgtgatgaagaccgggatcgtgctgctcagcggcctgaccctggtctacggctggcgctacctgcgtgatcgcgacctgttccagggcgagatcccggtgctgatcctgttcggcaccgccggcatgatgatcctggtctcggccggcagcctgctgatggtctacctgggcctggaactgctggcgctgtgctcctacgccctggtcgccagcaaccgcgaaagcggcctggcgtcggaagcggcgatgaagtacatcgtgctgggttcgctggcctcgggcctgctgctctacggcatgtcgctgatctacggcgccaccggcagcctgcacctggatgtgatccgcgaggccatcccgcactcggaagagcgcgtgctgctgatcaccggtgcggtgttcatgatcgccggcgtcgccttcaagctgggcgccgcgccgttccacatgtggctgccggacgtgtaccagggtgccccggcaccgatcgcactgttcatcagctcggcgccgaagctggccgcgttcggcatggcctaccgcctgctggaaatgggcgtgggcccgctgtcgaccgaactgcagctgctgattgccggcctggccgcggtatcgctggtcatcggcaacctgatggccatcgcgcagagcaacctcaagcgcatgctggcgttctccaccgtctcgcacatcggcttcctgctgatgggcatcgccggtggcggttcgcagggctacgccgccgcgctgttctacgcactggcctacgcgatcatgtccaccgccgccttcggcgcgatcatcgcgctgtcgcgtgccggctttgaagccgagaacatcgaggacttcaagggcctgaacgcccgcaacccgtggatggccggcctggtgctgtgcatcatggcgtcgctggccggcatcccgccgttcctgggcttctggaccaagctggcggtgctgggcgcggccgtcaacggcggcctgctgtggctggccatcctcggcgtgctgtgcgccgtggtcggctgcttctactacctgcgcctcatcaaggtcatgtacttcgatgagccggtgggcgaggccatgccgcgcagcaacgaccgcgtgctgggcgtggtgctgggcgtgaatgccctggcgctgctcgcgctgggcctggcctggaacccgatcatggtctggtgccagcaggcatttgcgcatcttgcataa

SEQ ID NO: 495845 - DNA, 591 bp, Stenotrophomonas maltophilia
gtgagcgacaaggcaaccgacatcgcgaatctgctcgccccgaccgttgtgtcgctgggcctggagctgctgggcgttgagtatctgccggcccccggcggtgcgaccctgcgcctttacatcgacgtgccgctggctgaacagcccgagcgcatcatcaatgtcgacgactgcgagcgggtcagccgcgaagtgtcggcgcagctggacgtcgaggacccgatcagcggcaattacacgctggaagtgtcctcgccgggcgtcgaccgtcctctgttcagcctggagcagttcggccgtcacctcggcgaatcggccaaggtcacgctgaagctgccgcaggacaaccgtcgtcgcctgcagggtcgtatcgaggcgaccgacgaggcggcggggaccatcactttcatcgtcgacaaggccgaagtggtcgtgtcggccgacaacatcgacaaggcacggatcatgcccgactgggtggcgctggggctggccccgagcaagccgaccggtccggcaccgaagcgtccgaagccgaacacgaattcttcttccaacgagccggcggcaaagaagccgcgcgcggagtga

SEQ ID NO: 495846 - DNA, 1512 bp, Stenotrophomonas maltophilia
atgagcaaggaactgttgctggtagtcgacgcagtcgccaacgagaagggcgtgccgcgtgaagtgatcttcgatgccatcgaggccgccctggcctcggcagcgaagaagcgctatcccgacgaggaagtgctgacccgcgtggtcatcgaccacaaggacggcagctacgaaaccttccgccgctgggaagtggtggccgatgacgtggtcatggaatcgccggaccgccagatccgcctgatggatgccgtcgatgaagccgaaggcgtcgaggtcggcgactacatcgaagagcagatcgagaacccggatttcggccgcatcgctgcccaggccgccaagcaggtcatcgtccagcgcgtgcgcgaagccgagcgccagcaggtcgtggatgcgtggaaggatcgcgtgggtgagctgatcaccggcgtggtcaagcgcgccgagcgcggcaacatctatgtcgacctcggtggcaacgccgaaggcttcatcccgaaggacaagggcatcccgcgcgacgtgctgcgcgccggtgaccgcgtgcgcggctacctggccgaagtgcgctcggagccgcgtggcccgcagctgttcatcagccgtgccgccccggaattcatgatcgagctgttcaagctggaagtgccggaagtcggccagggcctggtggaaatcaaggcctgtgcacgtgacccgggcgaccgcgccaagatcgccgtgctggcccacgaccagcgcaccgatccgatcggcgcctgcatcggcatgcgcggttcgcgcgtgcaggccgtgtccaacgagctcaatggcgagcgcgtggacatcgtgctgtggaacgacaaccccgccaacttcgtcatcaacgcgatggcgccggccgaagtgcagtcgatcatcgtcgatgaagacaagcactcgatggacctggccgttgccgaagaccgcctggcccaggcgatcggcaagggcggccagaacgtgcgcctggccagccgcctgaccggctggcagctcaacgtgatgacccaggaccaggtcaccgccaagtcggaagccgagcaggctgcggcccgccagctgttcatggacaagctggaagtggacgaggaaatcgccggcatcctggtcagcgaaggcttcggcaccgtcgaggaaatcgcatatgtcccggtcggcgaactgctggccgtggaaggtttcgacgaggacatcgtcgaagagctgcgcgctcgtgcccgcgatgcgctgctcaatgaggccctggcagtcgaggaaggccttgaagacggccagccggcgcaggacctgctgtccctgaagggcatggacgaagccaccgcatacgcgctggccggccacggcgtgcgtaccagcgaggatctgtccgacctggccgccgacgaggtcatggacttcggcatcgaaggactggatcaggcgcgcgccgctgcgctgatcctggccgcccgtgccgaggagatcgcccgactggaacgcggcgaatga

SEQ ID NO: 495847 - DNA, 2646 bp, Stenotrophomonas maltophilia
atgtcgcagcaaaccaccatccgcaagcttgccgaactggtcaacacgccggtcgaaaaactgctggaacagctggccggtgccggcatgaagttcagcggtcccgaccaggtcgtgaccagctccgagaaggtgaagctcctgggcttccttcgtcgttcgcacggcaagcccgagcaggccccggaagagaccgatcagtctgcgaagaagatcacgctcaaccgccggaagcagcaggaagtgacggtcaattccggtcgcaacaagacgaccgtgaatgtcgaggtgcgccagaagcgtacctacgtcaaggatggtgctcgcgccatgaccccggacgaagagcgcgccgacatcctgcgcaagctggaagagtcgcgtgcccgcaaccttgccgaacagcaggccctggccgagaaggatcgtctgcgcgacgaagccatcgtccgtgcccgtgaggaagaggccgccgccaaggaacgcgccgaggccgaaaagaaggccgccgaggaagctgcggctgccgccaaggcggccgagacgctggctgccagcaagcccaagcgtgctccgatcgacgaaaccgcgccgcgcccgccgcgcaccccggccgcagccccggctgcgccgcgtggtgcaccgccgccgccgcgcaacgacgaccgcaacaaccgcagcgcgccgcgcaacgagcgtggcccgggtgaccgtttcgccggccagatgcacctgtcggccgccgaccgtgcgcgtcgtggcaacagcaacaacagcaacacccggggtcgtccgggcgggcgcaaccaggccggtggccgtcgcgacatgtcgcgcggtggcaacaatgccggcccgcacgccttcgagcgtccgaccgcaccggtggtgcgtgaagtggcgatcggcgacaccatcaccgtggccgacctggcgcagaagctggcgctgaagggcggcgaggtggtcaaggcgctgttcaagatgggcgtgatggcgaccatcacccagtccatcgaccacgacaccgccgcactggtgaccgaagaactcggccacaaggcgatccgtgccaacgacaacgacgccgaagacgcactgctggcctcgaccggtgaaaaccagggcgaagccacccagcgtccgccggtggtcaccatcatgggccacgtcgaccacggcaagacctcgctgctggattacatccgccgcaccaaggtcgccaccggcgaagcgggtggcatcacccagcacatcggcgcttaccacgtcgatacgccgaagggcgtgatcagcttcctggacaccccgggccacgccgccttcacctcgatgcgtgcgcgcggcgccaagctgaccgacatcgtggtgctggtcgtggccgccgacgacggtgtcatgccgcagaccaaggaagcgatccagcacgcccgttcggcgggtgtgccgctgatcgtggcgatcaacaagatcgacaagtccgacgcggatccgatgcgggtcaagaacgaactgctgtccgagcaggtcgtggccgaagacttcggtggtgacacccagatggtggagatctcggccaagaccggcctgggcatcgacgacctgctggacgccatctcgatccaggccgaactgctggaactgaaggcggtcgatgaaggccgcgcctcgggcgtggtgatcgaatcgtcgctggacaagggccgcggcccggtcgcgacggtgctggtgcagcagggccgcctgaagaagggcgactacctggtgtgcggcatccagtacggccgcgtgcgtgcgctgttcgacgaaaccggcaagcagccggagttcgccggcccgtccatcccggtgcaggtcctgggcctgtccggcgtgccggaagctggtgacgacttcgtggtcgtcgaggacgagcgcctggccaaggacgttgcccagcagcgcgagaccaagcgccgtgaatcgcgcctggtggccaccgctggcagccgcatggaagacatcatggcgaccctgggcaagggcgagggccagcaggtcctcaacctggtcatcaaggccgacgtgcagggttcggtgcaggcgctgagccaggcactggtcgcgctgtccaacgaagacatccgcatcaacgtgatccactccggcgtgggtggcatcaccgagtcggacgccaactcggccgccgcttcgaaggccaccgtcatcggcttcaacgtgcgtgcggacgcttcggcccgtcgcatcatcgaatccaatggtgtcgacctgcgttacttctcgatcatctatgacgtgatcgaccaggtgaagcaggtggcctccggtctgctgggcgtggagatccgcgaagagatcatcggtatcgccgaggtccgcgacgtcttccgcagctcgaagctgggtgccgtcgccggctgcatggtcatcgagggtgtggtcaagcgcaacaagccgatccgcgtgctgcgcgacagcgtggtgatcttcgagggcgagctggaatcgctgcgtcgcttcaaggagaacgtcgaggaagtccgcaacggtaccgaatgcggtatcgcggtgaaggcctacaacgacgtcaagccgggtgaccagatcgagtgcttcgaacgtatcgaagtgccgcgcaccctgtaa

SEQ ID NO: 495848 - DNA, 384 bp, Stenotrophomonas maltophilia
gtgcccaagactttccatcgaaccgaccgtgtctccgcccagctgcgccgtgaactcggcaccctggtgcacaacgccgtgcgcgagcacgggttgccctcggtgagcgtgtccgacgtggaaatcacccgcgacatggcccatgccaaggtgttcgtcaccgcgctgatgccggaacgttcggctgaagccgtggccggcctgaaggaactgggctaccgcctgcgcatggacctggcccgcgcgatgaagctgcgccacgtgccggagctgcatttccactacgacgactcggtcgaccgtggtgagcacatcgacaacatcctgcgcgacctgcccgatacgctggccgccgagaagcgtcgcgagagcgacgaagaataa

SEQ ID NO: 495849 - DNA, 909 bp, Stenotrophomonas maltophilia
atgacccgaattcagttccgtcgcctggatggcatcctgctgctcgacaagtcgaccggcatgagctccaacgccgccctgcaggtggcgcgccgcctgttccgcgccgagaagggggggcataccggcagcctcgacccgctggccaccggcctgctgccgctgtgtttcggcgaggcgaccaagatcgctggcctgctgctgggttcggccaaggcctacgacgccgagatcgtgctcggccagaccaccgataccgacgatgccgaaggccaggtgctgctgcagcgcccggtgccggcgatcagtgcccaggccctgcaggctgcgctggcgccgctgaccggcaccatccgccagcgtgccccgatctattcggcgctgaagcagggcggtgaaccgctgtatgtgaaggcccgccgcggtgacgtcatcgaagcgcccgaacgcgaggtgcaggtacacgccatcgaggtgctggagcagcagccggaacggctgcggctgcgcgtgacctgtggttccggcacctatatccgcagcctggcccgcgacctcggcgaacgcctgggctgtggcgcccacatcagcgcgctgcgccggctctgggtcgagccgttccgcgagcctgccatggtcaccctggaccagctgcgggcgatggtcgaggccggtgacgaggctggcatggacgcgttgctgctgccgctggcggccggcctggctgaatacccgagggtcgacctggacgccgaccaggcccaccggttctgcgtgggccagcgccagcgcgacctgtcctggccgcgcggcctggtggccgtgttcggtccggacgatgccgtccagggcctgggccaggtcgacgagagtggcctgctggccccgcagcgccgtttcaacctctga

SEQ ID NO: 495850 - DNA, 261 bp, Stenotrophomonas maltophilia
atgtcgatcgacacccagaaggtcattgaagacaacaagcgcagcgcggctgacaccggctccccggaagtccaggttgcactgctgaccgcccgcatcgaactgctgaccggccacttcaagacccacaagaaggaccaccacagccgccgcggcctgctgcagatggtcaaccgccgtcgcagcctgctcgactacctgaagaagaaggacgtcgagcgctacaaggccctgatcgagaagcttggcctgcgtcgctaa

SEQ ID NO: 495851 - DNA, 2109 bp, Stenotrophomonas maltophilia
gtggcaaaaatcaccaaaaccttccagtacggcaagcacaccgtcacgcttgagaccggcgaagtcgcccgtcaggccagcggcgccgtcatcgtcaagatggacgacaccgtactgctggtcaccgccgtcgccgccaagagcgcgcgcgaaggccaggacttcttcccgctgaccgtcgattatcaggaaaagttctacgccggcggccgtatcccgggtggtttcttcaagcgcgaaggccgtgcgaccgagaaggaaaccctgatctcgcgtctgatcgaccgtccgatccgcccgctgttcccggaagactacaagaacgaagtgcagatcatcgccacggtgatgtcgctgaacccggacgtggacggtgacatcccggccctgatcggtgcttcggctgccctggccctggctggcaccccgttcatgggtccgatcggcgcggccaaggtcggttacaagaacggcgagtacatcctgaacccgaccgtcagcgaactggctgactcgcagctggagctggtcgtcgccggtacctccaacgccgtgctgatggttgaatccgaagccgcgctgctgtccgaagaagtgatgctgggcgccgtgaccttcggtcaccgcgaaatgcagaaggtcatcaacgcgatcaacgagctgaccgtcgaagccggcaccaagccgtcgacctgggaagccccggccaagaacgaagcgctgatctccgccctgaaggaagccatcggcccgcgcctgggcgaagccttccaggtgcgtgacaagctgcagcgccgcgacgccatctcggcgatcaagaaggacgtgttcgaagccctggctggtcgcgtggccgctgaaggctggaacccggccgagctgtcgaaggaattcggcgagctggaataccgcaccatgcgtgactcggtgctggacaccaaggtccgtatcgacggccgtgcgctggacaccgtccgcccgatcaccgtgaagaccggcgtgctgccgcgtacccacggttcctcgctgttcacccgtggcgaaacccaggccatcgtgaccatcaccctgggcaccgcccgtgacggccaggtcattgacgccgttgccggtgagtacaaggaaaacttcctgttccactacaacttccctccgttctcggtgggtgagtgcggccgcatgatgggcccgaagcgccgcgaaatcggccacggtcgcctggccaagcgcggcgtgctggctgtcatgccgtcgctggaatccttcccgtacaccatccgcgtcgtctcggaaatcaccgagtcgaacggttcctcgtcgatggcatcggtctgcggctcgtcgctggccctgatggacgccggcgtgccggtgaaggcgccggtggccggtatcgccatgggcctggtcaaggaaggcgagcgcttcgtcgtcctgtccgacatcctgggtgacgaagatcacctgggcgacatggacttcaaggtggccggtaccgctgagggcatttccgccctgcagatggacatcaagatcgaaggcatcaccgaagagatcatgaagcaggctctgcagcaggccaaggctggtcgtctgcacatcctgggcgaaatggcccacggcctgaccgctccgcgtgaagagctgtccgactacgcgccgcgcctgctgaccatcaagatccacccggacaagatccgcgaagtgatcggcaagggtggctcgaccatccaggccatcaccaaggaaaccggcacccagatcgacatccaggatgacggcaccatcgtcatcgcttcggtcaatgccatcgccgcccaggccgccaaggcccgcatcgagcagatcacctcggacgtcgagccgggccgcatctacgaaggcaaggtcgccaagatcatggacttcggtgcgttcgtcacgatcctgccgggcaaggacggtctggtccacgtgtcgcagatctccagcgatcgcgtcgagaaggtcggcgacgtgctgaaggaaggcgatgtggtcaaggtcaaggtgctggaagtcgacaagcagggccgtatccgcctgtcgatgaaggccgtggaagaaggcgacgccgtcagcgccgagtaa

SEQ ID NO: 495852 - DNA, 1191 bp, Stenotrophomonas maltophilia
atgttccgccagaccgtggccgtccttgccgtgctgattgccggtgccgtgcccatcgctgcgcgcgccgcgccggcgccgccgccgatcttcggtgcctactaccccggcggctcggccgagcgctatccggtgtcgagcattcccgccgagcgcctgacccatctgttctatgcgttctccaccatcgaggacggccgctgcgcggtcggcgcggaagcgccgaagaacttcgccgcgctggccgagctcaagaaggcgcatccgcacctgcgcacgctgatttcgatcggtggctggggtgcgggtgggttctccgatgcagcgttgaccgaggccagccgcaagcgcctggtggactcatgcatggcactgttcttcgatcaccatgccggcagcttcgatggcgtggatatcgactgggagttcccggtcagtggcgggccgaaggagctggcgcatcgcccgcaggatcgcgccaacctgaccaggctcgcgcaggcgttccgcgtggcactcgacgcgcacgggcgcaaggtggggcagccaatgctgctgagcgccgcgctggccgccggtcgcctgcagaccgatggcccctatgatccggcggcgagctacgacctgccggcgctggccaaggtgttcgatttcatcaacctgatgagctatgacatgggcaccggcttctcatcggtgtcgaccttcaatgcgcccctgcatgaagtgccggccgatccgctggcgccggagctgcggcgctggaacaacgtggccggcgcggtgcagtactaccgcgagcacggtgtgccggccgacaagctggtgctgggcgtgccgttctatgggcgcggcttcaaggtcaccggcgatgcgccggatggcctgtatcagccctacagcgcaccggccgacgccggcgactggcgggtgatcaaggcgcgctatctcgaccagccgggttgggtgaagcactggcagccgcaggcgcagagcccgtggctgtacaacgccgtgcagaagatcttcatcagctatgaagacccgcgctcgatcggcctgcgtgcccggttcgcccgcgagcagggcctggccggggtgttcatgtgggagctgaccggcgacgacgagcaggccagcctgctcaacgcgatgctcggcccgtggcagaaggcgcgcatcggcgattga

SEQ ID NO: 495853 - DNA, 405 bp, Stenotrophomonas maltophilia
atgatccatctcgaacgcctggaccacctggtcctcaccgtcgccgacatcgaacgcagctgtgacttctaccagcgcgtgctcggcatgcaggtcgtgcgcttcggcgctggccgtaccgcgctgcagttcggccagcagaagatcaacctgcatccggccagcgcgccactgcagccgcatgcgctgcgacccacgccgggcagtgccgatctgtgcctggtcacgcatacggcaatggtcgatgtgctggcgcacctgcaggcgcaggccatcgtggtggaggaggggccggccacacgtaccggtgcgctgggaccgatcgaatcggtgtacttccgcgacccggatggcaacctgatcgaagtgagtcgttacccgggcgaagaacacccgcagcggtag

SEQ ID NO: 495854 - DNA, 1560 bp, Stenotrophomonas maltophilia
atgaagttcagctcgcagaccctgcgtacgttcaccaccctgcacacctgggtcggcctggttgccggcttcggcctgttcgtggccttctacgcgggtgcgctgaccctgttccaccacgacctgccgctgtggcagacgcccggtgcagccaccgcgttgccggcgggcctggacgatgcgcagtacctgctggaagacgtgctggcggcacacccggaagcccgccgccacgtcggcatgacgttccccggcgccgaacatccgcaacccctggcctactggcaggccgacgacggcagctggcgctatgcctggccgggccagatcgccggcagcccgacgccgccacagaccgggctggccgaactggtcaacgaactgcattacagcctcggactgccggtggccggcatctacgtgatgggcatcgtcagcctgctgtatggcatggcgctgctgagcggcctggtgatccacctgccgaagctgttcggcgacctgttcgcgctgcggccgggccgcaacctgaagcagctgtggcaggacgcgcacaacgtgatcggcgtgctcagcctgcccttccacctgatgttcgcggtcacgggcgccctgctctgcctggtgttcgtgcagatggccctgctcaatccactgatctacgacggcaaggccctgcaggcggtaccgactgcaatggacaccgcgccggtgcgcgacgccagtggcatcccggcaccgccgggcagcctgcgcctgctgcatgcgcgcgcgcttgaagtagcacgcgcacagggcgtggccaacttcgagccggcctacctgaagctggccaacgccggcgatgccaacgccacgatcgagatcacgggcgaatccaccggcacactcgggccgctcggttcggtggccctggacgtggccaccggcaacgtcctggcctcccagctgccgggccagcgcgatgccaaccacgccacgctcagcgccgcctatgccctgcacttcggcgagttcggcaacggcgtggtggtctggctgtacttcctgctcggcctcggcggtgcgttcctgttctactccggcaacctgttgtggatcgaatcgcggcgcaagcgtcgccagccgcaacagccgcgtgccggggtgaacatggcacgggccacggttggcgtgtgcatcggcctgtgcgtggcgatctcggtcgctttcatcaccgcgctggtgctggagcggttggcaccgtcggcggtcgaccacggcatccgctgggcctgcttcggcagctgggcagcctgtgcgctgtgggctgcactgcgccgacccgcgcaggcggcgcgcgagctgctgtggaccgcagcgctcagcactgcactggtgccggtcctgcacggcgcactcaatggtgactggctgtggcgcgccgccgcgcgtggccattggccgctgttctgggtcgatgccatcgcgctggccatggccttcggcttcgctcgcctggccgtcgccagccagcgccgcgcccgcaacggcgaccccaacagcgtctgggccaactaa

SEQ ID NO: 495855 - DNA, 264 bp, Stenotrophomonas maltophilia
atgtggccgcgcgccttcgccggcatcgtggccggcttcttgctggccgcggccgcgaccgggctggtgacgtggttgccgccgggcccctggcagaacgcgctggtgcccagcctgatcacgttcatcccgctgtggatgctggctgccctgtgggcgttcagcttccgcagcgcgctgcgcgcctgggtgacactggccggcagcgctgcggccggcttcgccgtgctgacgctgctgcgcctgaccggcgcggtgcaatga

SEQ ID NO: 495856 - DNA, 297 bp, Stenotrophomonas maltophilia
atgatcaccgtcggcctttccacgctgggcttctgcagcctgggcatgctggcagcgatgttctcggcactggccttctatgccgcctcgccgcactgccgctggccccgcctgcgccgcgccggccgcctcggccgccagatcggcctggtcgccgcggctgccgcattgtggctgtggatggccgaactcggctttgccgctggcctggtggcgatgctgtgcacctggatgctggcggcgatgctgctgccggcactggccgcctggcatcgcccgggcacggagtcgccctga

SEQ ID NO: 495857 - DNA, 1902 bp, Stenotrophomonas maltophilia
atgatcaacattacccttcccgacggcagccgccgcgagttcgaaaaccccgtcagcgtcatggacgtcgcccagtcgatcggtgccggcctggccaaggccaccatcgccggctcggtcgatggcgtgctggtcgatgccagtgacgtcatcgaccacgatgccagcctgcgcatcatcaccgccaaggacgaggagggcgtggagatcatccgccactcctgcgcccatctggtcggccacgccgtcaagcagctgtacccggacgtgaagatggtgatcggcccggtgatcgccgagggcttctactacgacatctattccgagcgcccgttcaccccggacgacatggccgcgatcgagaagcgcatgggtgagctgatcgcccaggattacgacgtcatcaagaagatgacgccgcgcgccgaagtgatcgagatcttcaaggcccgtggcgaggactacaagctgcgcctgatcgaggacatgtccgacgacatccaggcgatgggcatgtactaccaccaggaatacgtggacatgtgccgcggcccgcacgtgccgaacacgcgcttcctgaaggccttcaagctgacccgcatctccggcgcctactggcgcggcgatgcgcagaacgaacagctgcagcgcatctacggcaccgcctgggccgacaagaagcagctcgaggcgtacatcaagcgcatcgaggaagccgagatgcgcgaccaccgccgcatcggcaagcagcaggacctgttccacctgcaggaagaggcgccgggcctggtgttctggcacccgaagggctgggcgttgtggcaggtggtcgagcagtacatgcgcaaggtctaccgcagcagcggctacggcgaagtgcgctgcccgcagatcctggacgtgagcctgtggaagaagtccggccactgggacaactaccaggacaacatgttcttcaccgagtcggagaagcgcacctacgcggtcaagccgatgaactgcccgggccacatccaggtgttcaaccagggcctgcacagctaccgcgacctgccgatccgctacggtgagttcggttcctgccaccgcaacgagccgtccggcgcgctgcacggcatcctgcgcgtgcgtggtttcacccaggacgacggccacgtgttctgcaccgagagccagatcgaatcggaagtgaccgcgttccaccagcaggcgctggcggtctaccagcacttcggcttcgacgagatccagatcaagatcgcgctgcgtccggaatcgcgcctgggcgacgacgcgacctgggacaaggccgagggcgcactgcgttcggcgctgtccgcctgtggcgtggaatggcaggagctgccgggcgagggcgccttctacggcccgaagatcgagtaccacctgaaggacgccatcggccgtacctggcagctgggcaccatgcaggtcgacttcatgatgccgggccgcctgggcgccgagtacgtggatgagaacagccagaagaagcatccggtcatgctgcaccgcgccatcgtcggctcgatggagcgcttcctgggcatcctgatcgagcaccatgccggccagttcccggcctggctggcgccgacccaggtggtggtggccaacatcaccgacgcccaggccgactacgtctcgggcgtgaccaaaacccttgcggagcaaggcttccgcgtcagctcggatttgcgtaacgagaagatcggctataaaatccgcgagcatacgttgcagcgcgtgccctacctgctggtcattggtgaccgcgagaaggaaaatggggctgtggcggtgcgtacgcgttctggcgaagacctgggcagcatgagcctgcaggccttcatcgagcggctccaggccgagggcgcgtaa

SEQ ID NO: 495858 - DNA, 480 bp, Stenotrophomonas maltophilia
gtgccgcgcgtccgcgtgatcggcagtgacggagaaatgatcggcgtgttgtcgcgcgacgaagcgctgtccatggccgaagatgaaggcctggacctggtcgaaatccagccgcaggccgatccgccggtctgcaagatcatggacttcggcaagttcaagttcgaagcgcagaagaaggccagcgaggccaagaagaagaccaagcaggtcgagatcaaggaagtgaagttccgtccggtcacggacgagggcgactaccagatcaagctgcgcaagatgcgcgggttccttgaagaaggcgacaagatcaaggtcaacatccgtttccgtggccgtgaaatgagccaccaggaactgggtcgcgaaatggccaaccggatcgagaccgatctgggcgaggacatcgtcattgaatcccgtccgcgcctggaagggcgtcagatggtcatgatgatcgcgccgaagaagaagacctga

SEQ ID NO: 495859 - DNA, 198 bp, Stenotrophomonas maltophilia
atgcccaagatcaagaccaaccgggcagcggccaagcgtttccgcaagaccgcctcgggcaagtacaagtgcggccacgccaaccgtagccacatcctcacgaagaaagcgaccaagcgtaagcgtaatctgcgtcagacgggccatgtccgtgcagaagacgcaggccgtctggaccgcatgctcccttacctctga

SEQ ID NO: 495860 - DNA, 360 bp, Stenotrophomonas maltophilia
atggcacgagttaagcgtggcgtacaggcgcgtcgccgccacaagaagattctggatctcgccaagggctattacaacgcccgccgcaaggtcttccgcgtcgccaagcaggcggtcatcaaggcacagcagtacgcctacatcggccgtaagcagaagaagcgcaacttccgttcgctgtggatcacccgtatcaatgcggctgcccgcatcaacggcctgagctacagccgcttcatgaacggtctgctgaaggccggcatcaccctggaccgcaaggtcctggctgacatcgccgtgcacgacgcagccggttttgctgcgctggccgaaaaggccaagggcgcgctggcggcataa

SEQ ID NO: 495861 - DNA, 996 bp, Stenotrophomonas maltophilia
atgagcgacatccaatccctcaccacccaggcgctggccgatgtggccgccgcacagagccccgacgtgctggaacagctgcgcgtggccctgcttggcaagagtggcagcatcacctcgcagctcaagcagctcggcgccctgccggccgacgagcgcaaggccgccggtgaagcgatcaaccaggcccgcgacgcgctgacccgcgcgctcggcgagcgcaaggcgctgctggaggacgcggcactggatgcacgcctggccgccgaagccatcgacatcaccctgccgggtcgcaacggcgaccgcgccggcctgcatccgatcacccgcaccctggagcgcatcaccggcatcttcggccggctgggctacgagctgtcggaagggccggagatcgaggacgactggcacaacttcgaggcgctgaacttcccgccgcaccatccggcgcgcgccatgcacgacaccttctacttcggcgacggccgcctgctgcgcacgcacacctccggcgtgcaggtgcgctacatgggtgaccacgcgccgccgctgcgcatgatcgccgccggcaaggtgtaccgcagcgacagcgaccagacccattcgccgatgttccatcaggtggaaggcctgctggtggacgagcattcgaccttcgccgacctgaagggcacgctggcggagttcgtgcgcgccttcttcgagcgcgatttcgaaatgcgcttccgccccagctatttcccgttcgttgagccgggcgcggaagtggacatcgcctggcagcagcccgatggcagcacccgctggctggaagtgctgggctgcggcatggtccatccgaacgtgctgcgcaacgtcggcatcgatccggagcgctacaccggcttcgccttcggcatgggcgtggagcgctttgcaatgctgcgctacggcgtcaacgacctgcgtgcgttcttcgagaacgatgtgcggttcctgaaacagttcgcgtaa

SEQ ID NO: 495862 - DNA, 2382 bp, Stenotrophomonas maltophilia
atgaaattctccgaaaactggctgcgcagccacgtcccgaccagcgcttcgcgcgatgaactgagtgcagtgctgaccgccatcggcctggaagtggaagacgtgaccgcgctgggcgaaggcctcgaccacgtggtcgtggcacgcatcgtcgatgcggtgcgccatccggaagcagatcgcctgcaggtgtgcagggttgatgccgggcagggcgaactgctgcagatcgtgtgcggcgccccgaacgcgcgcccgggcctggtcgcgccgctggcgatggtcggtgcgcagatcggcgagctgaagatcaagccggccaagctgcgtggcgtcgagtccaacggcatgctgtgctcggccaaggaactgggcctggacaacgatgcttccggcctgctggaactgcccgacgacgcaccggtcggccagaccctggtcgcgtacctgggcctgccggatgccagcatcgagatcaagctgaccccgaaccgcgccgactgcttcagcctgcgcggcatcgcctacgacgtcgccgccgccacccgcagtgaagtgctggacttcgctgccgacgccattccggcagtcggcagccgtgagctgggcatccagctcgacgccggcgccgaagcgccgcgttacctgggccgtgtcatcgaaggcgtcaatgctgccgccaggaccccgttgtggatggccgagcgcctgcgccgcagtggcgtgcgtccggtctcgctgctggtcgacatcacccagtatgtgatgctggagctgggccagccgatgcacgcctacgacctgggcaccctgcagggcagcatcgccgtgcggcgttcgcgcgcgggcgagacgctgaagctgctggacggccgcgatgctgcgctggacgacagcttcctggtggtcaccgacgctgaccgcgcggtcggcctggccggcctgatgggcggcttcgacacccgcgtcaccgacgcgaccaccgccgtgttcctggaagccgcgcacttcgcgccggccgcgatcatgggtcgtggccgcaagcttggcctgcacaccgatgccggtcatcgcttcgagcgcggcgtcgatccggcgctgccgcgcaccgcgatcgagtacgccacccgcctggtgctggacctggccggcggtaccccggcaccggtcaccgaggccgtgcgtgaagccgatctgccgcacccggcgaccatcgtgctgcgccgcgcccgcatcacccgcgtgctcggcatcaccatcgacgatgcggaagtcgagcgcatcctgcgcgcgctgggcatggacgtggtcgccgccgccgacggctggcaggtggtcgcgccgagccgccgcttcgacatcgccatcgaagaagacctgatcgaagagctggcccgcatccacggttacgagcagatcccgaccacgctgccgggcggtgcctcgcgcgtggcgatgccgagcgagacccagctggacgcgctgagcgtgcgccgccagctgatcgcccgtgaccagcaggaaaccgtcaatttcgccttcgtcgacgacgcgctgctgacccagtggcagctgcgcgacggcctggtgccgctggccaacccgctgtcggccgaactggcggtgatgcgcccgtcgctgctgccgggcctggtcgccacgttgggccgcaacgccgcccgccagttgggccgcgtgcgtctgttcgagctcggccgcgtgttcgcccagcaggccggagacggccagccggcaccgctggaaaccccgcgcgtggccgctgcggtctgcggtgaggcgcaggcggtgcagtggggcctgccgacccgcaaggtcgacttccatgacctgaagggcgacctggaatcgctggcggccgccagtggcgcgcaactggagttccgcccgtccgtccgcgcctacggccacccggcgcgttcggccgaggtgttccgcgatggcgtggcgatcggctggatcggccagatccacccgcgcctgacccgggcgatggatatcgaagccgacgtctacgccttcgagctggacctggagccgctgaccgcccgccgactgccgcgcgccggcgaactgtcgcgcttcccggcggtgcgtcgcgacctggcattcctggtgcctgaacaggtggcctgggccgatctggcggccaccgtccgccaggccgccggcccgctgctgcgcgacctgaacctgttcgaccgttacgtcggccagggcgtcgagccgggattcaagagtctcgctatgggcttgattttgcaggacaagtcgcgcactctgacggaccgcgacgtggatgcggtggtggccgaggcggtcactgccatcgagcgtgaacaccacgcccggatccgcggctga

SEQ ID NO: 495863 - DNA, 300 bp, Stenotrophomonas maltophilia
atggcattgaccaaggcggagatggcggaaaagctgttcgacgaagtcggtctgaacaagcgggaagccaaggaattcgtcgacgcgtttttcgatgtgctgcgtgaagcattggaacagggacgtcaggtgaagctgtcgggcttcggcaatttcgatctgcggcgcaagaaccagcgcccgggtcgcaaccccaagaccggcgaggaaattccgatttccgcccgtacggtggtcaccttccgtccgggccagaagctcaaggagagggtggaagcttatgctggatccgggcagtaa

SEQ ID NO: 495864 - DNA, 357 bp, Stenotrophomonas maltophilia
atgctggatccgggcagtaaccgcgaactaccgccgatcccggccaagcgctacttcaccatcggtgaagtcagcgagctgtgcgacgtcaagccgcatgtcctgcgctactgggaaaccgagtttcccagccttgagccggccaagcgccgaggcaaccgccgctactaccagcgccacgacgtgctgatggtgcggcagatccgcagcctgctgtacgaacagggctacacgatcggtggtgcacgcctgcgtctggacggccccgatgcccgcgaggaatcggcgctgagcaaccagatcatcaagcaggtgcgcatggagctggaagaagtgctgcagttgctgcgccgctga

SEQ ID NO: 495865 - DNA, 201 bp, Stenotrophomonas maltophilia
atggattctgcaagaaaccgtgcctggcgtcgcagccaggctcgcaaccgtggtggcgaccgcgccacgaccgcctacagctacaagcccgagaagaactggaagctgctgtatacgcgcgatgccaagctcgcgcgcgcacgccagctgggcttcacctatccggtcctcagcgcccgccaactgcaggaacaggaatga

SEQ ID NO: 495866 - DNA, 342 bp, Stenotrophomonas maltophilia
atgatcaacctgctgttcgtctgcagccgcaaccagctgcgcagcccgaccgccgaagccatgtggcgacggcgacccggcttcgctgcgctgtcggccggcaccagcccgcatgcacgacgcctcatcggcccggcggatatccgctgggccgatgtcattttcgtgatggaggccaagcaccagcatcgcctgcaggccgcgtatgcgcgcctgctggaatacaagcgcctgcattgcctggatatccccgacgactatcgctgcatggatccgctgttgatggacctgctggacgccaaggtggccacgtatctcgatcagctgccggcaaagcggtag

SEQ ID NO: 495867 - DNA, 450 bp, Stenotrophomonas maltophilia
atggtgccgcccgatccctcctcgacgatgttgcacatccgcgaggcaatgcccgccgacgtttccgcgttgatcgcgctcgacagcgttgcggtccacgatccgcaacgcgcacggcagatcagcgactggcaggcccgtggtggcatgcacgtggccgaatgggccggtcagctggccggttacctggtcatccaccatcacttcttcggcgaagccttcgtcgagatgctgatggtggcgcgcgaacaacgcagccagggcgtcggcgccgccctgctgcgccatgccatcgcgctgcacggccacggcaggctgttcacttcgaccaatgcttccaataccggcatgcaacgcctgctcgccgcttcgggtttcatcgacagcggcatcgtgcacggattggacgaaggcgatccggagctgctctaccgctttgccggcagctga

SEQ ID NO: 495868 - DNA, 516 bp, Stenotrophomonas maltophilia
atgacccatcgcctgttgctgccgattgccctccccaccatggccctgctgctggccgccaccacggtggccgcccaggattacgacagcgatcccattgcgccgctgcgctgcgaatcgcagttcaacaagacccagcagtgcccaatcgaaggccgcatgcgcctggccaggcagctgtcggtcacccgctgcgtagaggaccagaactggggccagagccgccgcatgctctgggtcaccgacggctgtcgcgccgagttcgtggccgacggacagggacgcggccgctggccggggcgcggccgggaccgtgaccgcgatgacgatggcgagcgcctggtctgcgagtcctacgagcagaaggacaaggaatgccgcatccgtgtgcgccacgaggtacgcctggtcaagcagaagtcggtgacaccgtgcgtcgaggatcgcaactggggctgggaccgccgcggcgtgtgggtcagcgacggctgccgtgccgagttccgtgtgtattga

SEQ ID NO: 495869 - DNA, 312 bp, Stenotrophomonas maltophilia
gtgcgtgtcctggacaccacgttcaagggcaagcatgtgttcattgcgtggggcctgcgcgggccggaactggcccgcagcgcggacccgcccgccaccgtggctgcgcgcaaggcgctgcatgccgtggccggccacagcgagggaccgcgcagcccggaggtattcatcgccaaccagtcggcagtggcgattaccgtctatcggctgctgaccgaggcgcgttcgggcgatgccatcttcttcctgtgtgattcgcaggccgtggtcgactggttgatcaccgcactggaagtgcagggcgaagactga

SEQ ID NO: 495870 - DNA, 693 bp, Stenotrophomonas maltophilia
atgaagacccttggcctgatcggcggcatgagctgggaaagctcggcgcagtactaccggctcatcaacgaggcggtgcggcatcgcctcggtggcgcgcattcggcgcaactgctgctgtggtcggtggatttcgccggcatcaagcagctgcagcacgacggccaatgggatctgctgggcaaccacatgctcgatgctgcacggcggctgcaggccggtggcgccgagctgctggtgatctgcaccaacaccatgcacacgctggccggccggatcgaagccggatgcccgctgcccctgctgcatatcgcggacccgaccgccgcggcgatcctgcaggccggcatccgcaaggtgggactgctcggcaccgccttcaccatggagcaggcgttctaccgcgaccggctgcaggaccgcttcgggctggaggtactggttccggaggccgatgatcgccgcagcgtgcacgacatcatctaccaggagctgatctgcggcgtggtcagcgagcattcgcggcaggcgtacgccggcgtgatcgcgcgcctggttgcacgcggcgccgaagcgatcatcctcggctgtaccgaaatcatgttgctggtccgcgccgaggacagcccggtgccgctgttcgacaccaccaccctgcacgccctggcggcggtggatgcggcactggcctga

SEQ ID NO: 495871 - DNA, 642 bp, Stenotrophomonas maltophilia
atggccctgcatacctggtggtggttcctggccacggtcttcgtgctgtgcgggacgcccgggccgaacatgctgcacatcctcgggcgcagcgtcgggctggggttccgtggcagcgtgccggccatggccggctgcctgctggcgatgctgctggtgctggccgcatccgctgcgggcctgagcgcgttgctgcactcctcgccgatgctattcgaagtgctgcgctatctcggtgtggcctacctggcctggcttggcatcaaggcgtggcgtgacagttgccgcccggcacccgcggtggccgatgctgccgaggtcacactggcgccggtacatggcgcagcgacggtattccgtggcggcctgtgggttggcttgagcaaccccaagctgttgttgttcgccgcggcgttcctgccgcagttcgttgatccgtcgcgtagccaggccgtgcagtacagcgtgctggtggcgaccttcgcggcctgcgaactgttctggtacgtgatgtacgccgccggtggccacggcctgcgtcgttggcttgcaaagccattcgcacggcgctggttcgagcggctggtgggaggcgtgttcctggccttcgcggtggcgctgctgcgcttccggccgcgctga

SEQ ID NO: 495872 - DNA, 174 bp, Stenotrophomonas maltophilia
atgatcaagtgggccatcattttcgccatcatcggcatcatcgccggcgtgctgggcttcggcggcatcgccggtgccgctgtgggcatcgccaagttcctgttctgggccggcatcatcattgccgtggtgctgttcctgatcggcatgagcgtggcgaagaaggtcagctag

SEQ ID NO: 495873 - DNA, 333 bp, Stenotrophomonas maltophilia
atgaacccctatatctacctggccgccgccatcgtgctggaagtgattgccacgtcgctgctgaaggcctcggacggcatgagccggctgtggccgacactgggcgcgctggtcggctacgggctgtgcttctacctgctgtcggtcaccatgaagtcggtgccgaccggcatcgcctatgcgatctggtccggcgtcggcatcgtgctgatctcgctgatcggcctggtggtgttcaagcagcggctggatgcagctgcgctggccggcatcgcgctgatctgcgccggcgtgctggtgatcaacctgttctcgcgcagcagcgcgcactga

SEQ ID NO: 495874 - DNA, 573 bp, Stenotrophomonas maltophilia
atgtcctcgccccctccccgctcgcggcgcaaagcgcccgacagcgtgcgccagtcattgctgcacgccaccattgccgtgattggccagcacgggctggcggcactgaccgtgcaggatgtcgcgcgcgtggccggggtcagcaagggcgcgttgttccaccatttcagcagcaagcaggcactggtcgatgaagccatcggcgcactcatcggcgaattcgaggcgcgtgtgcgcgcgctcctgcaggacggcacgcccggccacggctgcttcagccgcgcctatgtgcgggccaacttcgagcacctgctgcagcaggaacaggacaacgacatcggcctgaccctgggcaacctgatggagccggccctgctggcgcactggcgcgactggaagcgcgcgatgctggccgagttccccggcgaagccggcgatccgcgcctgtacgcggcacgctgcgcggccgatggctattgggccaccgcctatggtcggccgctggacgaagcagagcgcctcaatgcgctggcgatggccgagcaggccctcaagctgtgcgactcgcagtga

SEQ ID NO: 495875 - DNA, 234 bp, Stenotrophomonas maltophilia
atggctgagctgagtcccctgcccgacctcgcccgtggccggtatcgccacttcaagggcggcgaatacgaagtgatcgacatcgtccgcagcagcgagacgctggagccattggtgctgtaccgcgcactctacggcgaaggtggcctgtgggtacgcccctacccgatgttcgtcgagcaggtcccaggcaaacacggcccgcaggcgcgtttcgcacgcatcgacgattga

SEQ ID NO: 495876 - DNA, 282 bp, Stenotrophomonas maltophilia
atgaaggtgcttcttctgattccagcgctgctggttctggccgcatgcgcgagcccggacaatgcagccccgcgtgccgacggcaagccttcgaccaccatgcccaaggtaggcggcgatcgcgacgcgcacggctgcatcggctcggccggctaccagtggtgcgagcacagccagcgctgcgagcggccctgggagctggcacaggcacacggcctggccaacagcgccgaggccatcgacgcgtactgcgccacgcccgccagcccggcgcgcaagtga

SEQ ID NO: 495877 - DNA, 258 bp, Stenotrophomonas maltophilia
atggtcattaccgtcaagtgcagtgccgcgcagtggtccctgttggatccggccgcaggcgtcgccgaagcattcaactccggggccgcagcgttcgatgccgcggttggcctggccagcgcccaccatcgccggaccggccagggcagcacggtgcgcgtggaggcgctgggcagcagcgtggatgccgtgcatttcgaggcgatggcaaccgcctcggggccggttaccggcctgcgtcctgcgccggtggcgtaa

SEQ ID NO: 495878 - DNA, 492 bp, Stenotrophomonas maltophilia
atgcagatacttcaagctgttcacgctttgccgctccagtcaggcagtggcgcctgcgaaagccggccgtcccccctcccctccctcgtcatcgccgatgcaaacccctggatccgacgcgaactgatacgcagactccggccccatctggacggcagaaccctcggcgaagcgcgctcgcccgcagaggttctgacccagatcgccagcccgcgctgcaacgtactgatcatcgatccctgcatgccgactgtgggccaggccgacggcatgcccctgctgcgccgcatctgctgcctgcgcggggatctgctcatcctcgtgctggcccaacagcccttgcgcgtactgcaggatcgcgccctgccggcacagatcggtcatgtctatgccaaaacggtgaatccatcgtggctgtgccatgtcgtaagccaggcactgcgcgggggatcctccggcgttacgccaccggcgcaggacgcaggccggtaa

SEQ ID NO: 495879 - DNA, 483 bp, Stenotrophomonas maltophilia
atgaaaaagaaaatctcaagggccggccacgcggtgaggcgtacacatcggcaacgagggttttctctggtcgaactcatggtggtcgtagccatcattgcagttctttccctgatcgcagttccgcaatacaagaagttctctaccaaagccaagctggcggcggcgttggccgaactggccggcgggaaggcgggagtggaggcgtggttggccgaaggaggtgatctccttggctcagacaaccgcaagctgggcctgccggagagcagcgagcgctgtgaaaccatcacgacgagaattggtccagatggcgacctggaaatcgattgcctgctgcggttcgatactggctacaacgtggggacatggcgaaacaacctgatgctgatcagggattcgggcagccatgaatggcgctgctggactgccatcccctattacgacctcctgcccaaaggctgtggccccggcaatccatag

SEQ ID NO: 495880 - DNA, 456 bp, Stenotrophomonas maltophilia
atgaataccgaaatcggccgtacactccacgcaggcaaaagcgcatcccggcagaagggcttttcccttattgaactcatggtggtggtggcgatcatcggtattctggggatgattgccctgccgcagtatcagcggttctcggccaaggcaaagctggccgctgccctcgcagaagtcgccggtggaaaagtcggcgttgaatcactcctcgccgaaggcagcacgatcacctcgccggaatcgattggcttgcccgagtcaagctcccgctgtacctggattacggtgacaagcgatgtcacgaatggagctacgagcatcaactgcgagctcaagagcgacgctgcaatcggcagtggcagcctgaccctggatcgcgactggcagggagcctggctctgcaagggcgacattccggaccggagcctccttccccaggcctgcctgaactga

SEQ ID NO: 495881 - DNA, 447 bp, Stenotrophomonas maltophilia
atgcgccctcgatcaaccacacaggcggcacgtcgcccccgccactaccggccctgggtgtcggtctgcatcgtcgccggactgacagccgtctacgcgctgctgttgtgcgcgccctcggcagatgacgctaccggccgcacccggccgcgcgacgcggccagcgtgctgggcggcgccatcgccgccgtggaaagcagttacgccaaaggtgatctcaccgtgaccgaccagcacctgggtctgcctgccagcgccgcgcattgcgcgcacctgcgcgccgcgctccccgacaccggccgcgcagtgctgacctgtgatctgcgccaggacggccgcctgcaatggtggcgaacccctgccggagaatggcgatgcaatgcgggcatggccgatgtgcaggcagtgcctgtgccatgcccaacgcaattgcggcgcactttctga

SEQ ID NO: 495882 - DNA, 363 bp, Stenotrophomonas maltophilia
atgaatatcgccatcaacaaatgcctggacacgctcatgcagatcaacggcgcacaagccgttgccctggtcgactacgaaagcggcatgctgctcggtgaagccggctcaggcgtggacatggaactggcggccgctggaaacaccgaggtgctgcgcgccaagatgaaagcggctgaagcgctgaagctcaacgacagcatcgaggacgtgctgatcaccctgggtcgtgcgtaccacgtgctgcgcccggtgtcggccaagaagggcctgttcttctatgtggtactggatcggcagaaggccaatcttgctctcgcccggcgcatggtgctggacgtggaaagctcgctggcgctgtag

SEQ ID NO: 495883 - DNA, 372 bp, Stenotrophomonas maltophilia
atgaatgacatcgaccgcacatcggcactcgacgcgctggtacacgatgtcaccggcatccaggcgctcgtcgtggccagcactgatggtttcgcactggcccaggccggcccgaagggccacgtcgccgatcgcctggccgcgatgaccagctcgatgctcggcctggccagtgcgctgggtcgcgaactgcactttggtgaactcgacacactcatcctcgatgccgccaacggcaaggttctgatgcttgccattcccggagcacagccccgcctattgatgaccgcatgcgaccacagctgtgtcatcggcaacgtgctgtggcatgccaagcagtgcgtacgtgccctgaccgacaacccgaactga

SEQ ID NO: 495884 - DNA, 552 bp, Stenotrophomonas maltophilia
atgaccgtgcgtgagcacaagatcgtagtgatgggcccactcggcgcgggcaagtccaccctcgtgcagaccctgacctggggcaaggccgtagtgaccgaggcccgcaataccgaccctgctgtgggcaagcagtacaccaccgtagccatggactatggcgacatcgacctgccgggtggcgaccgcctgcgcctgtatggatcgcccggacaggaacgtttctcttacatctggccgatcctgctggccggtgcagaaggtgccatcgtcctgatcgatggcagcgccagcaaggacagtacgctggcggggcagcacctgaaggccatcgcagacaacgcgccgggcctgcccgtggtcatcggtttcacccgatgcggcagcaccgatgatccggtacagccgcactggcagcactggttgcaggaccatgcgccacacctgccggcattgccgctggatccacgcgacatggcgcaggccatcatggcgatggacctgctgatgagccagatcgaatgcaatgccacggcggccgcccatgaatga

SEQ ID NO: 495885 - DNA, 708 bp, Stenotrophomonas maltophilia
atggtccgattccgtcgtcaatcgtttgaggatctgcaagagccctttgaagcagagccactggcgccggccgcattgccaactgccgcattgccgttcgtacagcagctgcgactgcatctggcgagcgacagcacgccgtcgcggcggcctgcccatgccgcgatcattcacgacgggtccaccgtgtgctggctggacgccaggaacgaccggatgatgaccaccgcacccgcgccgatcacgctgacactgctgcagagactactgggcgacgcagaccctcgactgagcctggtaccggtgacacaggaggtcttcgtgcagcgtgcgactgtgtgcagcaatgttccgctgcgcctgacgctgtggaacgttggcctggtcacggacgggcacggcgtgccaatcccgcccctgcacgactacacgaagttgcgcctgcggcgttggccagacttccgcatcctggcccatcgtcccgatcacttccgactgtgcgcgctgctgatcaagcagggcgcgtccgtgcgcgcatgctgcgacatcctcgatctgccacgccaaaccgtgcagtcgttcttcaacgcagcgttcctcaccgcctatgcctttcccgtcgtgggcgaggacgcacctgtgcgcccctcgcccgccgacggcctcgtcaatctgtggcgacaacttcgcatccgctggagtgcatga

SEQ ID NO: 495886 - DNA, 672 bp, Stenotrophomonas maltophilia
atgctcactcgaattgccatcgcggacgaccatcccttggtcctgcttggcacgcgcatcgtgatcgaggccggtgggcagcatcgcgtggtggcggaggcgcgatgtgcagaaagcctgctggccatcctggccgaagagccggtggatctggtggtgactgatttttcgatgccggatgtcggccgctcggacggccaggcgatgctgcaggcgttgagtcgcaattaccccaaggtgccggtgatcctggtcacgatggtcaccaacgccactaccttgaacatggcaatgcgtaccggtgtgcgcgggctggtgtggaagtgcagttgcgtggatggcacccgcaaggcggtcgataccgtgttgagcggggggatctacctggacccccagttggcgcactgcctgcaggagggtgggcgtgagcgatcgctttcggtgttgtcgcccaaggagctggaagttctgcggctgtatgtgtcgggaccttcgatcacagagatcgccgggcagctgcggcgcaccgtcagtaccatcagccggcaacgcatttcggcgatgaggaaactgggcatcagcaatgatgccgagctgttcgcctatgcgttcgaggaacgcctgggcaatgccggtggcatggccagtggggcagcaaacggggggccatga

SEQ ID NO: 495887 - DNA, 564 bp, Stenotrophomonas maltophilia
atgggcaaggcactcacttggcgcaccctggcctgcaccctgttgccgatgctggcggcggccggcggcgcccaggcgcagagctatggctacggctatgacgacgaccgctatggtggccgcgatggcagcggcatcgtgcgctgcgagtcggtcaagaaccgcagcaatgagtgccgcctggacggccgcgcgcggttgatccgccagttgtccggttcgccctgtgtggaaggtgagacctggggccagtcgcgcaacggcgtctgggtcacacaggggtgccgtgccgaattcgtcggtgaatatcgccgcggtggcggctggggtggcaatggtggcggctggggcaatggcaatggcaacggatggggcggcggcgatgtggtcacctgccattccaatggacatcggcaggagtactgcgatgcgcgcatccgccggggtgtgcgcctgatccgccaggactcacgcagcgcctgcatcgaaggccagagctggggctgggatcgccgcggcatctgggtgagtgatggctgccgggcgcagttccaggtgaactga

SEQ ID NO: 495888 - DNA, 204 bp, Stenotrophomonas maltophilia
atgttgatccgcctgcaatgcgaacagcgccagtggcgcgtgctgcatccggaccggccggagccgatcgagttccgcgatggcgcccgcgcctacgacttcgccgagaccctggcccgcctgcactttgtcgacaccggtcagcgtgcgtccgtgcgcgtggaagccagcggcgcattcgtcgaagcggtcagttacggctga

SEQ ID NO: 495889 - DNA, 1911 bp, Stenotrophomonas maltophilia
atgatgatcgactctgcccgctatccccgcctcgcgcgcatccagacgccggatgacctgcgcacgttcgacgaatccgaattgagggcggttgccgacgaactgcgcgcctacctcattgaatcggtgggcaagagtggcggtcacttcgccgccggcctgggcgtgatcgaactcaccgtggccctgcactacctgtaccagacaccgcacgaccagctggtctgggacgtcggccatcagacctacccgcacaagatcctgaccggccgccgcgacgaaatccacaccgtcaagcagaaggacggcatcgcgccgttcccgaagcgcgaggaaagcgagtacgacacttttggtgtcggccactcctcgacctcgatctcggccgcactgggcatggccatcgcccgccagtccgaaggcgacgaccgcaagatcgtggcggtgatcggtgacggcgcgatgaccgccggcatggcgttcgaagcgctgatgcacgctggcggcatggagccggagccgaacctgctggtgatcctcaacgacaacaacatgtcgatctccgaggccgtgggcggcctgaccaagatgctgggccgcgccaccggcagccgcacgctcaacgcgctgcgcgaaggcggcaagaagattctcggtgacaagaagaacaacccggcacgcttcgtgaagcgctgggaagaacactggaagggcatgttcgtgccctccacgatgttcgaggaaatgggcttccactacaccggcccgatcgacggccacgacatgcccgccctgctgtccacgctgaagacgctgcgcgcctccaagggcccgaagctgctgcatgtgatgaccaccaagggcaagggttacgagccggccgagggcgaccagatcggttaccacgccgtgggcccgttcgatccggacaaggggctggtggccaaggccggggccaagaagccgacctacaccgatgtattcagcgactggctgtgcgatgccgccgccgccgagccgcgcctgtacggcatcaccccggcgatgcgcgaaggctccggcctggtgcgtttcagcaaggaatacccgcagcgctatttcgacgttgcgattgccgagcagcatgcggtcaccctcgccgctggcatggctacccagggtggcaagccggtggtggcgatctactcgaccttcctgcagcgcgcgtacgaccagctggtacatgacgtggcgatccaggacctggacgtgctgttcgcgattgaccgcgccggcgtggtcggcccggacggtgcgacccatgccggcaacctcgacctgagcttcctgcgctgcgtgccgaacctggtggtgatggcaccgtccaacgaagccgagtgccggcagatgctcagcaccggcctgcagcacccgggcccggccgccgtgcgctacccgcgcggtaccggcaccggcgttgcagccggcaccgacctgtcgaccctgccgatcggcaagggcgaactgcgcctgcagggcagccgcattgccctgctcgccttcggcagcaccgtggccgccgccgagcaggtcggccgcgaactgggcctgagcgtggtcaacatgcgtttcatcaagccgctggaccgcgagctggtgctggctgtcgccgcccagcacgagggcctggtgacgatcgaagacaacgtggtggccggtggcgccggctccggtgttggtgagctgctcaatgccgaaggcgtgctgcgtccgatcctgcacctggggctgcccgacagctaccagcaccatgccagccgcgaagacctgctggccgaagccggcatcgacgccgccggcatccgcgctgctgtgctcaagcgctggccgcagctcgccgcaggtaccccgccgctcagcgcggcaggctga

SEQ ID NO: 495890 - DNA, 666 bp, Stenotrophomonas maltophilia
atggagacagacactacacgcttgggtctgatcgaagccggagctccgttttctgctccgggcgccgaagcatcgcccaacgccacgacgctgcatcgccccggttcggtccggctgctctcgcttgatgcccacggacgcgtactggactggatcacctggcaggatgcggcctgcctctacgcccgcgaggcggtggcctggacgctcggcgacccctgcctgcacatccacggcggcaccaaccgcttcagcggcctgcagagcggcatggacctgcacccgatcatcgccgcccgcggccacgcccgctcccgtgcgatcgacccgacgccgaacctgaccaaccaggcccttttcgcccgcgatgcccatctgtgcatgtactgcggccagcagttcagccgccccacgctcacccgcgaccacgtcatgcctctgtccaagggcggcctggactgctgggaaaacgtggtcaccgcctgcttccactgcaattcgcgcaagagcgaccgcaccccgcagcaggccggcatgcccctgctggcagtgccctaccggcccagctggatcgagcacctgatcctgtccaaccgcaacatcctggccgaccagatggccttcctgaaggcgcaattgcccaagcgctcgaaactgagcacctga

SEQ ID NO: 495891 - DNA, 1791 bp, Stenotrophomonas maltophilia
atgagcagctacaccgccccgctttccgacctccgtttcgccctgcacgacgtgctcaaggtcgaacccctgttcgcccgcctcggcttcaccgacgccaccgccgacgtggtcgatgccgtgctggaggaagccggccgcttcagcgccaccgtgctggccccgctcaacagcgtcggcgacgagatcggctgcgtactcgaccaggccaccggtgaagtgaccaccccgcccggcttcaagcaggcctacgaccagttcgtcgatggcggctggaccggcctgaccgcctcgccggagctgggcggccagggcctgccgcacaccctgggggtgccgctcaacgaaatgatcaacgccgccaacctggcgtggggcaacttcccgctgctctcgcacggcgccattgaagcgctgaagcagcacggcgaggcgtggcagcacgacgccttcctcaagccgctgatcgaaggccgctggaccggcacgatgtgcctgaccgagccgcactgcggcaccgacctgggcctgctcaagaccaaggccgagccgaacgccgacggcagctactcgatcaccggcaccaagatcttcatcaccgccggcgagcacgacctgaccgggaacatcgtgcacctggtgctggccaagctgcccgacgcccctccgggcgccaagggcatctcgctgttcgtcaccccgaagttcaaggtcgaccgcgatggcaacgtcggcgagcgcaatgcactgcgctgtggctcgatcgaacacaagatgggcatcaaggggtcggtcacctgcgtgatgaacttcgatggtgcgcagggttacctggtcggccagccgcacaagggcctgcaggccatgttcaccatgatgaacaccgcgcgcctgggtgtcggcctgcagggcatcggcctgtccgagcgcgcctaccagaacgcactgaagtacagccgtgagcgcctgcagtcgcgcgccctgagcggcgccaggttcccggacaagccggccgacccgatcctggtccacccggacgtgcgtcgcatgctgctgaccgtgaagtcgctggtcgaaggcagccgcctgctggcgctgcatgccgccaccctgatcgacatcgcccaccacgcccaggatgccgccgagcgcgagcgcgccgacaccctggtgagcttcctgaccccgatctccaaggcctgccagaccgaatggggcatcgagaacacctacaacgccctgcagtgcttcggtggccacggctacatccgcgagcacggcatggagcagctggcccgcgatgcacgcatcaccacgctgtatgaaggcaccaccggcatccaggcgctggacctgatcggccgcaagaccgcatccagccagggcgccggcctgaagctgatgctggccgagatcgaagccttcgccaaggaacacgagggcaacgaagcgctgtccgagttcatcggcccgctgcgcgccaaggccgccgaatggggcaagctgacgatggacgtgctgcagcgcgcggccgccaatcccgacgaactgggcgcggccagctacgactacctgttctattcgggttacgtggtgctggcctactggtgggcccgcagcgtggccgccgccgatgccagcgcgcacggcgccgccttcgcccagggcaagcgcgagaccgcacggttctacttcgcccgcgtgctgccgcgcaccctcagccacgccgccgcgatccaggccggcgccgcgccgctgatggccatggacgacgagcgcttcggcgcctga

SEQ ID NO: 495892 - DNA, 477 bp, Stenotrophomonas maltophilia
atgctccaccgcttccgtaccgccttgatcgtcctgtgcaccctcgcccttgttgcctgcagcaacggcatcgtcaagcgtgtttcggaaccggcggccagcctgcagcagctgaccgtgcgtgccgacggcaactggaccgtggccctgcgcctgcagaacttcagctcgatgccgatgaccttcgatgatgtctcactggcgctgaccgtcggcgacagcgatgccggcaccctgcaggtcaagcccggcatctccatcggcggcacctccgccgacgtcatcaatgtcgacctcgtgcccagctcgaccgcgcgcctggtggtggccgacgcgctggccagcaaccgcaccctggcctacgccctgaagggaacggtggcggccacgccgcaggaaaagaagcagcgcagcttcgacatcagcagccgcagcaccctcaaccaggcccccggcctgcccggcgtgctgcgctga

SEQ ID NO: 495893 - DNA, 393 bp, Stenotrophomonas maltophilia
gtgggcgacatcaccgccaactatggcctgcgccgcgacggccgcatcagcgtcaccaatgcctgccgcaagggtgacggcgagcgcgtggtcgccgaaggcgtggcacgcccggtggccggccatcccgggcaactgcaggtgcgcttcgtccccgactggctgagctgggcgcccgtggtctgggccgactactgggtgctggcgctggacccggactatcaatgggccttggtcggcgaacccggccgcaagtatctgtggatcctctcgcgcctgccggagatggagcgcgatcggttcgaacagttgaaagccaaggccgagtcgatggggtacgacctcgggccactgcgcctgatggccccgctgcgcgatcccgcggccgactga

SEQ ID NO: 495894 - DNA, 153 bp, Stenotrophomonas maltophilia
atgcatctgcgccccgccctgctcgcctgcctgctgctggccgccttcccggtgatcgccactgaaccggtgcgcgcggtcgagcacctggacattgatcgctacgcgggccaatggcacgagatcgcgcatcttccagtctcgttccagtag

SEQ ID NO: 495895 - DNA, 1026 bp, Stenotrophomonas maltophilia
atgtccgattgctccaccgcgtcccgcatcgtgcttgcctcgcgtccgcagggggcgccaagtgcagccaatttccgcctggaacaggttgcgctgccggcactggccgagggcgaagtgctgctgcgcaaccgctacctttcgttggacccgtacatgcgaggacgcatggacgagggcccgtcgtatgccgcgccggtggcggtaggggcggtgatggaaggccagaccgtggccgaggtgttgcaatccaaggccgagggcgtaaccgcaggcgagctggtgctggcgccgggtggctggcagacccacgcggtgctgccggccaaggcgctggggcgtcgtctggatccggccgggctgccgctcagtacggcgctgggggtatatggcatgcccggcttcaccgcctattccagcctgcatgaaatcgcccgcctgaagccgggcgagacgttggtggtagccgccgcgaccgggccggtgggcgcgaccgtggcgcagctggccaagctgcagggcgcgcgcgtggtcgccatcgccggtggcgaggccaagcgtgcctatctgcagacgctgggcgtggacgtggcgctggatcatcgcgtggctgattttgcggaccagctgcgcgcggcagtgcctgcgggcatcgacgtgtacttcgagaatgtcggcggccatgtgctggatgcggtgctgccgctgctcaacgacttcgcccgcattccggtctgcggcaccatcgctacctacaacgagcggggcgtcgagcagcctggcccggatcggctgccgtcactgttcaaccagatcctgcgccagcgcctgaccgtgcgtggtttcatcgtgcacgacttcaaccacctgtggccggacttcgaacgcgagatgccgcagtggctgcgcgagggtcgcatccagtaccgcgaggatgtggtggaaggtctggagaaggcgccggaggcgttcttcgggctgttgcaggggcgcaacttcggcaagctggtggtgaagctggattga

SEQ ID NO: 495896 - DNA, 843 bp, Stenotrophomonas maltophilia
atggacagcaccgccaccaccgccctcgacgcccgcgtcgaacgggtctgccgccatctgcaggccagcctcgacgagccctcgctgcaggagctggccgacatcgccggctgcagcccgacgcgcctgcatcgcctgttcaaacaggccaccgggctgacccccaagcagtacgctgccgcgctgcgcgccgaccgcctgcgcaccgggctcgaacagcaggagcgcatcaccgatgccttccacgatgccggcttcggctccagcgggcgcttctacgagaacgcaccaaagttgctgggcatgactcccaagcaatggcgcgcaggtggtcgcggcgaagtcatccacttcgcgcttgccgaaagctcactgggcagcgtgctggtggccagcagcgggaccggcgtggtcgcgatcctgctcggcgacgatccggaggcgctgctgcagtcactgcagcaacgcttccgccaggccgaactggtcggtgccgaccacggctatgagcaactggtggcacaggtggtgggcctggtcgaggatccctcgcgaggcgccacactgccgctggatatccgcggcaccgccttccagcagcgggtatggcaggcactgcagcagattccgcgcggccagaccgcgtcgtatgcggatattgccgcgcatatcggtgcaccacgctcgagtcgtgcggtggcacgtgcctgcgcgagcaatccattggcggtagccgtgccctgccaccgcgtggtgcgccgcgacggtgacctgtccggctatgcctggggcgttgcgcgcaagcgcgaactgctgcgccgggaaaaggtcgccaacggctga

SEQ ID NO: 495897 - DNA, 762 bp, Stenotrophomonas maltophilia
atgcgcctgaacaacaagatcgccctcatcaccggtgccagcgctggcattggtcgtgccagcgcgctgcgctttgctgccgaaggggcaaaactggtgctcaatgcgcggcggccgcaaccgctgcacgcactggccgagcagatccgtggcgccggcggcgaggtggtgatgcatgccgccgatgtggctgatccgggcacggcgcaggcgctggtggatctggcccaacagtcattcggaggcctggacatcgcgctcaacaatgccggcatgctcggcccgggcgtaccggcggcggagttcccggcggatgcatggcgcgaggtgatggccaccaatctcgatgccgccttccatgccgcacgcgcgcagttgccggcattgctggcacgcggggggggctcgctggtgtttgtcggtacctttgtcggccataccgtgggcttcccgggcatggccgcctacgcgtcgagcaaggccggactgatcggcctgagccaggtgatcgccgccgagtacggcgcgcgtggcgtacgcagcaacgtgctgctgcctggcggtaccgataccgagatgggccggcaggccgcacccaccggcgatgcccgcgacttcgtgcgctcgctgcacgcactcaagcgcatggccgagccggaggagatcgccaacgcggcgctgttcctggccagcgatgaaagcagtttcgttaccggtaccgcgatgcgtgttgaaggtggagtgtcgatcacccgtacctga

SEQ ID NO: 495898 - DNA, 504 bp, Stenotrophomonas maltophilia
atgcccagccagtccgcgatgtcacctcccgcccagcacgccgcgcgtatgctgccaatgcgcctcgatccagcggacggcagcatccagctcggccacctgacgacgttgatctgccccaccctgtcactggaggaggcgcgcatcgccttcgccacgctgatgcatggcgagcgcgatgccggcaccggctatcactggctcagcctgcaccgggtcagtctgggcggtgcgcccgccggcatcagcctgtgcttccacgggcaacagctcgacatggtgacgatcggcgtcgatctgccgggtgcgacactggaagacggctggccgacccaggtcgcgatcgatgccgaagtcgctttcatgcgtcgcaccttggccacggctctggggcgcaaactggcaggtggccgcgcccggttcgagtggggcgaggcatgggcccggttcgacccgaaaggcttcatggccagcagcggtatccactacacgccgcgctcatga

SEQ ID NO: 495899 - DNA, 174 bp, Stenotrophomonas maltophilia
atgagcgagcgcgacaaagaccctggcgatccggaacagggcgtacaggaaagccgtcaggacagggcgcaggaggacgtggcaaagcagcggccggggcagcgcgatcagcaggtgcgtgatacgcattcgcgtggtccacgccgcaaggacggggatcaggaacctgcctga

SEQ ID NO: 495900 - DNA, 2331 bp, Stenotrophomonas maltophilia
atgccctcccattccgattcccgccgcctgtcgggtatgtcgtcttccttcgtttccttccgccgccatccgctggccctggcctgtgccggcctggccctggtcggcagctttggtgccgccgcgcaggacagcgcgccgaccccgacgggcctggacacgatcaccgtgaccgccgagcaccgcgagcagaacctgcaggaagtgccggtctcggtgggcgtggtgcagggcgagcgcatgcgcgacttcaccgccggcggcgacgacaccctgctggcgctgtccggccgcgtgccgagcctgtatgcggaaaccaccaccggccgcatcttcccgcgcttctatatccgcggcctgggcaacatcgacttctacctgggtgcctcgcagccggtgtcgatcatccaggacgacgtggtgctggaacatgtggtgctgaagtccaacccggtctatgacgtggaccaggtggaagtgctgcgcggcccgcagggctcgctgttcggccgcaacaccaccgccggcatcatcaagttcgacacgctgaagccgacccaggactacaccggccgcgtcagcgccagctatgcgacctacaacagcgtgtcgatcgacggcggctttggcggcccgatcaacgacatcgcctcgttccgcgtgtcggcgctgtaccagcaccgcgacgactacgtcgacaacacctacaagggcccgagcgctgacggcacggtcagcccgaagaagaacgccatgggcggcttcgatgaccgcaacgtgcgcgcgcagctgctgctgaccccgagcgaccagttctcgatcctggcctcggcccacgcccgtgattacgaaggcacctcgaccctgttcctgcgtggtgcgctgaccaagggctcgaacaagaccgacgtgccgcgcgaccaggtcgcctacgacgaagccggcaacaacccgcaggcctacaagacctacggcggctcggtgaaggcacgctacgacttcggcgcgatcgacttcacctcgattaccgcctatgagaccacctccggctacagccgtggtgacaccgacggcggcgctgcggtgaacttcccggtcaacggcgtgccgaacggctacggccagtcgatgggccgcatccgcgacctggaccagtggacccaggaattccgcctggccagccatgacgacagcgccctgcagtggcaggccggtgcgttctacttcaacggcagcgacaccaccgacttctaccagcgtgcgtggttcctgcagggtgcggcccgcaacccgaacaactgggtgcgactgcgcaacaagaacacctcgtgggccggtttcggccagctgagctacgccttcaccgacaagttcaccgtcacggccggcctgcgccagaccaaggacgagaagcacacccgcctgctgaagaccgctgacaccgccgccggcgtggtgacctacaagggccgcaccgacgtcaagatgtccgacaccaccccgagctgggatctgagcgcgatgtaccagatcacgccggacgtgagcgtctatgcgaaggtcgcacgcggcttccgcggcccgaccatccagggccgttcggcggtgttcaatgccgacttcaccaccgccgattccgagaccatcctgtcctgggaagccggcgtgaagagcagcctgtgggacaatcgcctgcgcctgaacgccaccgcgttcacctacaccgtcaatgacatccagctcaacggcaacgattcggacggcaacggcgtgctgttcaatgccgacaaggccaaggcctacggtttcgaagcggacatggagctgcgcccgatcccgaacctgaccctgagcgccggcgtcagcctgctgcacagcgagatcaaggacaagcgcgtctacgcgcaggtctgcggcctcaacggcaaggtggtgtgcacggtgaatgacccgaccatcaaggtcggtgccaacaccttcgcgcagatcgacggcaacccgctgccgaacgcgccgaagtacaacgtcaacctggccgcccgctacgacttcccggtcagcgacgcgggcaccatgttcgtgtccaccgactggaacaagcagggctacaccagcttcgtgctgtacgacagcaaggagttcaactccaagggtgatttcgagggcggcctgaagatcggctactcgggcaactacggtgcctatgaagtggcgctgttcgcgcgcaacatcaccaacgagaagaacctcaagggtgtgatcgagaactacatggccgcggtctacaacgaaccgcgcaccgtcggtgtctcgttgaacatgaactggtaa

SEQ ID NO: 495901 - DNA, 1080 bp, Stenotrophomonas maltophilia
gtggcaatctggatcaccacccccgccgagctggatccgtacttccagcagcgtccggcccgcatcggcctggacaccgaattcatccgtgaacgcaccttctggccgcagttggccctggtgcagatggcggtcgggcaggacatcctgctgatcgaccccctgattcccggcatgaccgaggcgctggcgccgtggctggccgatgaatcgatcgtcaaggtgatgcacagcgccagcgaagacctggtcgccttcaagtgggcctgcggcgtgttgccacgtccgctgttcgacacccagatcggcgcctcgctggccggcatcggtggcggtatgggctaccagaagctggtcgcggaaatcaccggcgtggcgctggccaagggcgaaacccgttcggactggatgcgccgcccgttgtccgaatcgcagctgcagtacgccgccgacgatgtcgagcacctgttcgcgctgcatgacgccatcgatgccaggttgcaggcgctgggccgccagcagtggctgcacgacgacggcgagcgcctgctggccagcgtcgccaatgacgaagaccgttggccgcacctggcgatgcgctcggcgcagttcctcgacacggccgcacagcatcggctgctgcgtctgctgcgctggcgcgatgtgcaggcacgcagcagcgaccgcccgcgcagctggatcctggacaacgaactggccgccacgctggcacgcacgccaccggccgatgccgccgcactgggcaagctgttcgaacagttcccgaaggcaccgcgcaagctcgcgggcgctgtgtggcaggcgctggatacgccgctggccgatgaggccgaagcaccgctggcgctgccggccaacgacagcaacaagcaggcactgaagaagctgcaggacgcggttgccgagcgcagccgcgaactgggcctgccggatggcgtattggcctcacgcaagcacctggaaagctatctggaacgccgccagtggccggccgcactggccggctggcgccagcaggaactggaatcgcggctgcaggcgctgctgccggcacgctga

SEQ ID NO: 495902 - DNA, 1887 bp, Stenotrophomonas maltophilia
ttgcgttttccgctgtcgtccgtgctgtgcaccgccctggccctggccggctgcacgccgtcgccctcggcgacgccggagccgggaccggctgctggcgaagacgcacggccgcagcaaggcatgcaggcggacgcgacgccggaggcggcgcagggcagcgtcaccatcgccggtgaggatgccgccgaggatgtgcagcggtggacgccaccgcgggtcgatcggcaggggcgcagcctggcccagctgcgtcgcgcggccgagaaggcgttcgccgaagggcgcctgtacgaggacgccgacgcggcggttccgctgtggctggcggtgcaggaggaagacccggatgaccgccaggcccgcaacggcctgcagcgcgcccgccagcgccttcagcagcaggccgatgccctgctggtccggccgctgcagcagcgcgaggcgctggccgaggccagccgccaggcactggtgctgctgaccctggcgccgaaggatgagaaggttcgcgcgctgcagggacgggtggagctcgcccagcgcgtggtggcctacaaccgtgccggcgaggaagacctgcgttcggggcggatcggtgaggacggtgacggagcgatcggcaacttccgtgaagcgctggccctggatgaacacaacagccgggcacggcagggcctggcggcggccgagagtggcctgatccgccgtgccgaggacgcggcgcgggtgcgtgactttgccagcgccggcacctggctggccgaagccagcaaggtccgtgactcatcaccggccattgccgatgccttcgaacgtatcgaacagatccgcgcggcggcactgctgcagctgcgcgatgatggccttcgcgaactggcgacgccacagggcctgaagccggcgcgcgagaagctggccgaggccctgcgcatcgccttgccaggggatgcggtggtggcccagttgcgcgaacgcatcgacctggccacccattacggcagcttccgtcccgggcaggtgttcagcgacgccatgcgcgatggcgggcgcggcccgcagatgatcgtggtgccgcatggtggcttccagatgggcgcgggtgatgccgagcccggtgccagcgatgccgagcggccctcgcattatgtgcgcttcgaccgcgggtttgcgatggcgatcaccgagatcacggtcagtgatttcgagcgctatgtgaagtcgaccaatgcgcggccgcgtgcgacccggcgcggccactcggtggtctatgacgagcgcagcggcaatttcatccgccgcagcggtgtggactggcgttccgattacgatggcgcgcgcgcactgggcaattcgccggtgatgcatgtgagcgtgcgtgatgccgaaaactacgcggcgtggctgtctgagcagacaggacgcagctaccggctgccgagcgaggccgaattcgagtacgcgctgcgtgccggcagcagtggccgttatccgtggggcgacgccggcacgccgccgcccggcgctggcaacttcaccggcagcaaggatgtctcgccctcgggacggcactggcacaacgccttcgtcggctatggcgatggctggtgggggcccgcgccggtggccagtttccaggccaatgccttcggcctgcacgacatggccggcaatctcagcgagtgggtggccgactgctggcatgccagctaccggcgtgcgccgtccgatggtgtcgcctggttcaacccgggctgccggtcgcgggtgatccggggcggcaactgggccaatgcgcccgagcagacccgtgcggcctggcggcaatcgcaggactcggacaccaccaacgcgcgcatcggcttccgtctggtgcggggcatctga

SEQ ID NO: 495903 - DNA, 897 bp, Stenotrophomonas maltophilia
atgcgcaacgatcccttttcccgctcgccgcaaggcccgcagcggcgcggcctgttcggcaacatccgctggtgggtgctgctgctggcagcgggctatgcggtgttctactggttctccaatcgcacggtcgatccctacactggcgagaaggtgatgatcgacagcagcctggatgcgcgccaggagaccgcgctcgggctgcaggcctaccagcagatcctgtcgcaggaacggccgatggatccgaatgcgccgatcgcgcgtgatgtgcgcgacatcgcccagcgcctgatcgccaaggtggacgtggtggagaccgcgctggcacaggagcacggcgtgcagccggcgcatttcgcgcgggatttccagtgggaagtgaatgtgatcccgtccgagcaggccaatgcgttctgcctgccgggtggcaagatggcggtctacaccggcctggtgccggtggcgcgtacgcgtgacgcgatggcggtggtgatgggccatgagatcgcccatgcgcttctacgccatggtgcacagcggatggcgcagcagaagctgacccagatcgggcagatggctggtgccgccagcggcatggatgcgcagcagcaacagatgatgatgtcggcgatgggctacggctacctgctgccctatgcgcgcagccacgagacgcaggccgatgaagtggggctgatgctggccgcagcggcctgcttcgatccccgcgaggcggtgccgctgtggcagcgcatgggccaggccagtggcggccaggcgccgccggagttcgcctccacccacccgaacccgggtacccgcatccagaacctgcaggcgctgatgccgaaggcgctcgagtaccggcagaagttctgcgagcaggcaaagtag

SEQ ID NO: 495904 - DNA, 792 bp, Stenotrophomonas maltophilia
atgagcaccaccgagctgaccgacggccagcgcaaccgcatcgcactgatgaccatcgtgcgccgcgaagtcgcccgcatcatgcgcatctggggccagaccctggtgccgccggcgatcaccatgaccctgtacttcctgatcttcggcaatctgatcgggtcgcgcgtgggtgacatgggcggctacacgtacatgcagttcatcgtgccgggcctggtgatgatgagcgtgatccagaacagctacggcaacatcagttcctcgttcttcggtgccaagttcggccgccacgtggaagagctgctggtcagcccgatgccgaactgggtgatcctgtggggctacgtggccggcgccgtgctgcgcggcctgatggtgggcgtgatcgtgctgatcatcgcgatgttcttcaccccggtgcgcattccgcacccgctggtgatgctgaccacggtgatcctgggcgcgacgatcttctcgctggccggtttcatcaatgcggtgtatgcgaagaagttcgacgacgtggcgatcgtgccgaccttcatcctgaccccgctgacctacctgggtggcgtgttctattcggtgaagctgctgccgggctgggccgaagcggccacgcacgcgaacccgatcttctacatggtcaatgctttccgctatggcctgctgggcagcagcgatgtgccgctgccggtggcctatgggttgatgatcggcttcgtggtggcgctgacggcgctggcgctgtggctgctgcgccgtggcgtgggcatgcgcagctaa

SEQ ID NO: 495905 - DNA, 969 bp, Stenotrophomonas maltophilia
atgggcgcgaaggcttcgagcttggcatcccagaacgatacggcgcccgccctgcgcgtgcgcgacctgcgcaagacctacgacaacggcacccaggccctgaagggggtttccctggaagtggccccgggcgacttcttcgccctgctgggccccaacggtgccggcaagtcgaccctgatcggcatcatcagctccctggtcaacctcagcgagggccaggtggaggtgttcggcagcgacctggtgcgcaaccgcagcgccaccatgcgcctgatcgggctggtgccgcaggaaatcaacttcaacctgttcgaaaagcccttcgacatcctggtgaactacgccggcttctacggcgtgccgcgcgaggaagcggagcagcgcgccgaagaggaactgaagcgggcccacctgtgggaaaaggcgcaggtgatgagccgcacgctgtccggcggcatgaagcgccggctgatgatcgcccgcgcaatgatgacccgcccacgcctgctgatcctggatgagccgaccgccggcgtggacatcgagatccgccgcgacatgtggcgcgtgctgaaggagatcaacgctgccggcaccacgatcatcctcaccacgcactatctggaagaagccgagtacctgtgccgccacctggcgatcatcaaccatggccagatcgtcgagcaggggccgatgcgcaccctgctggccaagctggacgtggagggcttcctgctggacatcgacggtgacctgccggcgcagctgccggtgatcgagggcgcgaccctgaccgcgccggacccgcacacgctggacatcgacatgccgcgcgcaatggacctcaaccgcgtgttcgccacgctcaacgaggccggtatccgcgtgcgttcgatgcgtaccaagagcaaccgcctggaggagctgttcgtgcgcctcaccggcaacctggagaagcctgcatga

SEQ ID NO: 495906 - DNA, 723 bp, Stenotrophomonas maltophilia
atgctggccccgaccgtcggccactaccagttcgtgcgtgacgatgggcagccgctggatttccagcccggccagttcatccaggtccatttcagctacgccgatggcaccgaaaccaagcgcagctactcgctggcgaccattcacgaccacgcactgggcccgggcgaggcggtggatatcgcggtcagcttcgtgcccggtggcgccgccaccgcgctgttcgaggcgctggagcacggcggccagatcagtgcgtccggcccctacggccgcttctgcctgaatcccggtgaccacaatgcccgctacctgctgatcgccaccggtaccggcgttaccccgtaccgctcgatgctgccgctgctggaaaaggccatggccgaacgtggtgcgcagatcgtgctgctgcagggcgcgcgcagcccgggcgagctgctgtacagcgaggacttctacagcttcgccgaaaaacacccgaacttccgctatgttccgtgcctgtcgcgcgaactgcccgccgatccgcatccggacgtgcagcacggttacgtgcagcaggcgctggccggtttcacgccggacccggccacggacatcgcctacctgtgcggcaacccggacatggtcgatgcctgcgccgagctgctgaaggccgccggcctgggcaacccgcagatccgccgcgagaagtacgtaagttcaaccccttcaaaggcttaa

SEQ ID NO: 495907 - DNA, 1335 bp, Stenotrophomonas maltophilia
atgcaagtggttatgccccctgagggagcctttgcacacgcgcctaagttgcagcatgtaccgattctgatcggtgacgatggctcatacccaattgaagccaaccgctacctcgatgagcgcagcaacggggaatggcaacttcctcgcgaccgatcaaaagcaaaagctgagagtgagctcttttacgggcccatcccaaccttgcgctcgcgaagaaacatggccgcaaggctttctatttttctcgaatggtgcatagaccaagccactgattggcgagaaatttcctacaacgagaatatccttcatcagtatcagccggcactcctgagtggagacggctccccgagtgggaggcagttggatcccgctacagttaacctctacgtcaatgaggcgtgtctatttctgacctgggccagcgagcgcggctatcgcctgcccatgcagatacctgtaagaaaagttgcatacacctacatatcgcccacaagctcgcaaagcggaacactgcgctcaaagactgtgcggatcgggtctctaactgcgccggaagctccgatcatcctccctcctgacagggaggttgagatgtggttgaagtcgatttcggtgcgtgcgcccgtaaaaattctgatcttcgagctgatcatccgttctggcctcaggatctcggaagccaatcaactacgggtcacctgttttccagcaaaaagaacgagcgagagaaccaactggcaacccgactggatattggctggtgaggttccgctagtgctcaagtatggcactaagggaggcaaggtcagtcctgggtcagaccttggcacaagatggcgtacggtatttgtgccactagatcttgccgaaaggatctggcactacatttcggtgattcgaccgacccagctgacgagatatcacattggtgataggaaacacaccaagcggacagatcgtctgtggcttggagaaggtgtgaaccgacctgtgagcaatgagatgcttcgccggatttggacttccgatcggcattgtcccaaaggatggcaccctcatacaggaaggcaccattttgcggtggagaagatctgcgccctgacgcgggcgcagttggccctcgcaggcaactcagagctgagtggtgctgacttcggttggttgcatgggctcatggccggacaggtaaagatgcttctcagtccgcttatggggcacgttgatgagcgcacgacgatgcaatacttgcgcgctgcggtagccaaaattggtcgtgatcgagggcatccagcaattcgttggaatgcgatcatcgacgaggcattgacgtga

SEQ ID NO: 495908 - DNA, 1692 bp, Stenotrophomonas maltophilia
atggcctcaaatggaattccattcaaacgggtggttagacttcgcgatctgacatcccggcacgttgccctctacacaagcccgggtccggagggtgcatgggatgccactatggacagcagagctgccgtcgtccgcgcgattataaagaccgcgattagctaccatgaacttccagagctagtacttccagttttcaggatagcctcgaatcgccgcgagaccccatccgaagagcacggattggccgtcattaggctgctacgagcggaggcactgaaggttctacagcggtggaggagaacggacagactcattcctcaaggacgcgatctgatcgagttgtacagagagaatcctgagttcatgaatgcccccgacttcgtatgtacggaagcggatgcgcacgcgacctatcgcgcgctcataaggctgacgggaaatccagtgcctcggcgatctcagttgttggcgatcttcggcaagcgcatcaaaagactcccaagctggtgggcgcactaccccgatgaccacgaacgatcaggaagcgaggtcggctggcacgatctggttgccggaacctatcctactagcgcagatgtctcaattttcttcctgctctttgtagcgcggagcgcctggaaccccgcaaccgcagcatccatgaacttgagcgactggacggcagtctatgatgagcagcatgcatggatctatgcgcctaaggaccgggccaaagggaccgcgcaatggactgtgtcacgggtaggcgatgcgacgggctgtcattcgttagttgagcttcttctgaagcggacagaagggcttcgaggccatatcgaaagaaacccgcgcctgtgccctctcccagacgttgtcgctcgtagtccatgggtgggcgtaacagtgcgcggacggcgacaaggggtgtatgtagtaaatccccgcacaactcgaactgcaaacaactggctcgcctctctgatagagcaactcgatgacggcacccgtacagcttccgagaccatgtcaattggacagttcagagatgtcgccgcggctgcgatcttcaaggattctcaatactcgaactgggtaatgatggtactacttggtcacaagaacctcatgaccactaggcactatggctaccgaagatcttcttttgaggaatccttctcgcttgtgtccgaagtgattgatgacttgttctcccagcttcgggtcaatcgtgtgttcgacgtagccttgacgagggcgaagctcgcaaagttggacgtcagtgaagccgagatcgaaaagctgaatcaagcacgccgtcataagacctacgacggaagcggatgtgcagatccttacagcccgccagcagtcattgatccaggcaatccgagagatggatgcactctatgcgtccagcagcataggtgtgcttccagcggctgccccaactgttttgtgttcacggacagcctggacttcatctgccggcgtgtggcagagctagaggcagttcggacctccgtaggaatggttcggttcgatgctggatcagatgcaagtgacctggcgcggcttcgcctaaccgttcttcaatggccagcagatgcagtgaagttcgccattgataagtgggcggcaaggatagcctccggtgagcacatgccaatctacttcgcagggcagcactga

SEQ ID NO: 495909 - DNA, 2004 bp, Stenotrophomonas maltophilia
atgaaaatggtcaaccggtctctagtagcaggcaaccatgaactcctagctcctgacgtggaggtgtcgctactgtcgattagtccgaatgagctgaggttggcgccggaggcaaagctgaagcagcttcagaagcttgttggaatgggggacaactggggcgttcttcgtattgacgacgaacatcagtctggcctacggacctctgatctcgatctaaggctctattctggaaggggcaagacgtgcaaggggaagcactcacccttcgtagttcgagagcttatgaggctggcgatcacgatggcgataattccaggcaaaaccgggaaggtgtatagatacacaacgatccggacgctcattgccaatcttaagagggcgatccagcgtacaaatgtacgtccaagctccaagagactctggagcctggtcgaacgcgctggcctgacgcagaagtactctgactgccttggggtggttgagtactaccaccgactggggtgtcttcccgatggccccgcgcccatgcgtccaacggttcatggaatgaaggctgcgcgagatcgaacgggtgaacctgagcatacaatcccggtcagcatagcgaaacctcatcagccatactcagatgagttcgtctctgaagcaggctcgatggcactggtgatgatcgaagtcgttggtcctactttgttggatgccgtagaggccgcactcgccgctactgaaactactcgtgatctgaaagacggtccctcgccatctcccagtcgccgagctgctcgcgtaagcaatgctgtgatccggtcatgggaatggcgggggcctgacggggagccgcttagggatgccccgcttcaattttcgatgaaatccgggcgaagtggaaaaaccgtcgcatggccgcctcggacgttaccccaggccttgcgcctgatagtggttctacagggtgcacacgcttttccggtggctctttctggcggtccccgacatggtgaactgctaacgatgcagatcggctcgcttggcaagcgaggtggttccagtgtttacgagttcagaacctggaagtttgagaatcccggagggaggcagagtgaagcgccagcgccgtcaattgccattcaagcgattctgcagcaagagcgcctagcgaacatttttcgacggcaccacggcctaaaggggaacggcctgtgggtttccccaagatatccagataaggtgccgagccttgcgcatgtgttcaatagcttcgtggagatacttggcctggagcgctggctcaccgatggtggtatgaacccgcatcgattccgaaagaccctcgctcgaattgttgctctagcgcttgtccatgcgccaaagattttgatggatgtctttgggcacagggatgaacaaatgacaatcatgcgctacatactttcggatccaggaattctttccgaagtacagcaagttgtacgtgagatgcttattctaaagggagtggaggcgatcaataaggctgatgaggttcagggggccggcgcagagaagctacgggggcgtgtggcgctgttcgcgcgccggctgggtaagtccgcccttgatccgcagaacatcagggagttcgcccgcgcgatgactgctgagggctcttcttgggcagttgtcgcaccaggaatagtgtgtacgaacttcaccgatggaggcctttgcaacaaggggcatggtcaggctaatccacactactgtcatcctgcatgtgagaatcagttgattctccctgacgacgaggataaggcgtccagaagcgttgttcaggccatcgagacagttcagtacaatcttgagttgctagagcacgctttcgtggatgatgacgttatgctcattgctcagttccgggggcagatcaagtccgtgctcggcaggtggaagaaggtggacgaatacttctcgaagagcagtttgctgacgcgcctcgtacccaatgtggtacttctgaaatga

SEQ ID NO: 495910 - DNA, 507 bp, Stenotrophomonas maltophilia
atgagacaaaagaagagtcttgccgagcttggaaaggagcggacggaggcgttcgttgcacgccttcgatcaactatggccgagattgacagggagatatcggagaacgacggagtgtatccacggaactctggtcggctgaatgttgcagagctgtgtcggcgggcaaaggtaacagcggtatcgctgcacggagagaagcatgccggcaccacaaagctcgaggtgcaggcctggctcacgaaacttcgagtggacgttcctacgagcgtgaaggccgccagacgaaagtcctactcacaaaggctgggatggaaagagaggtacgacggtatttctgcgcagttcaagaacatgtactcgatcgaggtggtgcagcgagatgcaaagatcgccgccttgaagaaggagatttctgagctgaagtcacagatcaagaagcagcgcgaggcgggctcaagggtggttggaatcgagagcgggagaaggagaaaagcgagttcgtaa

SEQ ID NO: 495911 - DNA, 1614 bp, Stenotrophomonas maltophilia
ttggcaggacctccccgcgagatgtatcgcgatgatctggagtccgaacgctgggatcgcctggttgctcgcgcagtatggattcgtctagcgaagctggagtcctcgggcctacatcttggtgtgtctgcagcaaggcgcctagcggagatatccatcgcgcatcctgagttgagattggaccctaacgagaaggacgaattctcacactggatgagcggcaccggagatccggatttcgaggacggcagagaggtcgatgtcgcccctcgcactcgcaaggagctagttgaatggcttgaatcgccgaggcctgcccatagaccgttctatgaggacacttggcgggatgtctgccgtactcgcttcttccatagccttgccgcgctctgcgacctcgctcaccaagacgtctggcccgcagttcggtggcgcgaggcgcttcaggtttggtcggacgattcaatggcagcccgctcctggcagtacgcatcgcctttggtactgctaatgcctgatgaagttctgtccgagatcgcacctgcagtagcgtggtggatggaggccacttcaagaagcggcgcgaatcgcgagaacctcctattgactctcgccggtcgagtgcttgcgcttccgatccccttgagtagtggcatgacaaggaacggcgagccaatcgataaccctgtctcggaggcgattaatcaccccattgggcatgccacgcgcgccttgctcaatctatggttcaagagggcgcccaacgatggagacctacttccccctgaacttaaggcggcattttccgccatatgcgatgttgaagtagatcgattccgccatggcagggtgttgctcgcatctagactcatcgccctgtatcgcgtagaccgggcgtggaccgaagcgacgctactaccgctcttcgattggtccaaccctgtcgaagcgaaagcagcctgggaaggatttctttggtcaccgcgactgtaccagccattgatggtggcattgaagtcgcagttcctattgacggccggtcactacgccgaccttggtgaacaccgaggacagttctctgctttcctaacgcactcagccctagggcaattggaaggctactctcgggacgactttagatctgcattgggcaagcttccacaggatggactggagaagtccgcacaatcgctctcccaagcactggaggccgcaggcgatcaacgcgaagacttctggagaaatcgagtccaacccttctggcaggagatttggccaaaatcgcgcaatctagctacacccagcattgctgcctccttagctcgactcgccatcgcggcccgggttgagttcccttccgcattgaaggcggtacgtgactggcttcagccggtagcgaattcggactacatcgtccatcttctactagaatctggcctttgtagccagtcgccaactgaggctttagatttgctgggtgccgttgttggatcccaacaatgggcgcctctaggactgaatgaatgcctagctcaagtaagggccgccgctcccgacctagagcgaaacaaccagtttcatcgacttgaggagctggtgcgaacgcgctcctaa

SEQ ID NO: 495912 - DNA, 2169 bp, Stenotrophomonas maltophilia
atgcagttcatcgtcgacgggccagacatcccagaagcacttctacaggcacacgaagaaggacgagtagtcttcttctgcggcgccggagtctcctacccgtcaggactacctggtttcaaaggactggttgagcaaatctatgcgtcgaatgggacatcattcacggacatcgagcgtgccgccttcgatcattcaaagttcgacgcgactctcgatctacttgaaaggcgactgcctgggcagcgattggcggttcggcgcgccctagcgaaatcgttgagacccaagcttcgtcggaagggagcaattgacacccaagcagcgcttcttcggttagcacgaagccgggatggcgcgttgcggttggtgactaccaacttcgatcgaaccttccacgcggcggcgaagcgcatgggccaaccatttccggcctatcccgctccaatgctgccgatccctaagagcagccgctgggatgggcttgtctttctgcatggcctgcttccggagagtgaggatgatgcagcactccatcgactagtggccaccagtggtgacttcggcttggcttacttgaccgaacgctgggccgcgcggttcgtcagcgaactttttcgcaactatgtcgtttgcttcattggatacagcattgacgatccggtcctccggtacatgatggacgcattagcagcagatcgaatgctcggtgaggttaccccgcaggcgtgggcgttcggagattgcgaagccgggaaagagcatctgaagactattgaatgggaagctaagggcgttagacctatcctctacagggttcagcctgctacccatgaccactctgcgttgcacgacacaatcaggacttgggcagatgtctatcgcgatggagttcaaggtaaagaggccattgttgcgaagcacgccatggcccaacctcaggacagcacgctccaggacgattttgttggacgaatgctgtgggctctttcagacaagtcaggcctccccgcgaagcgcttcgcggagttcaatccagttcccccgcttgagtggctcctcgaggcattttcccatgagcgattcttgcagagggatctagcccgctttggcttctcctcggttaaggaggaggatgcagaactcagattcagcttggttcgtaggcctgcgccttatgatcacgctcctcctatgacactggcgtcttctggaagtatggccagccgatgggatggattgatgttccagctcgcacgctggcttgtgcgtcatctggacgatccacgattgatcatatggattgcagagcgtggcgggcagatggatagtcgctggatctctctagtcgactccgaacttgagcgtctggccacactggaacgggatggcaaagtctcggagctggatcttattcgcctggacgccccaaagggtgtgcccgatccaaagatgcgaactctttggagaatcgtgctcggtggccgactcaagaccccactgtcaggggggctgctatatcgttggatcaagcgtcttagacgtgagggactgaacacgtctcttcggatggaacttcgtagccttctcagcccaaagatcacactaaggcgtccatttgtttgggacggcgaagtggccgatggtgcagacgagacagtgcgaattaagcagttggttgactgggaccttgtgcttgcggaggacaatgtacatgcggtcctccaggatcagtctaagggtgagtgggagaaggcactcccgctcctgcattcggacctacagcaactgctctgtgacgcgctgggccttcttcgagatctaggagaggcagatgaccttgtcgatagatcctactgggaccttccatcaatcacgccccattggcagaaccggtccttccgagactgggttagcctgattgaactgctacgcgacgcttggttagcagttcgagctacggatgagtcgagatccacgctcatggctcaggcatggttcgagatcccgtatcccacattcaagcggctggcattgtttgcggccagccaggacaattgcatcgagcaggagcagtgggtcgattggctgctactggatgaggggcggtggctgtggtcgcagtgcaccgcacgcgaagtgctgaggcttcttgttctccaggggtga

SEQ ID NO: 495913 - DNA, 843 bp, Stenotrophomonas maltophilia
atgcgcgccgccgccctcgaacttggcttatctgcctcagctctaagtcacgccttaaagcggctggaagatcgactgggtgtgcgtctcgttaatcgtacgacccgtgcgctttcgatcaccgttgaaggacgcgaactggaacgctatgcagccactggcctagatacaattggagagggtctagccgcgattcgggctcggaagcagtcagagatccagatgctcaagatctcgctatcacacgatgcggcgcgcctcctactctggccagtgctgtggagctttcagcaacgctggcctaacgtccatcttgatctagtgatagaagaacgcctggtggacttagtagcggaaggctttgacggcggcattcgatacggtgaccgagtgccagaggggatggttggtctggagcttacacatccgcttaagtgggtggtcgtggcagcgcccagctatctgcaacatgctgggagacctgagaatccaagcgatctgcggcggcatgtttgtattgagaacagaatcggcgacggctcaatctatcgctgggaacttggcgacggtgatcgtatggtcaaggtaattcccagcggaatgctgagggtgagcagcaccgactctctgctcgctgcaacgttgcagggattggggttggcatactgtctggaactcagagtgcaggacgaaatctcgtccggcgcacttgaagttgtgatgccagactgggcatcaatgggcgcaccattcatgctgtactaccccactcgtcgccaatccctgcccggcctcaaggggctagcggaggtaattcggacacagatgatcgatgcatgctaa

SEQ ID NO: 495914 - DNA, 801 bp, Stenotrophomonas maltophilia
atgcgtccgctgccggaccacggtgagaaaacctatcgaggcaatcggcgccttgaaggccgcaaggcactgattacgggaggagactcaggaatcggtcgggccgctgccattgcatacgcccgcgagggtgccgatgtggccatcaactatttgcctgaagaagaggaagatgcgcgtgaagttattgcgctgatacgcgcaaccggccgtcaggcatacgctttacctggtgatattcgcagcaaagacttttgcctggatcttgtgcgcaaggcggcatcggcgttgggctcgatcgacaccttggtgctgaacgcggcgtatcagcagcaggagccggacattctaaagattaccgacgaacacctcgagaacaccttccttaccaacatcaatgcaatggtatggatgacccaagaggcactgcgtgtgtctcttccgcctggaagcgtcatcatcgttactacgtctgagcagggctacgatccgtccccctacctggtcgactatgcgatgacgaagagtgcgcaggttagctacgttcgctcgatggctaagcagcttggccctaaggggattcgggtaaacggagttgctccaggtcctatctggactccgttgcagatcagtggcgggactgcatccgagaagattccgaacttcgggggggacaagccgctaggacgcgcaggtcagcctgctgagctgggttcaatcttcgtccaacttgcggcaagcgacgccagttatgcgaacggccaggtgtatggggccgaaggtggcgctgcacgcccctaa

SEQ ID NO: 495915 - DNA, 735 bp, Stenotrophomonas maltophilia
ttgacagaagcaagttacagccttagaaaccgctgcgttgccattactggcgccggttcggggatcggactggcaacggcggagatgatcttacgcagtggtggaagcgttcttggaggatccaggcgtttaggtgacttcaagcggctacaggatgagttcggcgctgatcgcgcctactggatgcgtctggatgtgcgcgatccggatagcgtgggtgccttcgcatcttgcggcattgatcactttggaagcgtacattcggtagtggccaacgccggggttggctactacggcggagtcgctgacgcaagcgatgatcaagtcatcgaaatgtgtgaaatcaactatctcggaacggtcctcacggtacgtgctttcctccctcatcttcgtagcgttggtggcggggatattttgatcgtatcgagcgtcgcagctcatcgcagtggggcggacgaagccgtctacgcaggtaccaaggccgcccagctcatttttgcgggcggcttggaccgagaagtaaggaaagatgggattcgcgtgagtgccatctgccccgcaggtactcatacatcttttgccgtgggtcacggtcgcacggccgacgatccccgtttgagcgaattcatggccgcgcaggatgtagcctcgcagattgtctattgcttgcagcaaccgcggaccttgcggaccggcgtatggacgacttggagcatgagccagtccagctga

SEQ ID NO: 495916 - DNA, 2052 bp, Stenotrophomonas maltophilia
atgtcgcacacatacctgaagtcacgacttgctcttcccacgctgacagttgctattggtctggccctttcttcgcatgccagcgctgaagctttgacgcatgcctcctccgtcaagcagttggacaccttggtcgttaccgccaccggtgcccagcagtggatcagggatgcgccagccagcattagcgttatcagccgcgaggagatcgagcgtaagccggtcaccagcatcggccagctgctgagtaccgtccctggagtgaccggtggctatgcactgtccggagcgcagtcgaagatccgcctgcgtggactgcccgagcagtacacgctgatcctgatcgacggccgccgccagggcaactcctccggcgtgaactaccgcgacgacctgggtccgcaggatctgaactggctgtcgccggacatgatcgaacgaatagaagtggtgcgcggcccgatgtcgtcgctatacggttcggatgcgatgggcggcgtgatcaacatcattacccgcaagatttccgaccactggggcggctcggtcaccttgaaccacagcgtgcccgattcatccacccgcggtgataccacgcagatgggtgcccttttcagcggcccactgaccgacaacctggggatccgcatcggggccaacgtgaccgaccgcaagtccgatcgccttgagggccagactccgggcagcaaggcggagaatgccaacctgcagttccactggcgcctcaacgatgaccacgcactgaccatagaagggtcgcgcggcgtgcagcgcaacaccggcagcggtgatgtatatgcctggggtctgtccaagctggtacagaccggttacgtgctgggccatgatggccgttacggcgactccaccacctccaagaccacccttgtgcggaacgactaccaagacaagggcagtgcggtgggcaaccattcgaaggaaacggtgttcgatactgccttcaccaccgctttccattggggcttcgagcacagcctgaacgtgggtggtcagtggaagcgcgagcagctggaaaacagcgacaccatcggtaccgtacctgtgacttggaccggcagcagccgcatcagcccgaccagtgaagcggactcatgggccttgttcgccgaagaccacatcaccctgcacgagcgcttcgtgctgactctgggcgtgcgctgggacaacaccgacaactacgacgacaacgtgagcccgcgcatctacggcgtgtggcacccggcagacgcatggacagtacgcggcggtgtctccaaagggttccgcgcgcccaatcttaagcagggcaccgctggtgcggccacccagtctctgggacgcggctgcggcagcctgaccccggaaggctggaacagccggctgatcaacgccgacggcacgaccggctgctacatggccggtaacccgaacctgaaaccggaaaccagcaccaactatgagcttggcgtgggcttcgaccagaacggctggtccgcatcggccacctacttcctgaccaacttcgacgacaagatcgaacaggtgccgctgcgcgagatcccaggccagaacactagcttcgtaaacggcttctggtggacggtggcgcagaacatccagaaggctcgcacgcgaggcgtggaagccagtgtgaccgtgccgctgcacgagcgactgagctggaccaccaacgccacacgcatgttggaatcgaagaaccgcaccaccggcgccagcctgctagtggtgccgaagatcaccgccaacacttcgctgaactggagcgtgtccgatgcatggtcgcttaacctcagcgcgcaacacatcgggaagcagcttgtgtcttcgtccagacctaccttcgccaaggcatacaccacggtggatctggtcaccgctctcgatgtgaacgaaaacctgaccttgcgcgtcggcgtacagaacttgggtgatgtttccacgcttgaagaaggcaataattacgacggcggcgcacgcacgctctttgtgggcgcgaccgcgcgcttctaa

SEQ ID NO: 495917 - DNA, 246 bp, Stenotrophomonas maltophilia
atgaagaatcgttttgccctcatcagcgtccttttcgcttccattgcagcgtccgcatcggccttcgcacatgatccggcgcttcatgccgagtcggaagtgaaggaggcgcctaaggcaaagcctgctacgtgtgaacagctggctgaccggacgaagttcaaggtggatcttgccgatcctcagaccaaggcgctgaaggacaggtgcgacgctcaggcgcagtcggctgcgaagaagaagtaa

SEQ ID NO: 495918 - DNA, 642 bp, Stenotrophomonas maltophilia
atgtccatcacgctttccaatcagctgcccagcactcgcaagctgctgaaatccaccgccctggccgctgccgttgcaggggtgattctgctcaccaccgtgcttcccgcggagtacggaatcgaccctacgggcgtaggtaaggttctgggtctggacgccctagcctccactgaccaggtagaggccgtagctcccccagttccggcatctgctggcagcgccgaagccgtctcggcgctgttcgagaaggccaaggttgccttcgggagcaatggcaagcaggccttcgaacccgccgctgtctctctcgccagcactcctttacggcaggactcactgacgatcgagcttgcccctggtaagggccaggaggtgaaggcccatatggctcagggcgctgggatggttttcagctggaaggccacgtctgatgttgccgtggacatgcacggcgagcgtcccgacgtgaagggcccctggaccagctacgccgttgaaggcgcccagcgtcaggccgagggaacgttcattgctccctttgaaggtacccatgggtggtactggcagaaccgcggcagcacccccgtgatcatcgaggtgcaaattaccggctaccaagccgacctctaccagccgtga

SEQ ID NO: 495919 - DNA, 732 bp, Stenotrophomonas maltophilia
gtgaacccgtccatctcaacccctcccaggaacatgcagttgaccatttccaaacgaacccaagcgtggctctacctgcttgcagccatccttctgccttgcgttgcttgggcgcatggcgtcagtgaaggcgaccaggccttcctggaagacagtaccggcctgcagctcatcgcgttcacgtacctcggcgccaagcacatggtgactggatacgaccacctcctgtttctgttcggggtgatcttcttcctgtaccggatgcgtgatgtcagcatctacgtgacgttgttcgcgatcggccacagcaccaccttgctgctaggtgtcctgggcggattgcatgtgaatgcgtacctggtcgacgcaatcattggcctgtcggttgtctacaaggcgctggacaacatgggcgcgttcaagcgctggtttggggtacagcccaacaccaaagccgccgtgctgatctttggcttcttccatggctttggtctagcgacaaagctgcaggatttctcgctctcacctgacgggcttgtcccaaacatgctcgccttcaacgtgggggtcgagatcggacagctgctcgcgctcgcaggcatcttgatcgtgatgggcttctggcgccgcttgccgtcattccatcgacaggcgtacagcatcaacaccgcccttatgtgcgccggcttcgtgcttgttggcatgcagctcaccggctacttcgtttcctga

SEQ ID NO: 495920 - DNA, 3138 bp, Stenotrophomonas maltophilia
atgctagagcgaatcattcgcgcgtccatcgcgcatagatggcttgtgctgcttctggtcctggcgctgtcaggcttgggcatctggaactacagcaggctgccaatcgacgccgtccctgacatcaccaatgtccaggtccagatcaacaccgaagcaccgggctactctccactggaggcagagcagcgggtaacgttccccgtcgagacagccttggccggcttagccaagctggagtacacgcggtccatctcgcgttatggtctctcccaggtcaccgttgtattcgaagacggtaccgacatctacttcgcgcggcagcaggtggccgagcgcttgcagcaagccgcatcccagctcccaactgggctgaagccaacgctgggcccggtcgccaccggtctcggtgagatcttcatgtacaccgtggaagccgagaagggtgctgaagagacctggacgccgatggcgcttcgtaccctccaggattgggtggtacgcccccagatgcgacatctgaaaggtgttacagaggtcaacaccgtcggtggctatgtgcggcagttccacatcacgcctgacccgcgcaagcttcaggcgtacgagctgaccatgcaggatgtgatggaggccgtggcgcgcagcaatgcgaacgtgggtgccggctacattgaaaagagtggtgaacagtaccttgtgcgcgttcctggccaagtggcggacatggacggcctgcgcaagatcgtggtcgccaatcgcgaggggctgccgcttcgcgtcggtgacctcgcagacgttcacgagggcaccgaactgcgaacgggtgcagcgaccaaagatggcaaggaagtggtacttggtactgcattcatgctcattggtgagaacagccgcgaagtcgctcagcgaaccgctgccaagctgaaggagatcgacgagacgcttccagaaggtgtccgcgcgcatgcggtctatgaccgtacggagctggtcgaccgcaccattgaaaccgtcaagaagaacctactggaaggtgccctgctggtcattgcggtgctgttccttctgctcggaaatcttcgcgccgcactgatcacggccgcggtcattcctttgaccatgctgctgaccatctccggcatggtccagaaccgtgtctcagcaaatctgatgagcttgggtgcgctggacttcggtctgatcgtcgacggcgcggtcatcattgttgagaactgtctgcgccgcttcggcgagcgtcagcacgccctggggcgtctgttgacccgggatgagcgctttgctttggccgccagcgccagtgccgaggtgatcaagcccagcttgttcggcttgttcatcattgccgccgtctacatcccgatctttgcgctctccggcgtggaaggaaagatgttccacccgatggccctgaccgtcgttatcgcgctgactggtgcgatggcattgtccctcacgttcgttcccgctgcggttgctcagtttgtcacgggcaaggtctcggagaaggaaaccaaggctatgcggggcgtaaccaagctgtatggcccgatgctggagcgggcagtcagtgctcgcaaactggttgtgggtggtgcagccgtcctcaccgtactggcgggtcttctggccagtcgcatgggcactgagttcattccgaatctggacgaaggtgatattgcgcttcacgcgctgcgcattcccggcactagtctgacgcaagccatcggcatgcagcgccagcttgaagcgaccatcaagaagttccccgaggtggatgaggttgtcgcaaagatcggcacagcagaggtagcgaccgaccccatgccaccgtcggtcgcagacaccttcatcatgctcaaggatcgcgaccaatggcctgatccccgcaagccaaaggcgcagctcattgctgagctggagaaggctgtccgagcaattcccggcaacaactacgagttcacccagcccgtgcagatgcgcatgaacgagctgattgccggtgtacgcgccgaggtggcggtgaagttgtacggtgacgacctggatcagctggcgcagatcggcagccagatcgaggacgccgcaggttccatcccaggcgccgcagacgtgaagttagagcagatcagtggtctgcctcttatgaccatcacgcctgacctgggtgctttggcccgctatggcgtttcgatcgacgaggtccagaagaccatctctgttgcgctgggcggtgaggcggtcggtcaggtctttgagggtgatcgtcgcttcgacatcgtcgttcgtctgcccgagaacctgcgtcaggacacccggacgctcgcatcgctaccggtagccgtcgccgtcggggccagttccggcgaacagagagcgttcgttccgctggggcagctggctaaagttgaagttgcgccaggcccaaaccaggtcagtcgcgagaacggcaagcgtcgcgtcgtcatcaccagcaacgtacgtggtcgcgaccttggttcgttcgtagaggagctgcgagagaaggttggtcaggaggtgcagttgccggaaggctactggattgagtatggcggtaccttcgagcagctcatctctgccagcaagcggctgtccgtggtcgtgccggtcgtcctggtgatgatcttcggcttgctcttcatggcgttcggctcgggcaaggatgctgccatcgtgttcagcggcgttccacttgcgttgaccggtggcgtggtggctctgtggatgcgtgacatacccctgtccatttctgcaggcgtggggttcatcgcgctgtcgggcgtcgccgtgctcaacggcctggtcatgatcagcttcatcaagagccttagggaacagggcactcccctgcaccaagcggtaaccgaaggtgcactgacccggctgcgccccgtgctgatgacggccctggttgccagcctgggcttcctgccaatggccctaaacgttggggctggcgcggaagttcagcgcccgctggcgacggtcgttatcggcggaatcatctcctccacgctgctgaccttgctggtgttgccggcgctctatcgcctcatccaccgcgaaggggatgagcggaaggaggacgcagcgtga

SEQ ID NO: 495921 - DNA, 1233 bp, Stenotrophomonas maltophilia
atgaatcgttacgcccttcttatgttgcttccgctggcactggccgcctgtggcggtgaaaagccggttgagaaagaagccgcagagtccaccgccgcggccggcgactacgagcgcggccccaaccgcggtcgcatgctccgcgatggtgatttcgcacttgaagtcaccgtctatgaaaccaacacgcctcctcagttccgcctctacgcctatcgaaatgacaagccgatctcaccgaatgaggtgaaggcaacaatgcagttgaagcgcctcgacggtgaggtcaatgatttcactttcaccgccgaaaacgactatctcgtggggaacggcgaggtcgtggaacctcattctttcgacgtgaaggcagacgcagtggtaggaggaaagacacacacctggtcctatcagtcctatgagggccgtaccaccatcgagccaagcgctgccaaggatgcgggtgtggtggtggaagaggctaccgctggcactatccgcgatacggtcacgctgatggggaacatcgcggtcaacactggccgccaggccgccgtcaaagcacgattcccaggtattgtccgcagcgtgtcggtcgagatgggccaacgcgtttccgcagggcagacgctggcgacggttgaaggcaatgacagcatgcgcacctacgcggtgattgctcccttcagcggcatcgttcttgcgcgcaacaccagtgttggtgatgtggccgccgacaacacactgttcgacgttgccgatctgtcagaggtctgggtcgatctacgagctctgggcactgacgccgagcgtctcgctccaggtcaagcagtgcggatccgttccgccacgggtgccttggagactgaaggtaggctccaaagcctgcttccgctggcaagcagcggccaaagcgtggttgcgcgcgtgagtatccccaatggtgacggcaagtggcgtccaggaatggctgtctcggccgaggtcatcattgccgagacacctgttccactggccgtcaaagagtcagggctccagcgatttcgcgactttaccgtcgtatttgcgcaggtgggcgatacctatgaggtgcgcatgcttgagcttggaaagcgtgatggcgagtgggcagaggttcttggcggactgaagcccggaacgcggtacgtcgccgagcagagctatctgatccgtgcagacatcgagaagtctggcgccagccacgaccactaa

SEQ ID NO: 495922 - DNA, 1251 bp, Stenotrophomonas maltophilia
gtgaaattccgtagtgtgtgggcgctggctgttgccggcgcctgcggtgtggcccttcctggccacgccgccgaagtgctgcgcctggaggatgcggttgcccgcgcccttggcactcacccaagcgtgcaggcagatgccgcacaaatagaggcgacaaagaaccgtgcggcgcgagagggcttagcagccccgttggtgctcggcggagaactggagaacgtggccggtagtggcagcgtgcgaggtatggacgctgccgaggcaacgttccgggtatccaagattctggaactgggtggcaagcgggcggcccgccaagcgcttggcggcgcggaggtcgatgcagcccagcgagaggctgatgtgacccgggtggccatcgccacacgcaccgctggtcgattcatcgacgtgcttgcggcgcaggagcatgtcgagcatgcggaagagcggattcgtatggcccgcgcgctccagcgagaggtggcccgctgggtctctgcggcacggaacccggactcagacctgagggccgctgaaatcgccctggccgatgcagagctcaagcgtgatcaagcagtccagcggttggaggcatcgcgcatggcgcttgcgtcttcctggggctctttcaccgctgacttcgacaccgtcgccggcgatacaaacatcctccccccgctggatgactaccagacgctgtccgaacgccttcagaacgcgccacagcaacgtgccttcgatgcccagtccagaattcttgccgcgcgccgcgatgtcgccgtttccagcgcgaagcctgacgtgagtgttggatttggacttcgccgtcttgaagcaacgaaggacagtggcttggtcatgtcgatctcggttcccttgggaacccggcgtcgatcagcctactcggtatccgaagtcgactacgaactgagtgcgctcaagtcacgccgtgaagcacaaatgttggagctcaaccaggagctgttcggagtctatcaacagctgcgccaagcgcagttggaggtcacctccgttcgtgagcggcagctccccaaggcggagcaggcgatgaatcagagccgtcgtggcttcgaggagggtcgattctcctatctcgcattgagccaggcgcagaagacgctgttcgaccttcgtgagcgcgaagtcgagtccgccgcactctatctccgattgctggtcgaggcagatcgcctcaccgcctccgcccaggatatccgcccatga

SEQ ID NO: 495923 - DNA, 651 bp, Stenotrophomonas maltophilia
atgtacaacagtaagcccgccgaaggcgaccttcccaccagccgccagctgggacgcaccaccgcaattgccgccggcatcgccatcatcctcctggttggagtggtgatgccatctgagtacggaatcgatcccactggtgttggtcgggtacttggtctgaaggaaatgggggagatcaaggaacagcttgccgaggaagcggcagctgacgctgcgatggacgcaaaggccgccgaagacgaggcagccgccctgctgacgcaggtgtccacgcagaaccgtaagaccgttgaagttgctcagaagcctgccgcgagtaatgcggccaccgctgccgaatggcgggacgaagaacaggttgtcctgacgccgggccagggcaccgagatcaagctcgtcatgaaggcgggcgagcgcgccagctaccagtggtctgttgaaggcggcgtcgtgaacttcgacacccacggagacggcggcggtcgagcgatcagctatgagaagggtcgaggggaagccaccaagcagggggtgctcctggctgccttcgatggcaaccacggatggttctggcgcaacaggggcgaggagcccgtaacgcttctgctccgcaccggaggggagtacgagttgatcaagaagatgtaa

SEQ ID NO: 495924 - DNA, 651 bp, Stenotrophomonas maltophilia
atgctgctactcacagctgacggggcgttggctcacgcgatcgccgaaggcgacaagggctacatccaggaaatatctggagtaaatctgatcgcattcgcctatctgggcgcgaaacacatggccaccggctatgaccacatcctgttcctcctgggcgtggtgttcttcctgtaccggatgaagcatgtcgcgctgtatgtgacgctgttcgcgatcgggcactccacaacgatgctgctgggtgtgctgttcaacgtgggcatcaacagctacctgatcgacgcaatcattggtctgtctgtggtctacaaggccttggacaatctgggcgcctaccagcgttggttcggcttccagccaaacacaaaggttgcgacgttgatcttcggcctgttccacggctttggtctgtcaaccaagatcatcgagtacgacatctcacccgatggtctgttgcccaacctgcttgcgttcaacgtcggcgtggagatcggccagatcctctcgcttggcgcgattctgatcgcaatgggctactggcgccgcacgcccagcttcttcaagcacgcctacaccgccaatgccgccatgctctgcgccggattcattctgatcggcatgcagctcactggctacttcgtttcctga

SEQ ID NO: 495925 - DNA, 324 bp, Stenotrophomonas maltophilia
atgatgctgaagctctgccgctggctggtgccagggatggatatcgctcagatcaactcgagcgggtccagcaaggctggccaagatgcctacagaagccgtcagatcggcctggtgcaacaggctgtgcaatccaaccgcgtgttcaagatcacggtctgcggcatcactcaccccaacatgggggtgaccatgttccaccgcagcctgcacgatgtgctgcaagccgtgcagctcacccagatgattcaggacgggtcgcacgagcagactcgccaccagcatcatgaagatgcagctgcgcaacagcacgctggttggtag

SEQ ID NO: 495926 - DNA, 1335 bp, Stenotrophomonas maltophilia
atgatcgaggtcctacgctttccaacattcaggaacctgttcgctgcgcaggttatcgcgctgatcggcacgggcttggctaccgtggcgctctctcttttggcctatgacctggcgggggctgaggcgggcgctgtgctaggtacggctctggcaatcaagatgattgtctacgtgctgttggcccctctgtccggagcgatcgtcccggcaaatctacgcaaaccggtgcttattgccctcgacctggtgcgggcgggcgcggcgctttgtctgccgttcgtcaaccagatctggcaggtgtacctgctcattgccttgctgcagtcggcctcggcgtgcttcacccctctgttccagtcgacgatcccggaaatcctgaaggaggaacgcgactacacccgagcactgtccctgtcgcgcctggcctatgacctggagagcctgctgagtcccgcgttggccgctgctctgctgacgctgatcagcttccacggcctgttcgctggtacgtccgtaggcttcgtgatatccgccatgctggtgttctcaactgcattccccttcgttgctccttccctgagaaaggacggtccctacgcccgcgcgattcgaggaatgcggatctacctgaagacgcccaggctgaaagggttgcttgcccttaatctgtgtgcggccgccggcggcgccatggtgttcgtgaacactgtcgtcgtggtgcgcaacgttctcggcggagcagagtcacaggtggcatgggcgctggcagctttcggtggcggttcgatgctgacggcgcttgtcctccccaaggttctcgatcgggtggctgacaggcgtgtgatgctctccgcagcccttgcaatgtgcattgtacttgtgaccctcagtcttacctggctgctctcgccctcctccataggttggcccatcgtgctcgccggctgggcattgttggggatgagctatgcggggctggtgactcctggcggcagattgctgcgacgatcagcggaatccaccgatctgccattcctgttcgcagcgcagttctctctctcccacgtgtgttggctgattgcctaccctctggcgggaaccgtgggtgcgaagtttggaatgccagtggcgatcatggcactggcagtagtcggcatcgccggattcgtgttcgcctggagaatctggcccgcccatgacccggacgagatttcccacggtcacgacgatctggctgcggaccatccccactgggcggaacacgcctcttccaacggcaagcattcacatcggtatgtcatcgacgacgtgcaccctcgttggcctggatga

SEQ ID NO: 495927 - DNA, 3246 bp, Stenotrophomonas maltophilia
atgatcgagcaagtacttacgggtgccgtacggcaccgctggctggttctgttcatcacactggtgattgcggtgatcggcgggtggcaactgaacctgctaccgatcgacgtgactccggatatcacgaacaagcaggtccagatcaacaccgtcatcccgacgctgagtccagtggaggtcgagaagcgcgttacctacccgatcgagaccgcgatggcaggacttcggggcgtcgcgaacacccggtcgttctcgcgcaacggcttcagccaggtcacggtgatcttcgatgagagcgcagacctctacttcatgcgccaacaggtcaccgagcgactgactcaggctcggccccagttgccggagggtgccgaaccgctgatgggcccggtttcgaccgggttgggcgaagtattccactacagcgttgaattcacccacccagatggcaaagatgccccgcgaaatgatggtaagcctggctggcaaagcgacggttcgttcctgactgatcagggggaacggctgacggacaacatggcacgtctggcctacttgcgcacagtccaggactggattgtgcggcctcagctgcgcacgacgccgggcgtagcagacgtcgacagcctcggcggctacgtcaaggagtatgtcgttgagcccaatgcgagcaagctcgcagagtacgggttctcctataccgacctagccgacgcgttgcaggatgccaacctgtcggtcggagcagactacatccagaggtcgggcgagtcctatctggtgcgcgcagacgcccgcatccgctccgtggacgagattgcccgtgccgttgtgggcaatcgcaacggagttcccgtaacagtgggagacgtcgcacgtgtggtcgttgacggtgagctccgccgcggtgccgccagccgcaatggctacgagaccgtcgttggcagcgcactcatgctggttggcgccaacagccgaactgtggcggccgcagtgggtgacaagctgcaggagatcggcaagaccatgccgccgggcgtgaggattgttcccacgctggaccgatcccagctggttgtcgcaacgatcaagaccgtcgccaagaacctggccgaaggcgctcttctagtcgtggtcatcctatttgcattgctcggaaactggcgagctgctgtcattgctgcattggtgattccgttgtccctgctgatcaccgcgatcggcatgaacaagctcgggatctctggcaacctgatgagtctgggtgcgctcgactttggcctgatcatcgacggcgcggtcatcatcgtcgagaacgcgctgcgccgtttggcagagcgacagcatgcacttgggcgcccactcaatctatcggagcggctgcatgaaacgatcgcctcgtccaaggagatggtccgcccgaccgtgtatgggcaggcggtcatcttcctggtcttcgtgccatgcctgaccttccagggcgtcgagggaaagatgttctccccgatggtaattaccctgatgctggcgctggcctctgcattcgtgctctccctcactttcgttccggcgatggtggcggtcatgctcaagggccacatttccgagaaagaagtacgggtagtcgctgccaccaagagccgctatcagccgatgcttcgcagcgcaatccgccaacccatgccctacctggccggtggtcttggcgtcctggtggccggcgttgtggcctttggctttgtgggtcgggagttcatgcccacattggatgagcagaatctcaacctgtcctccgttcgcatcccgtccacatcgatcgagcagtccgtcgccatcgaccttcctcttgagaaggcactgatgacgttgccggaggtacagacggtgtactccaaggccggtaccgcaagcctggccgcagatcccatgccgcccaacgcgtccgacaactacgtgatcctcaagcccaaggaccaatggccggatggagtgaagaccaaagagcaggtgatcgagaggattcgagagaagacagcctttcttgttggtaacaactatgacgccacccagcccatcgagatgcgcttcaatgagctgatcggcggcgttcgtagcgacgttgcagtcaagatctatggcgaagacctgacggcgcttgccggcagcgctgacaagattgcgagcgtcctcaagaagattccgggcgcatcggatgtccgtgtggcgcaaacgggaggcttcccgacctttgacatggcattcgaccgggccgcgatcgcccgttacggactgaccgtcaaggaagtggccgacacagtgtctgctgcgctggcaggtcgcatggcgggccagatcttcgaaggtgatcggcgcttcgacgtagtggttcgtctgccccgtgtggaccgcagcgatctcgatgtactgggagccgttccggtcatgctgccgccaggcagtcaggaaggccgtcagtctgttccgcttcgtgaattggtcagcttccgcttcacgcagggtctgaacgaagtcagccgcgacaatggcaaacgtcgaatctatgtggaagcgaatgtggtcgggcgtgacctgggtagcttcgttgacgacgccaaggcggctattggccagcaggtgcagttgcccaccggttcctggatcgaatggggcgggcagttccaaaatctgcaggcagcaacgaagcgactggcgatcattgtgcctctctgcttcatcctcattgcggccgtcctctacatggcgattggcaacggtttgctgacaggtacggtactgactgcagtgccacttgctctggccggtggattcttcgcattggcgttgagaggaatccccttctcgatctcagccgctgtgggcttcatcgcggtatctggtgtcgcggtgctcaacggcctggttctgatctccgcgatcaagaaacgcctgcacgaggggcttccgccagatgaggcggtcgaactgggtgcaatggagcgcgtcagaccggttcttatgaccgcgctggttgcctccctgggcttcgtcccgatggcgattgcaacgggtacgggcgccgaagtgcagaagccactggctacagtggttatcgggggtcttgccacggcaaccgtactgacgctgttcgtgctgcctgcgctgtgcgggctggtactccgaagaactgcgcgcaggaaggccgcgggcattgaagaccccctgccggtacccgaagtcgattga

SEQ ID NO: 495928 - DNA, 1170 bp, Stenotrophomonas maltophilia
atgaagagaagtattccggctgttaacaccctgacgatgatcggcgtggctaccttggcgcttggcgcaggatttggcattgcacgcttatccgccccttcagagacggtggtcgaccccgcgaaagacgaagccagcgccagtgcgccggcggaggcggctcaggaagtcgcgattcccaaggagtatgttgccgctgcggggatctcggtggagcccgtcacttccgctcaggtagcggcgaacatcaccgcatcgggttcggtcgtggcaatccccggtggtgaggccgtcgtggtggcacgtgcggccggtaacgtcaccgatgtcatccggcaggtgggcgacaaggtgaagaagggcgaagtgctggcacgcgtagccagccctgatggggcccgtattgcggctgaccttcgtgtggccagcgccagcctctccctcgccgaaaagaacgtcaagcgcgatgagtcgttgctcgcacagggcgtgttggcacgacaagaggccgaggcgagtcgcgccgcttatctcacagcgcaagcagaagcacaacgcgctgccctggtggcacgcaccgccaatgtggatggaggaggtagcgtcaacgtcatcagccctatcgatggaaccatcagcagctcgcaagtgactctgggcgctttcgtcgagccgcaggcctccctctatagggtcacaggttccaatggcgcggagattcaggcctccgttcgtgcgggtgacaccggtcggatcaaggccggcgacagcgcgtccattacccgctccgacggaagcgtcacctcaggcaaggtccgttcagttgctgccgccgtaggtgggctgacaagggctgccacagtcgtaatcaccccgagcgcagaggcgaacggattggttgtgggtgacggtgtgcaggtccggctggtcaccgcttccggatcgggtgaggggctgtctgtctcggaagaggcggtccagaacatcgacggaaaagacgtcctcttcgtcagaaccagtaaggggttcactgcacagccggtcttcattggcctccgtagcggtggtatggcgcagatcctttctggcgtcactgcgggaaccccggttgctacccgtaatgcgtttctggtgaaggccgagatgaaaaagtcgggcggagacgagtaa

SEQ ID NO: 495929 - DNA, 1224 bp, Stenotrophomonas maltophilia
atgaaaccatcattgcttgccctgacggtgatgctggccctgaccagtatctctgcggcctatgcctcggacgccccgaacttcagcgcgttgctcgagcagagcagggcccaatcccccttccttcaggaaaaggggttcgacacagctgccgctgcgggcgaagcccgccaagcgcgagcgctacgtaaccccaccattgatgccctcgcagagaatctcaacgctccccccagcaatggcgcgagccagcggcagacgacctacaccatcagccagccactcgagatctttggccaacgtggggctcgaatccaggcgggagagaaagggctgcaggcggccgaagctcgccagcaccaggcgcaagtcgaattcgccgcagccttggctgttgcctacgcgtcttccgaagctgggctgatacggcgcgacattgctgccgaagatgttgatcgcgccagaggcgacctgaaggcagctcaggcgctggttgacgcaggaaaggaggccagcctgcgcgtagcacaagcccaggcaggcttgagctcagcagaagcgattgccgcctcaagagaggcagaggcggctgcagctctcgagcaactgtcagtactggcgggaagagcggaaccctactcaggcacgtccgagtcactcctggtgcgcgagtgggttgcgcccgcaattgcgaacgtcgattcggcatctgtcctgtctgcgaaggcagacgtcgacgcgagcgatgcggttctgcgcactgaacgcttcaagcgggcaccggacctgaacctcaccgcaggccgtcgcaacttcgccgccggtggggacgcattggtcgtcggcgtgtctctgagcatcccattgtttgaccggaacagtggcgggatcagcgcggctcgagcacggagcgacgccgcccgtgctcgattggatgccgcacgcctccagagccaggcggaccgtgcgactgcgcttgcgcgtgttgacgccgccaagcgaggactgatcgctgcctccaagggagaggaagcagccacggaagcctaccgaatggcgcgcttgggatacgaggccggtagaaccccactggttgagctgctgcttagccgtcgcacgctgacggacgcgaggctgagcgtggtggatgcacgactcgcacgcgttgccgcctacgcatcgctcgccgtggccagcggtcagattgcctttggagacatgtag

SEQ ID NO: 495930 - DNA, 459 bp, Stenotrophomonas maltophilia
gtgcagtggggccgcaatctcggccgtctttctgcactacgcggcctgcgcggccttcccctcgaatccggcgaaaatttatttcccgcggctcagtgcatctgtcagtttggcccgcgctctcaggacgcgaccctctatcgttttgagactgatacccagggcggaagctgcttcaacctgggaaaggccgacgaaggcagtcagaaccagagcttcacgcaggctcgggtcgatcgtgttgagaacccttcttacttctgcgagctcaagctgagaaccggcaacctgctctggcccggcctgctcggaatgcagggcgcgtccttcctcatcatccaaaggcttggcccgaaacaggaagtggcggacgcgtcgaaaccgttgcgtatcacgaaccttgttgattccaatacgcatcagccaaggaagtaccgagcgcgtcggatcgtactctga

SEQ ID NO: 495931 - DNA, 447 bp, Stenotrophomonas maltophilia
atggcaatcggacccctcatgaggctgccgctggcaacaatcgctggcgccatcattggcgtagtgtgcgcgctggctatcggctggatctggcactcgctcaatcctgggcacagcgatctccatgaacgccttcacgccgtggtgcctctggacgactcggagaagcagatcctccaggccaaggaacagctgttcgcaacaaggcgaggtgagatcgaagcgcgcctgcggattgccaaccgccagctggcggacgccatcgcggctgaccccaaatggaacccccaggtggaacgtgcaagtcgtgaggtggagcgggctgcgggcgatctccagcgcatcacgctcgagcatgtgttcgagatgcgcgagggcttgaaacccgagcaccggccggcctacgacaaggcactccttgaagcacttcgcaccgactctccctga

SEQ ID NO: 495932 - DNA, 456 bp, Stenotrophomonas maltophilia
atgcgtccaatcattcttgcactggaccttgagggaacacttatctccaatgccgtcagtcaaataccccgacccggcctgatggagttcctaaactatgccagcagcaccttcaatcggatcgtcatgttcacctctgtaccccaaaaggttgttgcagagattacatccctcttggtgctggagggacgcgctcccgaatggtctcaacatctcccatacatcgaatgggacggtccgacgaaggaccttcgattcgtttcggcagaacttggcgaggcactgttgctggatgatcacggggcctacgtgcatcccggccaacacttcctctggattgaagcccctctcttcgctgcaccatattctgatggagacgaggggctgcagctggtgatccagcgtcttgaggagcgcctcaatccaggcagcacaaagcccaaggcgcggccttag

SEQ ID NO: 495933 - DNA, 1170 bp, Stenotrophomonas maltophilia
atgcatctgtcacaccggactgtcatcgcgctgtctgtgatcgcaggcattgccacctctggcagcgcgttcgcccacggcaccctgtccacacccgccagccgtgtctatgcctgttaccagggcaatcccgaaaatccgaccaaccccgcctgcgctgccgccaaggccatcggtggtgcgcaaccgttctatgactgggccgggatcaaccaggccgaggccaatggcaatcaccaggccgtcgtgcccgatggcgagttgtgcagcggcggcaaccgcaagtaccgcggcctggatctgaaccgcagtgactggcagacctcgccgatccgtgccgacgcccgtggccgctacacgttcgagttcaaggcgccggccccgcatgccacccgcgagtggaagttctatgtcacccgcgatggctggcaaccgggcagcccgctgcgctgggccgacctgcaggaattctgcacgctgggcaacgtgccggtctccggcgacgtctacaagctggactgcccgctacccaagcgcagcggccagcacatcatctacaacacctggcagcgctcggattcgggcgaggcgttctatacctgcgcagacgtgcgcttcgaggggggcggtggtgtgaccccgccgccgcagtggcaggacgcgggtccggtcactgcccgtggtgcgctggacgtgggcaccgtcctgaccctgcgggtcttcaacgcccagggcaacgatctggaaagcccgcagatcacccttgccgccggccagaccgctgcgaaccagtggccgctggcactggcccacaaggtcaatggcactgcgcagcaggcgcgcgtgggggtgatgaagaacggcgtgatcacgcccgtcgcctcggctaccgggaaccgcgtctatctgaagccaggccacctgttccagctcgatacccgcgtgccggatccggtcgatccgatcgatccgccgccggctgacgactacgacttcgtataccccgcgggtatcggcagctacacgccgggccagaccgtggtgaagggcaccgacggcaagctgtatgcctgccgcccgttcccggaaggcgcctggtgcaacatcaatgcagaggcctaccgcccgggtaccggctctgcctggcgtgatgcctggatcgagtactga

SEQ ID NO: 495934 - DNA, 1170 bp, Stenotrophomonas maltophilia
atgtcattccgatccacaccgctgttgctggccacctcgttcgccgctgcgggcctgtgcctggccggcaacgcgttcgcccacggcacgatgaccacgccggtcagccgcgtctatgcctgcttccagggcaatcccgagaacccgaccaacccggcctgtgccgctgcaaaagcgattggcggttcgcaggcgttctacgactggaacggcatcaaccaggccaacgccaacggcaaccatcaggccgtggtgcccgacgggaagctgtgcagcggcaacaacccgaccttccgcggcctggacgtgaaccgcagtgactggcagaccacgccgatccaggccgatgccaatggaaagttcactttcgtgttcaaggcgaccgcaccacacgccacgcgcgactggcgcttcttcgtcacccgcgaaggctggcagccgggcagcccgctgcgctgggccgacctgcaggagttctgcacgctgggcaatacgccgctgtcggccgacggcacctacaagcttcagtgcacgttgccgcagcgcaccggccagcatgtgatctacaacacctggcagcgctcggattcgaccgaggcgttctatacctgcatggacgtgcgcttccagggcggcggagggaccgcaccggcaccgcaatggcaggacgccggcccggtcaccgcacgcagtgagctgccggttggcacgacgctggcgctgcgcgtgttcaacgccaacggcaatgacgtcgaacgtgtggaggccaccctggccagcggccagaccgcacccgcgcagtggccgttggtgctcgcccgcaaggtcaatgccagtgcccagcacgcgcgcgtgggcgtgcttgccaatggcgtgatcacgccgaccgcctcggccaccgacaaccgcgtgtacctgaaggacggcaaccgcttccagctcgatacccaggtgcccgacccgggtacaccgtcaccgggcggtgatttcgaccacgtgtacccggcgggcatcggcagctatgtgccgggccagaccgtggtgaagggcagcgacggcaagctgtacgcctgccgcccgttcccggaaggtgcatggtgcaacgtcaacgccgaggcgtaccggccgggtgtgggtgcggcctggcgcgatgcgtggattgcatactga

SEQ ID NO: 495935 - DNA, 528 bp, Stenotrophomonas maltophilia
atgcacgcgtggtacctcggcggcatcgaccaccgccctttcctgcacctgttcgagatgagcgacagcgcgctcgccgcgctcggcatccagcgtcgctgggccggcgccaacggcggacatccctgccggatcagcctgagcgatcccgcgcctggcagcgagctgctcctgctgtcccacgtccacctgccgctgcattcgccgtaccgcgccgccggcccgatcttcgtacagcgcggcgtgacccgttgcgtcctgccgccgggcgaggtgcccccgtatgtgcagcgccggatgatctcgatgcgtgcctatgaccacgccgcgctgatgtgcggtgcccaggtctgcgcgggcaccgaggtggccgaccacctggatgcactgtttgccgacccgtcggtggcgttcgtgcagctgcacaacgcggcgcatggctgtttctcgtgccaggcagatcgggtgggtaccgggactgcgtcgcgtgatctccatgacgtgatcgatgccacgccggtcacgtga

SEQ ID NO: 495936 - DNA, 1527 bp, Stenotrophomonas maltophilia
atgcaaagacaccacctcgcgctggccgggatgctggccagcctgatgcttgccgggtgcagccaaccgccgccggccaccgccggaagcgccagcgatgcacccagccgccgcttcggcacgatcgacttccagccctgcacgttgtccaccgaaggcgccagcgccaacgtggaggcgcagtgcgccaccctgcaggtgccggagaaccgggcccagcccgatggccgccggatcggcctgcgcatcgcctggctggaatcgggcagcagcggcgccagccagcccgacccggtgttcttcctggccggcggccccggccaggcggccagcgaggtggcggtcatcgtcgataccgcactgcgccaggtgcgcaagcagcgcgacgtgttcctgatcgaccagcgcggcaccggcggctccaacccgctcagctgcctgggcgcagatggcaagtcgctgcagatggacgaggatgccgcgccttccgaggcatcgctgcgcgactacgcccagcgctgcgccgcatcgctgcaggggcgtgccgacgcacgcttctacaccaccaccgaggcgatcgccgatctggacgcggtgcgtgcggcgctcggtgtggaccagctcaacctggttggcggctcctacggtacccgcgtggcccagcgctatgccggggcctatccgcagcacacccgcagcatcgtcatcgatggcgtggtaccgaacgagctggtggtcggtggcgacttcgcgaccaccttcgaggatgcgatcgccctgcagtcggcgcagtgccgcaaggatgccgcgtgcagcaagcgtttcccgaccgacacccgcgcgcagctgcgcagcgtggtcgacaccctgcgccgtgcaccggtctcggtcgagtatcgcgacccgggtaccaacgcaccgcggcaggatgtcctgacgccggacagcgtggtcggcctggccttcgccttctcctacgtgccgcagtattcctcactgctgccactggtgctggatgaagccgcgcacggtcgttatgccccgttggcatcgctggcgcgcggcgcgaaccgcagcatggatttccagatcaaccgcggcatgcagtggtcggtgatctgcagcgaggatgcgccgcgctaccaagcgccggccgaggaccccgagcggctgttcggcaacgaagtggccagcgccttcttcgccgcctgcccggtgtggccgcaccgtccggcgccggcaaccgatgccgtgccgctgcgcagcgacgtgccggcactgctgttgtccggtgagctggacccggtgacccccccgcgctacgccgcacaggtgctcaagggcctgcccaatggccgtgcgctggtcgcccgtggccagggccatggcacgttgaccgccggctgcatgccgcggctgctcggccagttcatcgacaagaccgatgccaaggcgctggatgctggctgcctggacacgctgagctacgtgccggcgttcacctcgttcaacggatgggaaccatga

SEQ ID NO: 495937 - DNA, 747 bp, Stenotrophomonas maltophilia
atgatcgtcgccgacaacctgcacaaggccttcgatacccgcacgggccgcatccaggccgtcgccaacgtcggcttccgcgccggggatgggcagatcaccggcctgctcggccccaatggcgctggcaagaccaccaccatgcgcatgctctacacgctgatgacccctgaccagggcagcatcagcgtcgatggcatcgacgccgccggcaatccggtggaggtacgtcgccacctgggcgtactgcccgatgcgcgcggcgtctacaagcgcctgaccgcgcgcgagaacatcgcctacttcggcgagctgcatggcctgtcggccgagtgcatccgcgaacgcatcgaggtgctgtcgcacgcgctggacatgggcgacatcctcgacaggcagaccgacggcttctcgcagggccagcgcaccaagaccgcgatcgcccgcgcgctggtgcacgacccgcgcaacgtcatccttgatgaaccgaccaacggcctggacgtgatgaccacgcgcgcgctgcgccgcttcctgctgggcctgcgcgaagagggtcgctgcgtgatcctgtccagccacatcatgcaggaggtgggcgcgttgtgtgaccacatcgtgatcatcgccaagggcacggtgatggccgccggcagcgccgacgaactgcgtgcgcaagccggtgaagccaaccttgaggacgcgttcgtgaaactgatcggtagcgaagagggcctgcacgcatga

SEQ ID NO: 495938 - DNA, 1185 bp, Stenotrophomonas maltophilia
atgagcatgatgtcgaccctgatgacggtgatgcgcaaggaactgcgcgacctgtcgcgtgaccgccgcacgctgctgctgaccctgctgttcgggccgctgctgtacccggtgctgctgctgggcatgggcaagctggccgagagccgggtgcgcacccagatcgaggagccgttgcagatcccgacgatcggcgcggagaacgcgccgaacctggtgcgcttcctcgccgcacagggcctcaatgctgcaccggcgccgaaggacctggccgaggccatccgcagccaggatatcgatgtggcgctgcgcatcagcggggacttcggcaaggactgggccgagggcaagccggcgctggtggaggtgatcaaggacagcacgcgtcgcgcggccgaggtacccagtgcacgcctggaggcggcgctggccacctacaacggccaggtcggtgccttgcgcctgatggcacgcggcatcgatgcacaggtggcacgcccgctggacgtggcacgccaggacctggccagtgccgaagccaagcgcggcatgatcctgtcgatgctgctgccggtactgctgacgctgacctcgttcatcgggggtgcctacctggtgatggacgccaccgccggcgagcgcgagcggcagtcgctggaacccctgctggccacgccgggctcgcgcagcgcgatcgtcagcggcaagatcgccgccgcctgcgtggtcggtttcgtgtcgctgctgctgaccctggtcgcgttcaaggtgagcgcgcagatcgcacccggcaacatcggccgccagttcaacatgaacgtcggctcgatgctgcagatgttgctggtgatgctgccgatgctgctgatcggcacctcgctgctgaccttcctgtcggccgcggccaagagcatgaaggaagcgcagagccacatgacctggctgatgctgctgccgatgctgcctggctatgcactggtggcctacccgctgaagagcgagatgtggcagtacgccgtgccgttcctgtcgcagaaccagatgctgctgaaggtgatccgccacgagaccatcaccccgacggtctgggcgatctacctcggcgccagcctcggcctggccgccgtgctgtggttcgccgccgtgcgccgctaccacaacgagcgcctggccatctccggctga

SEQ ID NO: 495939 - DNA, 426 bp, Stenotrophomonas maltophilia
atgaagtacgacgacgccagctggcattccgacggtgattttcctgccgagcttccgcccgaggccggtgcaacgcatatcggtatgtacgtggcatggctcctactgcggggtatggcaggcgaagaactggccgacgacatgcaggaggagctgagatccttgactcggcgtgctatgacacccggtcagttcctgctggtgtgtgatggcaagttccttgacgaaatgatcaacgatgaggcgaacgcattcacgctggagtactaccaagcggatgactgcctgtatcccgatgactacatcgaattgctcgcagacgatcttccttcgctgtaccacgtcgccgatacctgggaaaacttcgaccgactggcaccggtgatcgcccagcgcttcgccgcttggcaggcaacacaaacctga

SEQ ID NO: 495940 - DNA, 717 bp, Stenotrophomonas maltophilia
atggcctcccagctgcgggtgccgggacggcgccgcaccgcgcgccaccagcacgtgcgcggccagttgctgggtgcccaccacggcctgctgcggatcgaggccggcgacctgcactggctgctgccggcggggcatgttgcctggataccgcccttgctgccccacgccctgataggggcagacgcattcgatggctggagcctgtacgtccgcgccgataccggcctggatctgcccccgctgccccgtattttccaacccgatgcgctgttgcaggcggcggtgacgcgcgcactgcgctggccccatcaggcactggacgctgcgcaggcacgcctggccggcgtcatcgccgatgagatccgtgccagcactcccttgccatttgccctgccacagccgcgggatcgccggttgcggcggatcgcggcggcgctggcgcgttcgccggacgacctgcgcagcgtcgaagcgtgggcagccgccagcggactgtccagccgcagcctcgcccgccgttggcaggccgaaacaggcatgaccttgagccagtggcggcagcgcctgcgcgtgctgctgtcactgccacgcctgctggcaggcgaacgggtgatcagcgtcgccctgtcgatgggctacgacacgcccagttccttcatcaacgtgttcaagcgcgagatgggggtaacgcctgcgcggtacagcgaaggctga

SEQ ID NO: 495941 - DNA, 255 bp, Stenotrophomonas maltophilia
atgcagccgcaggacattcttcccgaccatcagaacgaggtgcaggtaaacggcctcaccgtgcgcaagggcagcgtcggcgccttcctcgccagcgtccgtgactggcaggaccccgccagcgatgacgccacccgcgtcaccgccgaagcagatctgcgtgggctgctgccgggcctgcatgcgctgggcctgttccaggtgctggccgcgcgcgatccggcactgcaacgcctgatcgacagcctctcctga

SEQ ID NO: 495942 - DNA, 1014 bp, Stenotrophomonas maltophilia
atgtcgcacgtctcaacgatcaccgccgcgcgccggtggctgccggttgccttggcactggcgctggccgcctgctcgggcaaggaagaatccgcagcaccggctccggccgccgcccccaccgccgctgcaccggccgcaccggtggtcgccgccaaggtgcagtcgatgggcaccgagcagctgcgtgagtcggccagccaggccctgcgcgagaaccgcatgtacgcgccggccggcgacaacgccatcgagtactacctcgccctgcgcgacaagaccccggacgacgcctcggtgaagagcgcgctgaccgacctgctgccgtacaccctgatcgccgccgagcagcacctggggcgcgaggactacaccgaagcgcagcggctggtggcgctgatcgagaaggtggatgcatccgcgccggccctgccgcgcctgaaggacggcctggccaagggcgtgcagaacgcggccaagcgcaccgaggccgaagccgagaaggccaagaaggacgccgaggaccgcagcaagcagcagaccgaacagcagcgcctggccgagcagcgtgccaaggaagccgacgcggccaagcagatcgctgcgcagcaggatgccgcccgccgcgacaacgagcgccaggaagccgagcgccaggccgccgcgcgccgcgaagccgagctgaagcagcagcaggccgccgcccagcaggccagtgccgcacgccaggccgcggctccagcggccgctgcggcgccgaacctgcgcccggtcagcaccccggcgccgcgctatccgtccgaggcactgcgtgcaggcacctccggcgaagtgctggtggaaatcaccgtcggcaccgacggctcagtgaccaacgcccgcgtattgcgcgcaacaccgtcgcgcgtcttcgatcgcgaagccatgaacgcggtcaagcgctggcgcttcgagccggtcagcgcaccggtcaccacccgccgtaccctggtattcgccccgggcggcacctga

SEQ ID NO: 495943 - DNA, 621 bp, Stenotrophomonas maltophilia
atgagtgcaaaccgcccgccgctctccccgttgtccacgctgatcttcgcctcgcgctggctgcagctgccgctgtacctgggcctgatcgtggcgcagtgcgtctacgtgttcctgttcggcaaggaactgtggcacctgatctcgcattccgcctcgatgggcgagcagcagatcatgctgatcgtgctgggcctgatcgacgtggtgatgatctccaacctgctggtcatggtgatcgtcggcggctacgagaccttcgtctcgcgcctgcgcctggaaggccacccggaccagccggaatggctgagccacgtcaatgccagcgtgctgaaggtgaagctggcgatggcgatcatcggcatctcctcgatccacctgctgaagaccttcatcgccagcggtgcgctgggcggtatcccgctgtgcacgccggagcagatgagcgtggccgccgccaacatcggtgtcgcccgctgctcgatgctgacccaggaaggcgtgctgtggcagaccatcatccactgcgtgttcatcctgtcggcgatcggcatcgcctggaccgacaagctgatgtccaacggccacagcaagtcgcacgacaaggcacacgaccactga

SEQ ID NO: 495944 - DNA, 690 bp, Stenotrophomonas maltophilia
atgatcgacctgtattactggcccaccccgaacggccacaaagtgaccctgctgttggaggaagccggcctggagtaccgcatccacccggtcaacatcggctcgggtgaccagttcaagccagagttcctggccatctcgcccaacaacaagatgccggccatcgtcgaccacgccccggccgatggcggtgccccgcagagcgtgttcgagtccggtgcgatcctgctgtacctggccgagaagaccggccgcttcctgcccagcgacccgcgcggccgcgtggccaccctggaatggctgttctggcagatggccggcctgggcccgatgagtggccagatgggccacttcaacgtgtacgcaccagaaaagattccctacgcgatcgagcgctacgacaacgaggtgcgccgcctgcacggggtgatggacaagcgcctggcccagcacgccttcctggccggcgacgagtacaccatcgccgacatggccagctacccgtggatcggcgcctacgacaagctgccggtggacttcgccgcgttcccgaacctcaagcgctggcacgaggccatcgccgcgcgcccggccacccagcgcgcctatgcgctgcgccagcaggtgaacccgaacgccggcaagccgctcagcgacgaagagcgcaagcacctgttcggccagcgctga

SEQ ID NO: 495945 - DNA, 2226 bp, Stenotrophomonas maltophilia
atgcgccacctgttcgcttcgcttgccctcatgctcgccaccagtaccgccgcccacgccgagaagctgaccctggaggccatcaccggcccgctgccgctgtccggcccgaccctgatgaagcccaaggtggcgccggacggttcgcaggtcagtttcctgcgcggcaaggacagcgatcgcaaccagctggacctgtggacctacgacatcggcagtggccagacccggttgctggttgattccaaggtggtgctgcccggcaccgagaccctcagcgatgaggaaaaggcgcgccgcgagcgccagcgcatcgccgcgatgaccggcatcgtcgattaccagtggtcgccggacgcacagcgcctgctgttcccgttgggcggcgaactctacctgtacgacctgaagcagcagggggcggcggccgtgcgccagctgacccacggtgaaggcttcgccaccgacgccaagctgtcgcccaagggcggtttcgtcagtttcatccgcggccgcaacctgtgggtgatcgacctggccagtggaaagcagctgcagctgacccgcgacggcagcaccaccatcggcaacggcgtggccgagttcgtcgccgatgaagagatggaccgccacaccggttactggtgggcaccggatgattcggcgattgcctttgcccgtatcgacgaggcaccggtgccggtgcagaagcgctacgaggtctacgccgaccgcaccgatgtgatcgaacagcgttacccggccgccggtgacgccaacgtgcgcgtgcagctgggcgtgatcgcaccggccgccgaggcgcagccgcgctggatcgacctgggcaaggaacaggacatctacctggcccgcgtcgattggcgcgatgcgcagcacctgagcttccagcgccagtcgcgcgaccagaagcagctggacctggtggaagtggcactcgactccaaccgccagcgcgtactcgcccacgaaaccagcccgacctgggtgccgctgcacaacagcctgcgcttccttgaagacggcagcgtactgtggtcgtccgagcgcaccggcttccagcacctgtaccgcatcgacagcaagggcaaggccaccgcgctgacccacggcaactggccggtggacgagttgctggcggtggatgagacggccggcaaggcctacttccgcgccggcatcgaaagcccgcgcgaaagccagatctacgcggtatcgctgcagggcggtgagccgcagcgcctgtcgaaggcgccgggcatgcacagcgccacgttcgcccgcaatgccagcgtctatgtggacagctggtccaacagcaccacgccgccgcagatcgagctgttccgcgccaacggcgagaagatcgccacactggtggaaaacaacctggccgatcccaagcacccgtatgcgcgctaccgcgacgcgcagcgcccggtcgagttcggcacgctcaccgccgccgacggcaagacgccgctgcactacagcctgatcaagccggccggcttcgatccgtccaggcgctacccggtggcggtgtatgtctatggcggcccggccagccagactgtcaccgacagctggcccggccgtggcgaccatctgttcaaccagtacctggcccagcagggctacgtcgtgttctcgctggacaaccgcggcaccccgcgccgcggccgcgacttcggtggtgcgctgtacgggaagcagggcacggtggaagtgaccgaccagctgcgcggcgtggcctggctcaagcagcagccgtgggtggacccggcgcgcatcggcgtgcagggctggtccaacggcggttacatgaccctgatgctgctggccaaggcgtcgaaccagtacgcctgcggcgtggccggtgccccggtcaccgactggggcctgtacgacagccattacaccgagcgctacatggacctgccggcgcgcaacgacgccggttaccgtgaagcgcgcgtgctgacccacatcgatgggctgcgctcgccgttgctgctgatccacggcatggcggacgacaacgtgctgttcaccaattcgaccagcttgatgagcgcgctgcagaagcgcggccagccgttcgagctgatgacctacccgggtgccaagcatggcctgtccggcgccgatgccctgcatcgctaccgtgtggccgaagccttcctggggcgctgcctgaagccttga

SEQ ID NO: 495946 - DNA, 516 bp, Stenotrophomonas maltophilia
atgacactgccgccgccgattcccacccacggcccgaagcccgccggctggtggtcccgccactggcgctgggcgatgcccgtggccgtgctgctggtgctggccggggccggtggcacggtggcctggagcgtgctgcgctggagtgaggcggcacgcgagagcccaccgatgcgcgaggcgatgcgtcgcgccggctgcagcatcgaactggtggaagccttcggcgagccgttgcgtaccgaatcgatgccgctgggcagcatgcagaccgcactcaacggccagcgcgatgtcggcctgaccgtggccctggaaggcccccgcgcacacggccggttgttcgtgaagggcacccgcagtgacgacgtgtgggactacccggtgatgtacgtgctgggcgagaacaagcagaccttcgacctgactgcgctggatgacgatgaggccgcgcaggaatgcgaactgcaggcctgccgcgaacgcggcgaatgcccgctgaccgcagcgttgtga

SEQ ID NO: 495947 - DNA, 1800 bp, Stenotrophomonas maltophilia
atgaagccgatcgcgttggccgttgccctggccctgaccgccgccccgctgctgtccgcaccgccggcgctggcggcacccgccgccaaggccgccacaccggccagcccggcctgggtcgcccgcagcaacgcactggcgcagatcctgctcgatgcgcagggcccgttccagccggaagaaaccggcttcttcggcgtgcccggctacgacgacaaggtggccgacctcggcgcggacaacggcaagcgctaccgcgccgcgatggccaaggcccgcgacgaactgaaggcgaagctggccaccgagcaggatcccaacgtccgccaggacctggagatcatgatccacgccgccaaccagaacatcgaaggcagtgagctcaacgagaagtacctgttgccgtggagtgacgcgccgcagacggtgttcagcggcctcaacctgctgctgtccgaccaggtgccggccgagcgccgggccaaggcgatcgaccgcctcaaggcttacgccggcctgcagccgggcggcaccgcgttcaccacgctggcccgccagcgctacgaagagcgcttgaaggacagcagcctgctgcagccgacgaagatcgaagtgcagcagtcgctggacaacgtcgagacctacatcagcggcatcgagtcgctgctgaagaagtaccagatcgccggcgccgatgaagcgatgaaggccctggccgggcagatgaaggactacgccagctggacgcgctcgaccgtgctgccgaaggcgcgcaccgacgcacggctgccggcgccgctgtacgcctaccagctcaagcaggtcggcatcgacatcgacccgaagctgctgatgcagcgtgcgcagctggagttcatggaaacccgctcggcgatgcagcagctggcgccgctggtggtgaaggagaagggcctgaaggtggccgacccgagcgacccggtggcggtgatccgcgcgctgaaggccgacaagatcgccgacgaccatctggaaggccactaccgcaaggtgatcgatgcgatcgatccgctgatccgcgagcacgccatcgtcgacgtgcccaagcgcgccatgcagatgcgcctgggttcggccgccgagagcgcggccagcccggccccgcatttcctgccggcgccgctggtcaacaacaccgggcagcagggcaccttcgtgctgccgctgggcaacccggccgcgggcccgggcgcacagtacgacgacttcaacttcggtgcggcggcgtggacgctgagtgcgcatgaaggccgccccggccacgagctgcagttcaccgcgatggtcgagcgcggcgtgtcgctggcacgcaccatgttcgcgttcaattcggtgaacgtggaaggctgggcgctgtatgccgaggccgagatggtgccgtacgagccgctggacgggcagatgatcgccctgcagttccgcctgctgcgcgccgcacgcgcgatgctcgacccgatgctcaacctcggcctgaccgaccgcgccaacggcgagcgcgtgctgatggagcaggtcggcctgtccaaggcgatggccacccaggaactggaccgctacatggtgcgcatgccgggccaggccggtagctacttctacggctacacccgtatcctggaactgcgcatgcagactgagctggcactgggtgcgaagttcgaccgcctggcgttcaacaacttcctgctcgaccagggcctgctgccgccggaccagctggccgacgcggtgaacaaggtgttcgtgccgaagtacaagcgctga

SEQ ID NO: 495948 - DNA, 459 bp, Stenotrophomonas maltophilia
atgaacatccgttgggccgcgttggcggccatcctgctggtcgccgccggctgtgccagcacctccaaggtcatgctggggcgctcccgcgcgccgatcgatccggcactggtgcagatctattcgacgccgccggccggctcccaggaaatcgcccagctggaatcggcgtctgccgtgggcttcggcacgcagggccagaccgatgcagcggtggcgcgcctgaagcgcgaggccgcagcgctgggcgccaatggcgtggtgctgatgggcgtgggcagcagcggctcaccggtgggcatgtcggtgggtgccggcacgttcggctcgcatgtcggcggtggcgtcggcatcggtattccgaccacgcagaagcgcgccgccggcgtggcgatctgggtgccgaacccggaacccccggcacgactgccgacgcaggtgatcaccccgcagcggtga

SEQ ID NO: 495949 - DNA, 249 bp, Stenotrophomonas maltophilia
atgggcgtgatcagtctgttgtggggcgtactggcgctgttgtggatgatcctggcgctgattccgctgctgggctggggcaactggttcctgatcccgttcgccgccgtgggcgcggtgatcgccgcgctgggcatcctgttcacccacccgaccaagcgcggccgggcctgggctgggctggtgctgaacggcatcgtggtggtggtcggcatcctgcgcctgggcctgggtggcggcgtgatctga

SEQ ID NO: 495950 - DNA, 918 bp, Stenotrophomonas maltophilia
atgatcatccgaccccgtccccacggctggcaactgctgtacatcctgcgcggctcgatcgtaaaagcgatcgcgccgaaggtgctggccatcctgatcctgtccatcgcggtggccgcggtggtggagctggcgccgccgaccggcatcgagcgcgtttccgtcacgccgttcaccctgctcggcctggtcctgtcgatcttcctcagtttccgcaacagcgcctgctacgaccgctggtgggaaggccgcaagctgtggggccagctggtctacgaatcgcgttcgctggcccgccaggtgaatctgctgctggccgatgacgccggccgccgccgccgcatcgcctacctcactacggcttttgcccatgcgctggccgcgcgcctgcgcgggcgcatcgtggccctggcggcgttgccgtggctggacaagccgcagcgcgagcagctgggccagcgcgagaacgtgcccgacgcattgctgtcgatgatcgctaccgagctggcccacgccctgcgcgccggcgaactcgacccgatcctctacacccagctggaagagcgcctgcacgcgatgtcgtcgatccaggcgggctgcgagcgcatcctcaccacgccgctgccgttcgcctacaccctgctgctgcatcgctgcgcatggatgttctgcgtgctgctgccgttcggcctggccagctcgctgggctggggcacgccggtactgtcggcggtgctggcctacgccttcttcggcctggaccagctgggcgaagaaatggaagacccgttcggcctggagccgaacgacctgccgctggacgcgctggtgcgcacgatcgagatcgaccagctcgacgcgctcggcgaacgcccgttgcccgaacccctgctgccgcagggctacctgttgcaatag

SEQ ID NO: 495951 - DNA, 990 bp, Stenotrophomonas maltophilia
atgtcccacccgctttaccgcccgcgccgcatgcgccacgacgagttctcgcgccgcctgatgcgcgagaacacgctgaccaccgacgacctgatctacccggtgttcgtgcacgaacgggcgggccgcaccgcagtgccgtcgatgccgggcgtggagcggctgtcgatcgaagagctgctgaaggtggccgaagaagcgctggaactgggcattccagtgatcgacctgttcccggtgatcgacccgtcgctgaagtcgctggacgcgtcggcggcgtgggccgaggacggcctggcgcagcgtgcgatccgcgcgctgaagtcgcgcttcccggaactgggagtgatgaccgacgtggcgctggacccgtacaccacccacggccaggacggcatcatcgacgacaagggttacgtgctcaacgacatcactgtcgaagcgctggtcaagcagtcgctgtcgcacgccgaggccggtgtggacatcgtctcgccgtcggacatgatggacggccgcatcggcgcgatccgccgtgcgctggatgccgataaccacatcaacgtgcgcatcatggcctactcggccaagtacgcctcggcgttctacggcccgttccgtgatgcggtgggtagcgcggccagcctcggcaaggccgacaagaagacctaccagatggacccggccaacggcgacgaggccctgcgcgagatcgcgctggacctggaagagggcgccgacatggtgatggtcaagccgggcatgccgtacctggacctggtgcgccgggtgaaggagacattcggtgtgccgaccttcgcctatcaggtgagtggcgagtacgcgatgatgaaggccgccttcgccaacggctggctggacgaacgcgcctgcgtgctggagtcgctgctgggcttcaagcgggccggcgccgatggtgtgctgacctatttcgcgccgcaggtggcgcgctggctgcgcgagcgctga

SEQ ID NO: 495952 - DNA, 270 bp, Stenotrophomonas maltophilia
atgggacccgaactgggatggatgcaatggctgatctggggcaccggtacgctggtgttcggcgccatcatcgtcgctgtcttcatcgccgcctggcgggccggcaagcgcccgccggaacagctctccgctgcccgccacgtggcccgtgagcaggcgctgccggagaccgtgcaggccgagctggccgcgttgaaccagcgcaaggacaacggccagctgagcgagatggagtacgagcagttgcgcgccaaggtgttgtcgcgctga

SEQ ID NO: 495953 - DNA, 864 bp, Stenotrophomonas maltophilia
atgatgcgcatcaccccgcccctgctggtgctcgccgccagtctactctctgcccccgtggcgatggcgttgaacgagtacggcatcgaaggcatgggcgtggtctcgacccgcgccgacgaaggccgcgccacgatcagcgccgatggccagcgcatcgtcttcgcccgccgcggcgaggccggctggggcctgtggcaggcacgcgtggtggacggtcgctggcaacaggcacaggcgctgctggtaggcgtggccggtgaagcccgcgatccctacttcagccgtgacggccgctggctgctgttcgcggccggccgcgagggcgcgctggcgctgtaccgcgccgcgttggccgccgacggccggctgggcccggcgcagccgctggccggtgacggcgggcgccgggaagagcgcgggccggccctgagcgcggacggcaagcagctgttgtttgcccgccagcagggccgtggcgccggctgggacctgttcgtggcgacgctggatgcgcagggcctgcgcggcccggccagcgcactgagcgcgttgaacagcgccgacgacgagaccgacggcgactggctcggccaggacggcgccgtggtgttcagccgcggcaacggcagtaccgcgcaggtctggagcagcggctgtgcgtggagcggtgtagcgctgcagccgctggggctgtcgttcaaccagaccggcggctggaccggtgcgccggtggtcgacaacgccaagcctggcgagatgatggtcgccagcagcgcagcaaaggcgccgcgtgccggtggcgtggacgtgtaccggttggccgtgccgaaggtggcggcggcggccgggtgcgtgcggtag

SEQ ID NO: 495954 - DNA, 846 bp, Stenotrophomonas maltophilia
atgaccgaccgttacgccgtcttcggacaccccgttgcccactcgaagtcgccgcagatccacgcgacgttcggtcgccaggaaggcattgccatcgactaccgcgcgatcgacctggccccggatgcgttcctggccggactggaggccttcgccgccgagggcggtgttggcgccaacgtcaccctgccgcacaaggaagccgcgttctcgctgtgcaccacgctgaccgcgcgcgcgcgccgcgccggctcggtcaacacgctgctgcgcaagggcgaccgctggcatggcgacaccaccgatggcatcggcctggtgcgcgacctgaccgaccgccacggcctggacctgcgcggccgccgcgtgctgatgatcggcgccggtggctcggcgcgcagcgtcgccccggcgctgctcgatgccggcatcaccgaactggtggtggtcaaccgcacgccggagcgcgccgacgaactgatcgacgcgatgggcgagcccggccgtgcgatcagccgctactgggaagacctgcgcgacctcggcgacttcgaactgatcgtcaatgccacctcggctggccgcgaccgcgacgtcgagttcaagctgccgctgtcgctggtcaattcgatgaccactgccgtcgacctgaactacggcgaggcggccatcgccttcctggcctgggcccgtgcggcgcagtgccgcaataccgtcgacggcctgggcatgctggtcgagcaggccgccgagagcttcctgcagtggcacggcgtgcgcccgcagaccggcgaggtctaccagtcgctgcgccagggctcggccgtgctggccggcgaggactga

SEQ ID NO: 495955 - DNA, 354 bp, Stenotrophomonas maltophilia
atggacagcacaaccctgatggtgaccgtgctgagcatggtcggcgtgcgcctgccggtgctgatcgcgctgtgcgtcggcctggtctgggtggtcggtgcgccgcgcgatgccacccgcaccggcgcgctggtcggcctgctgctgttgctgctgtccagcctgggtggcctggcggcgggcatgctgccgatgtggctggtcagcagcggcaacttcagcgccatctcgggcatgagcgccatcttcggcgtggtgcacttcgcgctggcgatggtcgaggccatcggcgtggtgctgctggtgtgggcgctggtgcgcctgctgcgtagccgtcccgccccggtcgcctga

SEQ ID NO: 495956 - DNA, 2103 bp, Stenotrophomonas maltophilia
gtgaccgaaaccgtcgccgctccgcgcacgctcgatgacaccttgaaggacgcgatccgcaaggcgtacacgacgctgcaggccaatacccccggcttctccacccgtcgctcgcagagccagatgatcggcgtggtgtcgcgcgcgctgtcgaaaagcggtggcgtcggcgtggtcgaggcgccgaccggcgtcggcaagagcctgggctacctcaccgcaggcgtgccgatcgcactggccaccaagaagaaactggtgatcagcaccggcaccgtggcgctgcagtcgcagctggtcgagcgcgatatcccgaatttcctgaaggccaccggcctggaagcgaccgtggcgctggccaagggacgcacccgctacctgtgcacgcgcaatgccgccgaggcgcagggcgagggctcgcagggcggcatgttcgaggatgacgcgccactgttcgaccggccgctggcgccgatcgagatggacatcgccaaacgcctgaccgacgccttcaccagcggcagctgggatggcgatatcgacaatgcgccggagaccatcagtcccggcctgcgcagccgcatcaccacgccggcctcgggttgtgccgggcgacgctgcgcctattcggcgcagtgcgcggtgctgcgctcgcgcaatacggtgcgcgacgcacagatcgtggtcaccaaccacgcgctgctgctgtcggcgctgtcgatcggtgacagcgacaacggccagccgttgatcgcgccgccctcggacatgctgctggtgctggacgaaggccatcacatcggcaatgtggcgatcgaccagggcgcggccagcctcgcgctggacgagatggccaagcgcaccggccgcctgcagatcctgatcgccggtgcgtaccgcgcggtcgacaaggatcggctgggcaacctgctgccgaacgaagcgatcgaagtcgccagcaacgtggccaagcagctgcgcgcgttccgtgatcacatcgagcgggtgtggatgccggcgccggcggacgaagagccgatgtggcgcgcagccaacgggcgcctgcccgaagcctggcgcgagccgatcgaggcactggccgacgatacccgcagcctctacaactgggcgcatgcggccaccacgcaggtggccaagggcaagccggacgatgccgcgcgcgagcgcctgcagcgcaacctgggcatggcgctggagatgatcgagcagcagtacaacctgtggcaggcgtggcgccgcgaagacaaggacggcgcgccgccgatggcgcgctgggtgactgccacccgcgatggcgacctggtgctgcacggttcgccggtgtcggccgcgcacgtgctgcgcaagctgctgtgggatgaagtggactcggtggtgatgacctcggcgacgctgaccggcggtggcgacttccaggcgctggcgatcgacaacggcattccggaagaggccgagatggtctcgctgttgtcgccgttcgacctgcccaaccaggccgaactgatcgtgccgaagttcccggtcacgccggacgaccgcgaaggccacccgcgcgaagtggcgcgctacctggacaccgaactggactgggccaagggctcgatggtgctgttcacctcgcgctggaagatggagaaggtggccgggctgatgccggccgcgcgccgcaagcaggtgctggtgcagggcgagatgtccaagacccggctgatcgaggaacacctgaggcgtgtcgaggcaggcgagggctcggtgctgttcggcctgaactcgttcggcgagggcctcgacctgcccggcgaggcctgcaccacggtggtgatcacccaggtgccgttcgccgtgccgaccgacccgcagaccgccaccctcagcgagtggttcgagggacgcgggctcaacgcgttcaacctgatcgccattccgcatgcgctgcgcacgctgacccagttcgccggccgcctgatccgcacctccaccgacaccggccgcgtggtcatcctcgattcgcggctgctgacccgccgctacggcaagcgcatcatcgacgcgctgccgccgttcaagcgcgtgatcggctga

SEQ ID NO: 495957 - DNA, 1839 bp, Stenotrophomonas maltophilia
atgcccgaataccgttcccgcacctccaccgccggtcgcaacatggccggcgcccgcgccctgtggcgcgccaccggcatgaaggacggcgacttccacaagccgatcatcgccatcgccaactccttcacccagttcgtgcccggccacgtgcacctgaaggatctcggccagctggtcgcgcgcgagatcgaacaggtcggcggcgtcgccaaggaattcaacaccatcgccgtggacgacggcatcgcgatgggccacgacggcatgctgtattcgctacccagccgcgagatcatcgccgacgccgtggagtacatggtcaacgcgcactgcgccgacgcgctggtgtgcatcagcaactgcgacaagatcacccccggcatgctgatggccacgctgcgcctgaacatcccggtggtgttcgtctccggcgggccgatggaagcgggcaagaccaggctgtccgagcacaagctggatctggtcgatgcgatggtggtggccgccgatgacagcgcctccgacgagaaagtcgccgcgttcgagcgcagcgcctgccccacctgcgggtcctgctcgggcatgttcaccgccaactcgatgaactgcctgaccgaggcgctgggcctgtcgctgcccggcaacggcaccacgctggccacccacgccgaccgtgaggcgctgttccgccgcgccggccgcctgatcgtcgaactctgccatcgctggtatggcggcgaagaccccagcgcgctgccgcgcggcatcgccacccaggccgcgttcgccaatgcgatgaccctggacatcgccatgggcggctccaccaataccatcctgcatctgctggccgcagcacaggaggcggaggtcgacttcgacctgacccacatcgacgcgctgtcgcggcgcgtgccgcagctgtgcaaggtggcgccgaacacgccgaagtaccacatcgaggacgtgcaccgcgccggcggcgtgttcggcatcctcggtgaactggaccgtgccggcctgctcgataccacggtgccgaccgtgcacagcgccagcctggccgacgcgctggaacgctgggacgtagtgcgcagtgacaacgacaccctgcatgccttcttcaaggccggcccggccggcatccctacccaggaggccttcagccaggccacgcgctggccgaccctggacatggaccgcgccgagggctgcatccgctcgctgcagcatgcgtactcactggaaggcggcctcgccgtgctgcgtggcaatctggccgtggatggctgcgtggtgaaaaccgccggcgtggacgaatcgatccacgtgttcgaaggccccgcgcgtgtctatgaaagccaggacgccgccgtcgccggcatcctcgccgacgaggtgcaaccgggtgaggtagtggtgatccgctacgaagggccgaagggcggcccgggcatgcaggagatgctgtaccccaccagctacctgaaatcgaaaggactgggcaagcagtgcgcgctgctgaccgatggccgcttctccggcggcacctcgggcctgtcgatcggccacgtctcgccggaagccgccagcggcggtgtcatcggtctggtggagaacggcgaccgcatccgcatcgacatcccggcccgccgcatcgacctgctgctggatgaggccacgctggcccagcgccgcgccgacgccgatgcacgtggctggaaaccgcgcgcgccacgcccgcgcaaggttaccagcgcgttgaaggcctacgccctgctggccaccagcgccgacaagggcgccgtacgcaacaccgccctgctcggcgattga

SEQ ID NO: 495958 - DNA, 573 bp, Stenotrophomonas maltophilia
atgaaacgttcccgcaccaccgcgctgctgctgatgagcgccgcgccgctgctgttcaccgcctgccagaaggagccggaggtgaaggtgcaggaaggcctgtatacctcggtggaggcctgcaccgaggccaccggcgatccgtcgtcgtgccgcaatgcgttcgccgaagcgcagaagcaggccgccgatgcggcgccgaagtacgccagcaaggaagcctgcgagaaggactacaagccggaacagtgcgtgcagcagcacacctcggccggtacctcgttcatcggcccgatgatgatgggcttcttcatgtcgcagatgctgagcaaccgcggcggcctcgccccgcaggcgccggcgtcggcaccggcttaccaagacaagaatgcgggttgggcgcgcccggcaccgggcggcagcggtggcctgaacaccgccagcggcatcggtgctggcaaggccggcctggccccggtcaccagcgagccgaaccgtgcggtcactgccagccgtggtggcttcggcaacaccagcgcacgccgcagcaccagcggcagctacggcggctga

SEQ ID NO: 495959 - DNA, 1179 bp, Stenotrophomonas maltophilia
atgcagcgcatccggattgccgagcgtgcccagtggcgggcgcgcgcggaagaggcgggtttccgcttccacaccatcgacggccagccgtactgggatgaaagcgcgtattacgccttcaccctgcgccagatcgaacaggacatcgaagaccccagcgccgagctgcaccagatggcgctggatctggtcggtgatgtcatcggcagcgaacgcttgatggaccagctggcgattccgtcgcactaccgcgactggatcgccgacagctggcgccagcgccagccgcacctctatggccgcctggacctggcctacgacggtaccggtccggccaagctgtacgaattgaactacgacacgccgacctcgctgttcgaagccagcttcttccagtggcagtggctggaagaccagcgcaatgccggccgcctgccgcagcatgccgaccagttcaacgcgatccacgaagcgctggtcgagcgtttcggcgacctcgccacgcagctgccgccgccgctgtacttcagcgcggtcggcagttcggaggaagaccgtggcacggtcgagtacttgcgtgactgcgcatcccaggccggcctgttcgggcaggccatcgccatcgaggacatcggcctgtccgaggacggccgcttcaccgcgctggacgattcggtgatcggcacgctgttcaagctgtatccgctggaagacctgatggccgaggaattcggccgcgcgctgcccggttcgggcgtgcagctgctggaaccggcctggaaggcggtgctgagcaacaagggcatcctgccgctgctgtggcagcgcaacgtgggccatccgaacctgctggaagcgcatttcgatgacggcagcacgctggcgtcgggctgggtacgcaaaccgctgttctcgcgcgaaggcgccaacatcgagatgcacctggccgatggcagcacccagcgcagcgacgggccctacgacggcccggcgatcatccagcgtgcgcatcctctcacccgcttcgaaggcggctatccgctgatcggcagttgggtgatcggtgaccatgcctgcggcatcggcatccgcgaggatgacagcgcgatcacccgcgacagtgcgcgcttcgtgccgcacgcgatcgtcgacgaggcgccgacgcggatctacgtctga

SEQ ID NO: 495960 - DNA, 660 bp, Stenotrophomonas maltophilia
atgacggtgcggcgcaatcgcgacctgcggcctgcgccgctgccgggccggcatctggatgacggccacgccctgtggcgctattcggaccgcatcgcggtgcgctgccaccgctgcgatacgcccggctgggtggtgcggacgccggaatcgcgacgtttccgctgcctgggctgcagcgcagccctcgacagtggatgcggctgcggttgctgtgccgcgggcgactgggtcgggcccgtgcgctacagcggctatcgtccctgcggatactgcgggcacaaatgggtccgcgccgagctgcaccgtgcgcgtgcagtgtcgccgttgcggacgctggcggcggactgcagtcagtgcggacgcagcagcgaggtggaggtcacgttgtcgcgatggcgtggcaatgaggcgatcgatccgcattttggcttgccgctgcggctggtcgaaaagaccgcggccggcgtgctgtgggcctacaacgaagcccatctgcaggcactgcacgactacgctgccgcgcctctgcgcgagcgcgcgggcgttaccaacggttcgatgttctcgcgcctgccgcagtggatgaagctgggccgcaaccgggtgctgctgcagcgtgcggtggagcggttgcaacgtcggttgctgcaggggtag

SEQ ID NO: 495961 - DNA, 1392 bp, Stenotrophomonas maltophilia
atgagcctgtccgccgttccgcccgtcctcgatcctgccgcgaccgccgctggcgctgcctggtcgccggagagctggcgcggcaagaccgcgctgcagatgccgacctaccctgacccggtggcgctggacgccgccctgcacgaactgaagcggctaccgccgctggtcacctcgtgggagatcctggcgctgaagcagcagttggccgaggcccaggaaggcaagcgtttcctgctgcagggcggcgactgcgccgagaacttcagcgactgcgaatcgggcacgatttccaaccggttgaaagtgctgctgcagatgagcctggtgctggtgcatggccttcgccagccggtgatccgcgtcgggcgctttgccggccagtacgccaagccgcgttcggccgataccgagacccgcgacggcgtgaccctgcccagctaccgcggcgatgtgatcaatgcgccggcgttcaccgaggcggcgcgcctgccggatccgaagcggatgctgcaggcgcatgcgcattcggcgatgaccatgaacttcgtgcgtgcgctgatcgatggcggcttcgccgacctgcatcatccggagtactggaacctggagtgggtgcggcattcgccgctggccgccgagtaccagaagatggtggcgtcgatcggtgatgcggtgcacttcatggaaaccctggccggggcccgcgtgcacaacctcaaccgcatcgacttctacacctcgcatgaagcgctgctgctgccctacgagcaggcgctgacccggcaggtgccgcgccagcagggctggttgaacctgagcacgcattacccgtggatcggcatgcgcacggccgcgctcgatggcgcgcacgtggagtacctgcgtggcgtgcgcaatccgattgcgatcaaggtgggcccgtcggtgacgccggaccagctgctgcgcctgatcgatgtgctcaacccgcatgacgagccgggtcgactgagcttcatccaccgcatgggggcagcgcagattgccgataagctgccgccgctgctggacgcggtcaagcgcgatggccgtcgcgtgctgtgggtgtgcgatgcgatgcatggcaacaccgaaagcaccgccaatggcttcaagacgcgccgcttcgacaacgtgcgtggcgaagtggagatgtcgttcgatctgcatgcggccgcaggcacgcgactgggcggtgtgcacctggaactgaccggcgaagacgtgaccgaatgcaccggtggcgcgcgcgaactgaccgagcgcgacctggaacgcgcgtatcgttcgacggtggacccgcgtttgaactacgagcagtcgctggagatcgcgatggcgatcgtgcgcaagcaggagcaggtgcggtaa

SEQ ID NO: 495962 - DNA, 2124 bp, Stenotrophomonas maltophilia
atgaagccctccctgctcgctaccggcattaccttcgccctgaccctggccagtctgcccaccctcgctatggccgccgatgccgccgctcccgtgaaggacctcgacacggtcactgtcagcgcccagctcgatcaggcccgcaatgcgctgtcgccggacatcggcagcagccagtaccagatcaccgccgaggacatccagaagcagccgctgggtgcctccgcgccgctcagccaggtgctgctgcaggctccgggcgtggtccaggattcctacggtggcgtgcacgtgcgcggcgaccacgcgaacctgcagtaccgcatcaacggcgtactgctgcccgaatcgatctccggcttcggccagaccctggatgcccgcaccatcaagagcatccgcctgatggacggggcgctgccggcgcagttcggcgagcgcaccgctgcggtggtcgacatcaccacccgcagcagcgccgagctcggcaatggcggcagcgccggtctgaccgcaggctcgttcggcaagatcaatccgaatgcctcgtggtggggcaatcaagggcgctggagctggttcctgaccggcaactacgaccagaacgaggtcggcctggagaacccgacccgctcgcgcaagccgctgcacgacgacacgcaccagggcaaagccttcgccgacctgacctacctggtcaacgagaacacccgcctgagcgtgttcgccggctttgccaacaatcgcttccagatcctggtcaatcccgggcagaccccgcagttcggttacctggacacgaccaccttcgactccagccagctggatgaaacccagcgcgagaccacccgcttcggcatgctggtgctgcagggcacgctgggcggcaccgcctaccagctgtccgccgggcagcgctacagcgacgtggcgttcaacccggatgtcatcggcgatctggtattcagtggcgtcgcctcgcaggtccagcgcagcaaccgcgccaacacgctgcaggccgacttctccaccccgctgggcaacgaccacacgctgcgctacggcctgtacggcaactacgagaatgcgcgcgccagcaacaacagctgggtgttcccggtcgatggcgccggccagcaatccagcaccgcgccactgctgattccagaccgcagcgccttccacgccagtacgctggcggtgtacgtgcaggatgagtggaagatcggcgacgactggacagtgaactacggcctgcgtggtgatcgctacaaggccttcggccgcaccgagggccagctcagcccccgcctgggcgcggtctggaatgccagcgacagcaccaccgtgcatgccggctattcgcgttacttcacgccaccggccagtgagctgatcgccagcagcgatatcgccctgtacgacggcaccaccaaccagcagccgggcggcggcaacaacattccgctggccgaacgcagcgactactacgacatcggcgtctcgcagcagctgggtgaacacctgaccctgggcctggacgcctacgaccgccgcgtcgcgcgcctgcaggacgaaggccagttcggcgccgcctacatctactcgacgttcaactaccgccgcggccatatccgtgggctggagttcagtgccgactacagcaacggtccgttcagcgcttacttcaacgcggcgtacaacaaggccatcggcacccaggtcatcaccagccagtacaacctcgatccggacgcgctggcctatgtggccgaccactggatccacctggaccacgaccagaagctgacgtcgtcggggggcttcagctacgccttcgccgggcacaaccgggtcggtgccaactacgtgttcggcagcggcctgcgttcggatatcgagggcgtgcccaacggcggcgagctgccgtcctacctgcaggtgaacctcagcgccgggcatgatttcaatgccgacagcggccatccgctgcacgtgcagctggccgtgatcaacgcattggatcgcagctaccagctgcgcgatggcggcggtgtcggcgtgttcgccccgcaatggggaccgcgccgcggcgcctacctgagcctgcagcaggacttctga

SEQ ID NO: 495963 - DNA, 507 bp, Stenotrophomonas maltophilia
atgaatccactgcgctggcccttccgcgcccagttcttcctgggcttcctgatctgcgcgggcctgctcggctacgcgatcttcctgcagctgaagatgggcctggagccgtgcccgctgtgcatcttccagcgcctggcttttgccgcgctgggcctgttgttcctgatcggtgcgctgcacgggccgtccaaccgtcccgggcgcgccacctacggcgtgctcgccttcatcgcggcggccgtcggcgtgggcatcgctgcgcgccacgtctacgtgcagatgctgccgccggagatgggcgcgacctgtggcccgccgctgagcttcctgcgcgagaccatggggccgctggaagtgttccgcacggtgctgaccggtaccggcaactgcggcaacatcgactggacgttcctgggcctgaccatgccgatgtggtcgggcgtgtggttcgtgctgctggcgctgtgggcactggtggtgtcgctgcgcaaggtcaagcgctga

SEQ ID NO: 495964 - DNA, 384 bp, Stenotrophomonas maltophilia
atgcgtcaccagaagtctggccgtaagttcagccgcaccagcgcccaccgcgaagcgatgttcaagaacatggccgcctcgctgttcaagcacgagctgatcaagaccaccctgccgaaggccaaggaactgcgccgcgttgccgagccgctgatcaccctggccaaggtcgactcggtcgccaaccgccgtctggccttcgcccgcctgcgcgacaacgaagccgtgggcaacctgttcaccatcctgggcccgcgctacgcgaaccgtccgggcggctacctgcgcctgctgaagtgcggtttccgcgccggcgacaacgcaccgatggcctacgtcgagctggttgaccgtccggtcgtggccgaggaagtggccgagtaa

SEQ ID NO: 495965 - DNA, 999 bp, Stenotrophomonas maltophilia
atgacggttaccgccaaccaggttctgcgtcctcgcggtccgcagatcgaacgccttaccgacacccgtgcaaaggtcgttatcgaacctttggagcggggttacgggcatacgctgggtaatgccctgcgtcgcgtgctgctgtcgtccatcccgggcttcgccatcacggaagtcgaaatcgacggcgtgttgcatgagtacaccacggtcgaaggtctgcaggaggacgtgctcgaagtcctgctgaacctgaaggacgtggccatccgtatgcactccggcgacagcgccaccctgtccctgtccaagcagggcccgggcgttgtcaccgctgccgacatcaaggtcgaccacaatgtggagatcctgaacggcgaccatgtgatctgccacctgaccaaggatacggcgatcaacatgcgtctgaagatcgaacgtggtttcggctaccagccggctgccgcgcgtcgtcgtccggacgaagaaacccgtgccatcggccgcctggtcctggatgcctcgttctcgccggtccgccgtgtcgcctacgccgtggaagcggcgcgtgtcgaacagcgtaccgacctggacaagctggtcatcgatatcgagaccaacggcaccatcgatgccgaggaagccgtgcgcaccgccgccgacatcctcagcgaccagctgtcggtgttcggtgacttcacccaccgcgaccgcggtgcggccaagccggccaacaacggcgtggatccggtgctgctgcgcccgatcgacgatctggagctgaccgtgcgttcggccaactgcctgaaggctgaaagcatctactacatcggcgatctgatccagaagaccgaagtggagctgctgaagaccccgaacctgggcaagaagtcgctcaccgagatcaaggaagtgctggctcagcgcggcctgtccctcggcatgaagctggagaactggccgccggccggcgtcgccagccacggcatgctgggctga

SEQ ID NO: 495966 - DNA, 630 bp, Stenotrophomonas maltophilia
atggctcgttatatcggtcctacctgtaagctcgcccgccgcgaaggcgccgacctgtccctgaagagcccggcgcgtgcgctggactcgaagtgcaagctggagcagaagcccggccagcacggcgccactgcccgcaagggcaagctgtccgactacgccacccagctgcgtgaaaagcagaaggtcaagcgtatctacggcctgctggagcgtcagttccgcaactactacaagaaggcctcgaccaagaagggcaacaccggcgagaacctgctgcagctgctggaaacccgcctggacaacgtcgtctaccgcatgggcttcgccgtgacccgtccggctgcccgtcagctggtgtcgcaccgcggcgtcaccgtgaatggcaagtcggtcaacctggcttcgtaccaggtcaaggctggcgacgccatcgccctgtctgaaaaggctgccaagcagctgcgcgtccaggaagccctgaccgtcgccgcccagcatgacctgagcccgtcgtgggttgaagtggattccgggaagttcaccggcatcttcaaggctgttccggatcgttcggatctgcctgcggacatcaacgaagcgctgatcgtcgagctgtattcgaagtaa

SEQ ID NO: 495967 - DNA, 390 bp, Stenotrophomonas maltophilia
atggctaagcccgctgctaagaccaagaagaagatcaagcgcgtcgtcaccgacggcgttgcccacgtccacgcttcgttcaacaacaccatcgtcaccatcaccgaccgccagggcaatgctctgtcgtgggcgacctccggtggcgctggcttccgcggttcgcgcaagtcgaccccgttcgctgcccaggtggctgctgaaaaggccggtcgtgctgcgctggactacggcgtgaagtcgctggaagtccgcatcaagggcccgggtccgggccgtgagtcggccgtgcgttcgttgaacaacgtcggctacaagatcaccaacatcatcgacgtgacgcctatcccgcacaacgggtgccgtccgccgaagaagcgtcgcgtctaa

SEQ ID NO: 495968 - DNA, 357 bp, Stenotrophomonas maltophilia
atggcgcgtattgcaggcgtcaacctgccagcccagaagcatgtctgggtcgggttgcaaagcatttacggcatcggccgtacccgttcgaagaaggtctgcgaagtcgcaggcgttgcttcgaccaccaagatccgcgatctgtcggagccggaaatcgagcgcctgcgcgccgaagtcggcaagtacatcgtggaaggcgatctgcgccgtgaaatcggtatcgcgatcaagcgcctgatggacctgggctgctaccgcggcctgcgtcaccgtcgtggcctcccgctgcgtggccagcgcacccgtaccaacgcccgcacccgcaagggtccgcgcaaggcgatcaagaagtaa

SEQ ID NO: 495969 - DNA, 1368 bp, Stenotrophomonas maltophilia
atggcgcaagctggcatcggtaacctcgcgggcggaatgggcaagttcactgaacttcgccaacgtttgctgttcgtcgtcggggctttgatcgtctatcgcatcggctgctacgtgccggtgccgggcgtcaatcccgatgccatgcttgccatgatgcaacagcagggcggcggcatcgtggacatgttcaacatgttctcgggcggcgccctgcaccgtttcagcatcttcgcgctgaacgtgatgccgtacatctcggcatcgatcgtgatgcagctggccgtgcacatcttccccgccctgaaggcgatgcagaaggaaggtgagtccggccgccgcaagatcacccagtattcgcgcatcggcgccgtgctgctggcagtggtgcagggcggctcgatcgcgctggccctgcagggccaggtctcgccgtcgggcgctccggtcgtgtatgcgccgggcatgggcttcgtgctcactgccgtggtcgcactgaccgccggcaccatgttcctgatgtgggtcggtgagcaggtcaccgagcgcggcatcggcaacggcgtgtcgctgatcatcttcgccggtatcgtggcgggcctgccgggtgcggtcatccacaccttcgacgcctaccgcgacggcaacatccagttcatccagctgctgctgatcgccatcgtcgtgctcgccttcaccttcttcgtggtgttcgtcgagcgtggccagcgccggatcacggtcaattacgcgcgccgccagggtggtcgcaacgcgtacatgaaccagacctcgttcctgccgctgaagctcaacatggccggcgtcatcccggcgatcttcgcctcgagcctgctggccttcccggccaccctggccatgtggtccggccaggccgccaaccagagcagcttcggccaggtcctgcagaaggtcgccaacgccctgggcccgggcgagccgctgcacatgatcgtgttcgctgcgctgatcaccggtttcgcgttcttctataccgcgctggtgttcaactcgcaggaaaccgccgacaacctgaagaagtccggtgcgctgattccgggcatccgtccgggcaaggcgaccgccgactacatcgacggcgtgctgacccgcctgaccgcggccggctcggcgtacctggtgatcgtctgcctgctgccggaactgatgcgcacgcagctgaacgcctcgttctacttcggtggtacttcgctgctgatcgtggtggtggtggtgatggacttcatcgcccaggtgcaggcgcacctgatgtcccaccagtacgagagcctgctgaagaaggccaacctgaagggtggcaaccgcggcggttttgcccgcggctga

SEQ ID NO: 495970 - DNA, 444 bp, Stenotrophomonas maltophilia
atgactctgcgtctcaatgaactgagcccggcaccgggcgcccgcaccgagcgcacccgcgtcggccgcggtatcggctcgggcctgggcaagactgccggccgcggccacaagggttcgttcgcccgtaagggtggcggcaagatcaaggctggcttcgaaggcggccagacccccatgcagcgccgtctgccgaagatcggcttccgttcgccgatcgccaaggacaccgctgaagtgctgctgtacgcgctggacaagctgccggccggtgagatcgatttcgccgccctgcgtgctgccaagctggtcccgagcaccgcaaagaaggccaaggtcgtcgtcaagggcgaagtgaccaaggcgttcaccctgaagggtattgctgccacggcgggtgccaaggctgcaatcgaagctgccggcggcagcgtaacggagtaa

SEQ ID NO: 495971 - DNA, 192 bp, Stenotrophomonas maltophilia
atggctaatgagtccaacaagactgtgaaggtccgcctggtgcgtggcctgcgtggtacccagtcgcgtcaccgcctgtcggtgcgtgccctgggcctgaacaagctcaacgatgtgcgtgaactgaaggacagcccgcaggtacgcggcctgatcaacaaggttcagtacctcgtccaggttgaggagtaa

SEQ ID NO: 495972 - DNA, 543 bp, Stenotrophomonas maltophilia
atggcagaagagcgtcagcagcggggtcgcgatcgcgaccgtaaccgcgaagagaagatcgacgacggcatgatcgaaaagctggtcgcggtcaaccgcgtcagcaagaccgtcaagggtggccgccagttcaccttcaccgccctgaccgttgtcggcgacggcgaaggcaaggtcggtttcggttatggcaaggcccgcgaagtgccggtcgccatccagaagtcgatggaacaggcccgcaagaacctggtcagcgttgacctgaacaacggcaccctgtggcacaccatcaaggatggtcacggcgcagcccgcgtgttcatgcagccggcttcggaaggtaccggcgtgatcgccggcggtgccatgcgcgccgtgctggaagccgttggcgtgaagaacgtgctggccaaggccaccggttcgcgtaacccgatcaacctggtgcgtgccaccgtgaagggcctgtctgctgcgcagtcgccggctcgcatcgcggccaagcgcggcaagaaggtggaggaactcaaccatggctaa

SEQ ID NO: 495973 - DNA, 354 bp, Stenotrophomonas maltophilia
atgaacaagaacatcgcccgcctgcgtcgcgccaagtcgacccgcgcccacatccgtgagctcggcgtcgcccgcctgtcggtgctgcgcaccggccagcacctgtacgcccaggtcttcaccgctgacggttcgaaggtgctggctgccgccaacaccacccagaccgacgtcaaggaaggcctgaagaacggcaagaacgccgatgccgctgccaaggttggccgcatcgtcgccgagcgcgccaaggccgccggcgtcgagaaggttgccttcgatcgttcgggctaccgctaccacggccgcatcaaggccctggcagaagcggcccgcgaagccggcctgcagttctaa

SEQ ID NO: 495974 - DNA, 525 bp, Stenotrophomonas maltophilia
atgtcccgcgtagccaagaagccgatcaccctgggtaaggttgaactgaacgtccagtcggacagcgtcaccgccaagggcccgaagggcaccctgtcgctggccaagccggccggcattgccatcaacgtcgacaatggcgttgccaccctgagcaccgagaacgccgagctggtcgcactgaccggcaccgtgcgtgcgatcctgtccaacatggtcaagggcgtgtccgaaggcttcgagcgcaagctggagctggttggcgtgggttaccgcgctgccatgcagggcaaggacctgagcctgtcgctgggcttctcgcacccggtcgtgttcgtggcgccggaaggcatcaccatcaccaccccgacccagaccgagatcctggtccagggcgctgacaagcaggtcgtcggtgaagtcgccgccaagatccgtgcgttccgcaagccggagccgtacaagggcaagggcgtgaagtactccgacgaagtcatcatccgtaaggaagccaagaaggcgtaa

SEQ ID NO: 495975 - DNA, 399 bp, Stenotrophomonas maltophilia
atgagcatgactgatcccatcgccgacctgctggtccgcatcaagaatgcggccgcagttggcaagcagacggtgaaagccccgtcgtccaagatcaaggttgcgatcgcccaggtcctgaaggacgagggttacatcaccgacctgcgcgtgacccagctggaaaacaacaagtccgagctggaaatcgtgctgaagtatttcgaaggcaagccggtcatcgcgaccctgaagcgcttctcgcgttcgggcctgcgccagtaccgcggcaagagcgagctgccgaaggtcatgaatggcctgggtatctccatcatttccacctccaagggcatcatgactgatgcgcaggcgcgccagctgggcgtcggcggcgaagtcctgtgcttcgtggcctaa

SEQ ID NO: 495976 - DNA, 306 bp, Stenotrophomonas maltophilia
atggcaaagacctccatggtcaaccgcgacatcaagcgggaaaagctggccaagaagtacgctgagaagcgtgcggctctgaagaagatcgtgtcctccgtggacgcgacctacgaagagaagatcgacgccgcaaccaagctggccaagctgccgcgcgattcgtcgccgagccgtcagcgcaaccgttgcgagctgtcgggtcgtccgcgtggcgtgtacagcaagttcggcctcggccgcaacaagctgcgcgaagccaccatgcgtggcgacgtcccgggcctgcgcaaggccagctggtaa

SEQ ID NO: 495977 - DNA, 543 bp, Stenotrophomonas maltophilia
atgacttcccgtctcgaaaagatctacaaggaagaagtggtgccggcgctgatgaagcagttcggctacaccaatccgatggaagtaccgaagctcgtcaaggtcaccctgaacatgggtgtcggcgaggctgccaccaacaagaagatcctggaaaacgccgtcgcggacatgaccaagatttccggccagaagccggttgtcaccaagtcgcgtatctcggttgcgtcgttcaagatccgtgatggttggccgatcggctgcaagaccacgctgcgtcgccacaagatgtacgagttcctggaccgcctgatcaacatctcgctgccgcgcgtgcgcgacttccgtggtgtttccggtcgttccttcgacggccgcggcaacttcaacatgggtgtgaaggaacagatcatcttcccggaaatcgacttcgacgccgtcgacgcgatccgcggtatggatatcgccatcaccaccactgcgaagaccgacgcggaagcgaaggcgctgctggcagcgttcaagttcccgttccgtaactga

SEQ ID NO: 495978 - DNA, 318 bp, Stenotrophomonas maltophilia
atggctaaccgtatcaagaagggcgaccaggttgtcgtcaacgctggcaaggacaagggcaagcagggcgaagtcgtccgcgtcgacggcgaccgtgtggtcgtcgccaacgtgaacatcgtcaagcgccacaccaagccgaacccgcaggcaggtgttgccggcggcgtggtcgagcgcgaagcttcgatccatatctccaacgtgaacgtgctgaacccggcttcgggcaagggcgaacgcgttggcttcaaggtgctggaggatggacgcaaactgcgtgtgttccgctccagcggtgaggcgctcgacgcctga

SEQ ID NO: 495979 - DNA, 369 bp, Stenotrophomonas maltophilia
atgatccagatgcagagctaccttgacgtcgcggacaattcgggtgccaagcaggtgatgtgcttcaaggtgctgggtggttccaagcgccgttacgccggcatcggcgacatcatcaaggtcaccgtgaaggatgcgattccgcgcggcaaggtcaagaagggtgaagtgtatgacgccgtcgtggtgcgtacccgcaagggtgtgcgtcgcgccgacggttcgctgatccgcttcgacggcaacgctgccgtcctgctgaacaacaagcaggagccgatcggtacccgtatcttcgggccggtgacccgtgaacttcgttcggagaagttcatgaagatcgtctcgctcgctcccgaagtgctgtga

SEQ ID NO: 495980 - DNA, 270 bp, Stenotrophomonas maltophilia
atgagcgacaatactgaaaagaagacgctgcgcacggtcgaaggccgtgtcgtcagcaacaagatggacaagacggttaccgtcctggttgagcgtcaggtcaagcacgcgctgtacggcaagtacatcaagcgctcgaccaagctgcacgcccacgatgccgacaacgcctgcaaggaaggcgatgtcgtccgcgtgaccgagattgctccgatgtccaagaccaagaactggcgcgtggtggaagtcatcacgcgtgcggctgaataa

SEQ ID NO: 495981 - DNA, 186 bp, Stenotrophomonas maltophilia
atggatatcaaaactctccgtgaaaagtcggctgacgaactcaaggcccacctgatcgacctgcgtaaggaacagttctctgtccgtatgcagcaggtcaccggccagctgccgaagacccacgacattcgccgggtccgtcgcgagattgctcgcgtcaagaccctgctcggcagcacgaagtaa

SEQ ID NO: 495982 - DNA, 414 bp, Stenotrophomonas maltophilia
atgttgcaacccaagcgaaccaagtaccgcaaggtacacaagggccgtaacgatggcctgagctggagcgccaacgctgtcagcttcggcgaatacggcctgaaggcaaccgcacacggtcagctgaccgcgcgtcagatcgaagcggcccgccgctcgatcagccgctacgtcaagcgcggcggcaagatgtggatccgcgtgttccccgacaagcccatcaccaagaagcccatcgaagttcgaatgggttcgggtaagggtaacgtggaatactgggtggcccagatccagcccggccgcatgatctatgaaatcgagggtgtttccgaggaagtggctcgcgaggcgttccgcctggccgccgccaagctctcggtcaccaccactttcgtgacccgtacggtgcgctga

SEQ ID NO: 495983 - DNA, 735 bp, Stenotrophomonas maltophilia
atgggtcataaagttcatccgattggtatccgcctcggcatttccaaggactggaactccaagtggtacgccaacaaggccgagttcgccggttacctggcagccgacctgaaagtgcgcgaaatgctgcgcaagaagctggcccaggccggcatcagcaagatcctgatcgagcgtccggccaagaccgctcgcgtgacgatccacaccgcccgtccgggcgtggtgatcggcaagcgcggtgaggacatcgagaagctgcgcaaggaagtgagcgagatgatgggcgtcccggcgcacatcaacgtcaccgaagtgcgcaagccggaactggacgcgcagctcgttgccgagtcgatcgcccagcagctggagcgtcgcatcatgttccgccgtgcaatgaagcgctcggtcggcaacgcgatgcgcctgggtgccctgggcatcaaggtcaacgttggtggccgcctcaacggtgctgaaatcgcccgttcggagtggtaccgcgaaggccgcgtgccgctgcacaccctgcgtgccgacatcgactatggcttcgctgaagccaagacgacctacggcatcatcggcatcaaggtctggatctacaagggcgaggtcttcgatttctcccaggttggccaggaaaagcaggacgacaccccgtcgcgcaacgatcgtcacgatcgcggcgaccgtggtgaccgtcagcgcccggcccgtgaagcgaggtaa

SEQ ID NO: 495984 - DNA, 336 bp, Stenotrophomonas maltophilia
atggaagcgaaagccatcctgcgcactgcgcgcatctccccgcagaaggctcgtctggtcgctgaccaggtgcgcggtctgccggccgaacgtgcggtcaacctgctgaagttctcggacaagaaggctgcccacctgatcaagaaggtggtggagtcggcaattgccaacgccgagaacaaccagggcgccgacgtcgacgagctgaaggttcagaccatcatggttgatgaaggtccgaccctgaagcgtttcatggcgcgggcgaaaggccgcggtacccgcatcctcaagcgcaccagccacatcactgtggttgtgggcgccgccaagtaa

SEQ ID NO: 495985 - DNA, 270 bp, Stenotrophomonas maltophilia
atggcacgttcactcaagaagggcccgttcgtcgatcaccacctcgtcaagaaggtggaggccgctgcgggcagcaagaagccgatcaagacctggtcgcgccgttcgatgatcctgcctgacatggtaggcatcaccattgccgtgcataacggcaagaaccacatcccggttctcgtcaacgagaacatggtcggccacaagctcggcgaatttgccatcacccggaccttcaagggtcacggtggtgacaagaagtcgggcaagtaa

SEQ ID NO: 495986 - DNA, 828 bp, Stenotrophomonas maltophilia
atgccattgatgaaattcaagcccacttcccccggccgccgttcggccgtgcgcgtggttacgcccgacctgcacaagggtgctccgcacgccgcactggtcgagtcgcagagccgctcgggtggccgcaaccaccacggccgcatcaccgtgcgtcacgtcggtggtggtgccaagcagcactaccgcatcatcgacttcaagcgcaacaagctgggcatcccggcgcgcgtggaacgcatcgaatacgatccgaaccgcaccgcccacatcgccctgctgtgctacgtcgatggtgagcgtcgctacatcatcgccccgaagggcctgaaggccggtgatcaggtgatcgctggttcggacgccccgatcaaggccggcaacaccctgccgctgcgcaacatcccggtcggcaccaccatccactgcatcgagctgaagccgggcaagggcgctcagatcgctcgcgccgctggtgcggccgtgcagctggtggctcgcgaaggcatctacgccaccctgcgcctgcgctcgggtgaaatgcgcaaggttccggtcgagtgctgcgccaccatcggcgaagtcggcaacgacgagcacagcctggaaaagctgggcaaggccggtgccaagcgttggcgcggcgtccgcccgaccgttcgtggtgctgccatgaacccggttgaccacccgcacggtggtggtgaggccaaggccggccagggtaacccgcatccggtcaccccgtggggtgttccgaccaagggttacaagacgcgccataacaagcgcactcagcagttcatcgtccgcgatcgtaggggctaa

SEQ ID NO: 495987 - DNA, 300 bp, Stenotrophomonas maltophilia
atgaacagcaacgaaaaaatcttcagcgtgctgcgtgccccgcgtgtctccgaaaagaccgcgcgcctgcaggaactctccaaccagtatgtcttcgaagtttcgaacgaagccaccaaggccgatgtaaaggccgcggttgagcagctgttcgacgtcaaggtcgaagccgtcaacgtggtcaacgtcaagggcaagaacaagtccttccgtaaccgtgctggccgccgcggcgattggcgcaaggcgtacgttcgcctggccgacggccagtcgatcgatgtaacggccaaggcctga

SEQ ID NO: 495988 - DNA, 606 bp, Stenotrophomonas maltophilia
atggaactcgttatcacgggtagcaacaacaaggtctcggtctccgacgccgtgttcggtcgcgatttcagcgaagatctggtccaccaggtcgtcgttgcctaccgcaacgccggtcgcgccggcaccaaggcacagaagactcgctccgaagtggctggtaccaccaagaagtcgaagaagcagaagggcggcggcgcgcgtcatggcgcactgacggctccgatcttcgtcggcggcggtgtcaccttcgcggccaagccgcgcagcttcgagcagaaggtcaatcgtaagcagtaccgtgccgccatgtgcgcgatcctgtccgagctgaaccgtcagggccgtctgaccatcgtggagtccttcgatgtcgaagtgaccaacacgaagggtctgatcgccaagctggccggcctggaagtgggcaagcgcccgctgatcgtcaccgaagaagcgtccgagcacctgtacctgtccgcccgcaatctgccgtacgtgcaggtgcgtgacgtccagggtctggatccggtctcgctggtgggtgccgacacggtcgtcatcaccgctgacgcggtcaagaaggtcgaggagtggctggcatga

SEQ ID NO: 495989 - DNA, 651 bp, Stenotrophomonas maltophilia
atgacgaagaagtattcgttgggcttcgtgggccgcaaggccggcatgagccgcgtgttcaccgaagatggccgttccattccggtgaccctgatcgaagcaaccccgaaccgcatcgcgcagatcaagaccgtcgaaaccgacggctacagcgccgtgcaggtgaccgtcggcgcgcgtcgcgctgccctggtcaacaagccggaagccggccacttcgccaaggcgaaggtggaagcgggtcgtggcctgtgggaattccgcgttgaagacgcgcagctcggcgatttcgccgttggcggcgaagtcaaggcggacatcttcgaagtcggccagatcgtcgacgtccagggtgtcaccaagggtaagggcttccagggcaccatcaagcgccacaacttccgtatgggcgatgcaacccacggtaactcgctgtcgcatcgcgcgccgggttcgctgggtcagcgccagaccccgggtcgcgttttcccgggcaagaagatgtcgggccacatgggcgcggtgcagcagagcacccagaacctggaagtggtcaaggtcgacgtcgagcgcggtctgatcgccgttcgcggcgccgttccgggcgcggcgggtggcgatgtgatcgtccgtccggcgagcaaggcataa

SEQ ID NO: 495990 - DNA, 312 bp, Stenotrophomonas maltophilia
atggcggaccaaaagatccggatccggctgaaagcgttcgatcatcgtctgatcgaccgttcggccagcgagatcgttgaaacggcaaagcggaccggcgcgcaagtgcgtggcccgatcccgctgccgaccaagatcgagcgttacaccgttctcgtctccccgcacgtcgacaaggacgcgcgtgaccagtacgagacccgcacgcacaagcgcgtgctcgatatcgttgacccgaatgacaagaccgtggacgcgctgatgaagctcgaactggctgccggcgtcgacgttcagatcaagctgacctga

SEQ ID NO: 495991 - DNA, 1191 bp, Stenotrophomonas maltophilia
atggcaaagggtaagttcgagcgcaccaagccgcacgtcaacgtcggcaccatcggtcacgtcgatcacggcaagaccacgctgaccgccgcactgaccaagatcggtgccgagcgcttcggtggcgagttcaaggattactcctcgatcgacgccgcgccggaagaaaaggctcgtggtatcacgatctcgaccgcgcacgtcgaatacgaatccccgatccgtcactacgcccacgttgactgcccgggccacgctgactacgtcaagaacatgatcaccggtgccgcccagatggacggcgcgatcctggtgtgctcggccgctgacggcccgatgccgcagacccgtgagcacatcctgctgtcgcgccaggtcggcgtgccgtacatcgtcgtgttcctgaacaaggccgacatggtcgacgacgccgagctgctcgagctggtcgagatggaagtgcgcgaactgctgagcaagtacgagttcccgggcgacgacaccccgatcatcgccggttcggcccgcctggcgctggaaggcgaccagagcgacatcggcgtgccggccatcctgaagctggtcgacgcgctggacagctggattccggagccggagcgtgcgatcgacaagccgttcctgatgccggtggaagacgtgttctcgatctcgggccgcggcaccgtggtgaccggtcgtatcgagcgcggcgtgatcaaggttggcgacgaaatcgaaatcgtcggcatccgtccggtgcagaagaccaccgtgaccggcgttgaaatgttccgcaagctgctggaccagggtcaggcaggcgacaacgctggcctgctgctgcgcggcaccaagcgtgacgacgtcgagcgtggccaggtgctggccaagccgggcacgatcaagccgcacaccaagttcgaaggcgaagtgtacgtcctgtcgaaggacgaaggcggccgccacaccccgttcttcaacggctaccgtccgcagttctacttccgcaccaccgacatcaccggcgcagctgcgctgccggaaggcgtcgaaatggtgatgccgggtgacaacgtcaagatggtcgtcaccctgatcaacccggtggcaatggacgaaggcctgcgcttcgccatccgcgaaggcggccgtaccgtcggcgccggcgtggtctcgaagatcatcgagtaa

SEQ ID NO: 495992 - DNA, 2142 bp, Stenotrophomonas maltophilia
gtggcccgttccactcccatcgagcgttaccgtaacttcggcatcatggctcacatcgatgccggcaagaccaccacgtccgagcgcatcctgttctacaccggcaagagccacaagatcggtgaagtgcacgacggcgccgccaccatggactggatggagcaggagcaggagcgtggcatcacgatccagtccgctgccaccaccgcgttctggaagggcatggacaagtccctgccggagcaccgcttcaacatcatcgacacccccgggcacgtcgacttcaccatcgaagtggagcgctcgctgcgcgtgctcgacggtgccgtcttcgtcctgtgtgccgtcggtggcgtgcagccgcagtcggaaaccgtgtggcgccaggccaacaagtaccacgtgccgcgcatcgcgttcgtcaacaagatggaccgcaccggtgccaacttccagaaggtcgtcggccagctgaaggccaagctgggcgcggtcgccgtgccgatgcagctgccgatcggcgctgaagacaatttcaagggcgttgtcgacctgctgaagatgaaggccatccattgggatgaggcttcgcagggcatgaagttcgaatacagcgacatcccggccgatctgcaggcggctgccgaagaggctcgccagttcatggtcgagaccgctgccgaagccagcgaagagctgatggaaaagtacctgggcggcgaagagctggccgaggctgaaatcatcaacgcgctgcgtacccgcaccctggccaccgagatcgtgccgatgtactgcggctcggccttcaagaacaagggcgtgcaggccatgctggacggcgtgatccagctgctgccgtcgccggtcgacgtgccggacgtgaagggcgtggacgttgacgacgacaccgtcgagatgacccgcaagtcggacgacaaggctccgttctcgtcgctggccttcaagatcatcaccgacccgttcgtcggcgcgctgaccttcttccgcgtctactcgggcaccctgaacggtggcgacaccgtgctgaactcggtgaagggcaagaaggagcgcatcggtcgcatcctgcagatgcactcgaacaatcgcgaggaaatcaaggaagttctggctggtgacatcgctgctgccgtgggcctgaaggacaccaccaccggtgacaccctgtgcgccgtggacgcgccgatcatcctggagcgcatgacgttcccggagccggtgatctcgatggccgtcgagccgaagaccaagtcggaccaggaaaagatgggtctggccctgggccgtctggcgcaggaagatccgtcgttccgcgtcaagaccgacgaagagtccggccagaccatcatctcgggcatgggcgagctgcacctggacatcatcgtcgaccgcctgaagcgcgagttcaacgttgaagccaacgtcggcgcgccgcaggtggcctaccgcgaaaccatcaccctggccgacgtcaagtcggactacaagcacgccaagcagtccggtggtaagggtcagtacggtcacgtcgtgatcgagctgtcgccgatcaccgctgaagaccgtgccgatccgaagctggctccggccatcaaggacgacttcctgttcatcaacgacatcaccggcggcgtgatcccgaaggaattcattccgtcggttgaaaagggcctgcgcgaaaccatcaccagcggtccgctggctggcttcccggtcgtggacgtcaaggtgaagctggtgttcggttcgtaccacgacgtcgactcctcggaaatggcgttcaagctggcttcgtcgatggccttcaagcagggcttcgccaaggccaagccggtgctgctggagccgatcatgaaggtcgagatcgtgaccccggaggattaccagggtgacgtgatgggcgacgtcagccgtcgtcgcggcgtgctgcagggttccgacaccaccggtgacggttcggccagcatcatcaacgcgatgatcccgctgggtgaaatgttcggctacgccactgcgctgcgttcgcagacccagggccgcgccaccttcaccatggaattcgatcactacgagccggctccgaccaacatcgccgaagccgtcatgaagaagggctga

SEQ ID NO: 495993 - DNA, 474 bp, Stenotrophomonas maltophilia
atgtcgcgtaagggtaatactccgcagcgttccgtcctgcccgatccgaagcacggaagcgaaaccatcgcccgcttcatcaacatggtcatgcagagcggcaagaagtccgtcgccgaaaagatcgtgtacggcgccatggacgtgatcaccgagaagaacagcagcgccaacgccattgaactggtgcagaaggctctggacaacgtcgctccggcggtcgaagtcaagtcgcgtcgcgtcggtggtgccacctaccaggtgccggtcgaagtgcgttcgtcgcgcaagatggccctggccatgcgctggctgatcgactccgcgcgcaagcgtggtgagaacaccatgccgaagaagctggctgctgaactgatcgacgcctcggaaaaccgtggcggcgccatcaagaagcgcgaagaaacccaccgcatggccgaagccaacaaggcattcgcccactaccgctggtga

SEQ ID NO: 495994 - DNA, 375 bp, Stenotrophomonas maltophilia
atggcgacgatcaaccagctggtccgcaagccgcggcaagcgaccacctacaagagtgcctcgccggcgctcgacaagtgcccgcagcgccgtggcgtctgcacccgtgtctacaccaccactccgaagaagccgaactcggctctgcgcaaggttgccaaggtccgcctgaccaaccaggaagaagtgatttcctacatcggtggtgaaggccacaacctgcaggagcactccgtggtcctgatccgcggcggtcgcgtcaaggacctgccgggtgtgcgttaccacaccgttcgtggctcgctcgacgccgccggcgttgccaagcgtcgccaggcccgttccaagtacggcgccaagcgtccgaaggcataa

SEQ ID NO: 495995 - DNA, 4224 bp, Stenotrophomonas maltophilia
atgaaagacctgctcaacctcttcaaccagcagcgccagacgctggacttcgacgcgatcaagatcgcgctggcctcgccggacctgatccgttcgtggtccttcggcgaagtgaagaagccggaaaccatcaattaccgtaccttcaagccggaacgcgacggcctgttctgcgccgccatcttcggcccggtgaaggactacgagtgcctgtgcggcaagtacaagcgcatgaagcaccgcggcgtggtctgcgaaaagtgcggcaccgaagtgaccctggccaaggtgcgccgtgagcgcatgggccacatcgacctggcgtcgccggtcgcgcacatctggttcctgaagtcgctgccgtcgcgcatcggcctgatgctggacatgaccctgcgcgatatcgagcgcgtgctgtacttcgaagcgtacgtggtgaccgagccgggcctgaccgccctggagcgccgccagctgctgaccgaagaacagtacctgcaggcccgccaggagcacggtgacgacttcgacgccgccatgggcgccgaggccgtgtacgaactgctgcgcacgatcgacctgcagtcggaaatgacccgcctgcgcgaggaaatcgccgctaccggctcggaaaccaagctcaagcgcctcaccaagcgcatcaagctgatcgaggccttcctggaatcgggcaaccgtccggaatggatggtcatgaccgtgctgccggtgctgccgccggacctgcgcccgctggtcccgctggatggcggccgcttcgcgacctccgacctgaacgacctgtaccgccgcgtcatcaaccgcaacaaccgcctgcgccgcctgctcgagctgagcgcgccggacatcatcgtgcgcaatgaaaagcgcatgctgcaggaatcggtcgatgcgctgctggacaacggccgtcgcggccgtgccatcaccggcaccaacaagcgcccgctgaagtcgctggccgacatgatcaagggcaagcagggtcgcttccgccagaacctgctcggcaagcgcgtcgactactcgggccgttcggtcatcgtggtcggtccgtacctgcgcctgcaccagtgcggcctgccgaagaagatggcgctggagctgttcaagccgttcgtcttcgccaagctgcagcgtcgtggcctggccaccaccatcaaggccgccaagaagctggtcgagcgcgaagaagccgaagtctgggacatcctggaagaggtcatccgcgagcatccggtgatgctgaaccgtgcgccgaccctgcaccgtctgggcatccaggcgttcgagccggtgctgatcgaaggcaaggccatccagctgcacccgctggtctgcaccgcgttcaacgccgacttcgacggtgaccagatggccgtccacgtgccgctctcgctggaagcccagctggaagcgcgtgcgctgatgatgtcgaccaacaacatcctgtcgccggccaacggcgagccgatcatcgtgccgtcgcaggacgtcgtgctgggtctgtactacatgacccgctcgctggaaaacaagaagggcgagggcatggccttcgccaacatcgccgaagtgaagcgtgcctacgacaaccgcgtggtggaactgcacgccaaggtcaaggtccgcatcaccgaggtggtgaccgacgaagacggcaacaagcagaacaagacctcgatcgtggacaccacgatcggtcgcgccctgctggctgaaatcctgccggaaggcctgccgttcgcgctggccaacaccgagctgaccaagaagaacatcagccgcctgatcaactccagctaccgccagctgggcctgaaggacacggtcgtgttcgccgacaagctgatgtacaccggcttcgcctacgcgacccgcgccggcgtctcgatcggcatcgacgacatgctgatcccggacgagaagaagggcatcctcaccgaggccgaagccgaagtgctggaaatccaggagcagtaccagtcaggcctggtcaccgccggcgagcgctacaacaaggtggtcgacatctggtcgcgcaccaacgagcgcatcgccaaggcgatgatggacaccatcggtaccgagaaggtggtcaatgccaagggcgagaccatcgaccagaagtcgatgaactcgctgtacatcatggccgactccggtgcgcgtggttcgcaggcgcagatccgtcagctggccggcatgcgcggcctgatggcccgcccggacggctcgatcatcgagacgcccatcaaggcgaacttccgcgaaggcctgaacgtgcaggagtacttcaactccacccacggtgcccgtaagggtctggccgataccgcgctgaagaccgcgaactcgggttacctgacccgtcgtctggtcgacgtcgcgcaggacgtggtgatcaccgaggtggattgcggtaccaccgaaggcctgatcatgaccccgatcgtggaaggcggcgacgtggtcgagccgctgaaggaccgcgtgctgggtcgcgtggttgccgaggacgtgttcctgccgggcaacgacgaggatccgatcgtcacccgcaacaccctgctcgacgaagcctgggtagccaagctggaagatgccggcgtgcagaccatcaaggtccgctcgaccatctcctgcgaatcggcgttcggtgtctgctcgcgctgctacggccgcgacctggcccgtggccacctggtcaacatcggtgaagcagtcggcgtcatcgccgcgcagtccatcggtgagccgggtacccagctgaccatgcgtacgttccacatcggtggtgcggcgtcgcgagctgcagcggtcgacaacatcaccgtcaagaccaccggctcggtcaagttcagcaacctcaagtcggtcgagcatgccaacggctcgctggtcgcagtgtcgcgctcgggcgaaatctcggtgctcgatgcccacggccgtgagcgtgagcgttacaagctgccgtacggtgcgaccatcacgtccaaggacggtgatgcgatcaaggctggccagaccgtggccaactgggatccgcataaccacccgatcgtgtcggaagtggccggcttcatccgcttcatcgacttcgttgatggcatcaccgtcatcgagaagaccgacgagctgaccggcctggcttcgcgcgaaatcaccgatccgaagcgtcgtggtacccaggccaaggacctgcgcccgatcgtgcgcatcgtcgacgccaagggcaacgacctgtcgattccgggcaccgacctgccggcgcagtacctgctgccgccgcgttcgatcgtcaacctgcaggacggcgccccggtgggcgtgggcgacgtcgtcgccaagatcccgcaggaagcgtcgaagacccgcgacatcaccggtggtctgccgcgcgtggccgacctgttcgaagcgcgcaagccgaaggatccggcggtgctggccgagcgttcgggcatcatcagtttcggtaaggacaccaagggcaagcagcgcctgatcatcaaggacaccgatggttcggagcacgaagagctgatcccgaagtaccgccaggtcatcgtgttcgaaggcgagcatgtcaccaagggtgaaaccatcgtggacggcgagccgagcccgcaggacatcctgcgcctgctgggcgtcgagccgctggcggcctacctggtgaaggaaatccaggacgtgtaccgcctgcagggcgtgaagatcaacgacaagcacatcgaggtgatcacccgccagatgctgcgcaaggtcgagatcaccgatcagggcagcagcaagttcctgaacggcgaacaggtggagcgtcagcgcgttatcgaggaaaatgcgcgcctgtcggcccgcaacgagctgccggcgcacttcgatccggtcctgctgggtatcaccaaggcgtcgctggcgaccgaatcgttcatctcggccgcttcgttccaggaaaccacccgcgtgctgaccgaagcggccgtccgcggcacctcggacaacctgcgtggcctgaaggaaaacgtcatcgtgggtcgcctgattccggccggtaccggcctggcgtaccacagcaaccgccgtcgcggcgcttccggtctcaccgagtcggaaatgcagaccctggccggtaccccggtcgcggtcgaggcgccggtggttgaagccgaagctgaacaggcgttgggcgaagaatga

SEQ ID NO: 495996 - DNA, 4155 bp, Stenotrophomonas maltophilia
atgacgtcctattcgttcaccgaaaaaaagcgtatccgcaaggatttcggcaagcagcgctcgattctcgaagtgccgttcctgctcgccatccaggtggattcctatcgtgaattcctgcaggaaaacgtcgatccggccaagcgcacggaccacggcctgcacgctgcgctgaagtcggtcttcccgatcgccagctacagcggcaatgctgccctggaatacgtcggctacaagctgggcgaaccggtcttcgacgagcgtgagtgccgccagcgcggcatgagctacggcgccccgctgcgcgtgaccgtgcgcctggtgatctacgaccgtgagtcgtcgaccaaggccatcaagtacgtgaaggagcaggaggtctatctgggcgaaatcccgctgatgaccgagaacggcaccttcatcgtcaacggcaccgagcgcgtcatcgtctcgcagctgcaccgctcgccgggcgtgttcttcgaccacgaccgtggcaagacccacagctcgggcaagctgctgtacagcgcccgcatcattccttaccgcggctcctggctggacttcgagttcgacccgaaggacgcgctgttcacccgtatcgaccgtcgccgcaagctgccggtgtcgatcctgctgcgcgcgctcggctacagcaacgaagagatgctggccgagttcttcgagatcaacaccttccacatcaacccggatgaaggcgtccagctggagctggtgccggagcgcctgcgtggcgaaaccctgggcttcgacctcgccgacggcgacaaggtcatcgtggaagccggcaagcgcatcaccgcgcgccacatcaagcagctggaagcctcgggcatcgccgccctggccgtgccggacgactacatcgtcggccgcatcctgtcgcacgacgtggtcgatgcctcgaccggcgaactgctggcccaggccaacgacgagatcaccgacgagcagctgcaggccttccgcaaggccggcgtcgatgcggtcggcaccctgtgggtgaacgacctggatcgtggcccgtacctgtccaacaccctgcgcatcgatccgaccaagacccagctggaagccctggtcgagatctaccgcatgatgcgtccgggcgagccgccgaccaaggatgccgcgcagaacctgttccacaacctgttcttcaccttcgagcgctacgacctgtccgcggtcggccgcatgaagttcaaccgtcgcgtgggccgcaaggaaaccaccggcgaagccgtgctgtacgacagcaagtacttcggtgagcgcaacgacgaagagtccaagcgcctggtcgctgcccacggcgacagctccgacatcctggacgtgatcaaggtcctgaccgagatccgcaacggtcgcggcgtggtcgatgacatcgatcacctgggcaaccgtcgcgtgcgttcggtcggtgaaatggccgagaacgtgttccgcgtcggcctggtccgcgtcgagcgcgcggtcaaggagcgcctgtcgatggccgagtcggaaggcctgaccccgcaggaactgatcaacgccaagccggtcgccgctgccatcaaggagttcttcggctcctcgcagctgtcgcagttcatggaccagaacaacccgctgtcggaagtgactcacaagcgtcgcgtctcggccctgggcccgggcggtctgacccgtgagcgcgccggcttcgaagtgcgcgacgtgcacccgacccattacggccgcgtctgcaccatcgaaaccccggaaggcccgaacatcggcctgatcaactcgctggccgtgtatgcccgcaccaaccagtacggtttcctcgagaccccgtaccgcaaggtcgtggacggcaaggtctatgacgaagtcgagttcctgtcggcgatcgaagaaaacgagtacgtcattgcgcaggccaacgccctgaccaatgccgacagcgtgctgaccgagcagttcgttccgtgccgcttccagggcgaatcgctgctgaagccgccggcggaagtccacttcatggacgtctcgccgatgcagaccgtgtcgatcgcggctgcgctggttccgttcctggagcacgatgacgccaaccgcgcactgatgggcgccaacatgcagcgtcaggccgtgccgaccctgcgtgcgcagaagccgctggtgggtaccggcatcgagcgcgccgtggcgcgcgactcgggcgtgaccgtgaacgcccgccgtggcggcgagatcgtgcagatcgacgcggcccgcatcgtggtcaaggtcaacgaggaagagatcgttggcgccaccgacgcaggcgtggacatctacaacctggtcaagtacacccgttcgaaccagaacacctgcatcaaccagcgtccgctggtccaggtcggtgacgtcatcgcccgcggcgacgtgctggccgacggtccgtccaccgacatcggcgaactggccctcggccagaacatgctgatcgcgttcatgccgtggaacggctacaacttcgaagactccatcctgctctccgagcgcgtggtggaagaggatcgttacaccacgatccacatcgaagagctgacctgcgtcgcgcgtgacaccaagctggggccggaggaaatctccgccgacatcccgaacgtctccgagcaggcgctgaaccgcctggacgagagcggcgtggtgtacatcggcgcggaagtccgtgccggcgacatcctggtcggcaaggtcaccccgaagggcgaaagccagctgaccccggaagagaagctgctgcgcgcgatcttcggcgagaaggcttcggacgtgaaggacagctcgctgcgcgttccgccgggcatggacggcaccgtcatcgacgtgcaggtcttcacccgcgacggcatcgagaaggacaagcgcgcccgccagatcgaagagtctgaaatcaagcgcgtcaagaaggacttcgacgaccagttccgcatcctggaagccgccatctacatgcgtctgcgttcgcagatcgtgggcaaggtggtcaacggtggcgctggcctgaagaagggtgacgtgatcaccgacgccttcctggacggcctgaagaaggctgactggttcgccctgcgcatgaaggacgaggacgcttcggaagccatcgagcgcgcgcagaagcagatccaggcgcacgagaaggagttcgagcgtcgcttcgccgacaagcgcggcaagatcaccgccggtgacgacctcgctccgggcgttctgaagatggtcaaggtgttcctggccgtgaagcgccgcatccagccgggcgacaagatggctggccgccacggcaacaagggtgtggtctccaacgtggtgccggtcgaggacatgccgtacatggcctcgggcgaaaccgtggacatcgtgctgaacccgctgggcgtgccgtcgcgcatgaacatcggccagatcctggaagtgcacctgggctgggccgccaagggtctgggtcgcaagatccaggcgatgatggaagcccaggcggcggtcgccgacctgcgcaagttcctggacgacatctacaaccacgacgacaccaacgtggccaaccgtgtcgacctgtcgcagttcagcgacgaggaactgctgcgcctggcccgcaacctgaccgacggcgtgccgatggctaccccggtgttcgacggcgccaccgaagcggaaatcaagcgcatgctggaactggccgacctgccgagcagcggccagacccagctgtacgacggccgcaccggtgaagccttcgatcgccacaccaccgttggctacatgcactacctgaagctgaaccacctggtcgacgacaagatgcacgcccgttcgaccggtccgtactcgctcgtcacccagcagccgctgggcggcaaggcgcagttcggcggccagcgcttcggtgaaatggaagtctgggcgctggaagcctacggcgcggcctacaccctgcaggaaatgctgacggtgaagtccgatgacgtgcagggccgcaaccagatgtacaagaacattgtcgacggtgagcacgagatggtcgcgggcatgccggaatccttcaacgtgctcgtgaaggaaatccgctcgctggccatcaacatggaactggaagacaactga

SEQ ID NO: 495997 - DNA, 369 bp, Stenotrophomonas maltophilia
atgtcccttaccaacgaacagatcgtcgacgccatcgccgagaagtccctgatggaagtgatggagctggtcaaggccatcgaagagaagttcggcgtctccgccgctgctccggttgccgtggctgctgccgctggcccggccgctgctgttgaagagcagaccgagttcaccgtcaccctgaagaccgccggcgagaagaaggtcgaggtcatcaaggccgtccgcgccatcaccggcctgggcctgaaggaagcgaaggacctggccgaagccggtggcgtcctgaaggaaggcgcttcgaaggaagacgccgagaagatgaagaaggacctggaagctgctggcgcgactgtcgaagtcaagtaa

SEQ ID NO: 495998 - DNA, 537 bp, Stenotrophomonas maltophilia
atggctctcaatctgtcccagaagcaagaagtagtcgccgagctggcagacgtcgccgccaaggcccactccttgatcgcagccgaatacgctggcaccacggtcgcccagatgaccgcgatgcgcaagcaggctcgtgaaaccggtgttttcttgaaggttgtcaagaacaccctggcttcgcgcgccgttgaaggcaccgagttcgcagtcgcccaggaccagatggttggtccgctgctgtacgcgttctcgctcgaggagcccggcgctgccggtcgcctgatcaaggaagccgccaagggcaacgacaagctgaaggctaaggtcgtcgccatcggtggcgaagtgttcccggcaagccacgtcgaagtgctggcctcgctgccgacccgcgaccaggccctggccatgctggcccgcgtcctgaccgagccggtcacgatgtttgcccgcgccatcaaggccgttggcgagaagcaggggggtggcgatgtcgccgccgacgctgccgagccggccgccgagaccgcctga

SEQ ID NO: 495999 - DNA, 699 bp, Stenotrophomonas maltophilia
atggcacagaccaagcgtgagaaggccatcaaggccgccgtcgttccgggcaaggcgtacgccttcgaggacgcgatcaacatcctgaagaccgccaccaaggccaagttcgtcgagtcgatcgacgttgccgtgcgcctgggcgtcgatgcgaagaagtccgaccagcaggtccgtggctccaccgtgctgccggccggtaccggcaagtcggtccgcgtcgccgtgttcgctccggccggtgccaaggctgatgaagccctggccgctggcgccgaagccgtcggtatggacgatctggccgagaagatgcaggccggtgatctgaactatgacgtcgtcatcgcgaccccggacgccatgcgcgtcgtcggtaagctgggcaccgtgctgggcccgcgcggcctgatgccgaacccgaaggtcggcactgtttccccgaacccgggtgaagccgtgaagaacgccaagtcgggtcaggtccgttaccgcaccgacaaggccggcatcatccactgcaccatcggcaaggccgacttcgccgaagacgcgctgaagtcgaacctgaccgcgctgctgctggacctgatcaaggccaagccggccacctcgaagggcacctacctgcagaaggtttcggtcagctcgacgatgggcccgggcgtcaccgtcgaccagtcgtcgctgaccctgaagtaa

SEQ ID NO: 496000 - DNA, 429 bp, Stenotrophomonas maltophilia
atggcaaagaaagttgtcggttacatcaagctgcaggtgaaggccggtcaggccaacccctcgccgccggtcggtcctgcgctgggtcagcgtggtctgaacatcatggaattctgcaaggcgttcaacgctgccacgcagaagctcgagccgggtctgccggttccggtgatcattacggcctactcggaccgtacgttcaccttcatcaccaagagcaccccggctaccaccctgctgaagaaggccgctggcatctcgtcgggctccaagcgcccgaacaccgagaaggtcggcaaggtcacccgtaagcagctggaagagatcgccaaggcgaaggaaccggatctgactgccgccgacctggacgccgccgtgcgtaccatcgctggctctgcccgttccatgggcctcgtggtggagggttaa

SEQ ID NO: 496001 - DNA, 561 bp, Stenotrophomonas maltophilia
atgaagcgttggtacgtcgttcacgcctattcgggcttcgagaagtcggtggcgcaggccctgcgcgatcgcatcgtccgtgacggcatggaagagcgcttcggcgacgtcctggtcccgaccgaagaagtggtcgagatgcgcgctggccagaagcgccgctccgagcgcaagttcttcccgggttacgtgctggtccagatcgagacccacgaagaagccggtattccgcgcatcgacaacgaaagctggcacctggtcaaggaaaccccgcgtgtgatgggcttcatcggcggtactgccgatcgtccattgccgatcgccgattccgaggccgaggccatcctgaaccgcgttcaggaaggtgtcgagaagccgcgtccgaaggtgctgttcgagccgggccagatggtccgcgtcaccgacggtccgttcaatgatttcaatggcgtcgtcgaagaagtcaactacgagaagagccgtctgcgcgtctcggtgctgatcttcggtcgtgcgaccccggtcgagctcgagttcggccaggtcgaaaaggccgtctga

SEQ ID NO: 496002 - DNA, 414 bp, Stenotrophomonas maltophilia
atgaatagcaagatcgaacactccaaggacaactccgccaatggtggagatatcgtcaagtatgtcgccgcatcgttgctggtgctggccggtctgttcgtctggttctggttctccgccgactccggtcgcgccgcccagctgggtgcgtgggcgggtcaggtgcgtgcgttggcggtcgtggtcggtctggttggcggtatcggcgtgttcatgctgaccggcaaggggcgcgacacccgcgaattcctctccgagtcgcgcttcgaactgcgcaaggtggtctggccgacgcgccaggaagccatccgcatgacctgggtcgtgatcgtcgtggtgctcatcctcagcctgctgctgggtggcttcgacttcctgatccagaaactgactcagtggttcctgagccgctaa

SEQ ID NO: 496003 - DNA, 1191 bp, Stenotrophomonas maltophilia
atggccaagggtaagttcgagcgcaccaagccgcacgtcaatgtcggcaccatcggtcacgtcgaccacggcaagaccacgctgaccgccgcactgaccaagatcggtgccgagcgcttcggtggcgagttcaaggactactcctcgatcgacgccgcgccggaagaaaaggctcgtggtatcacgatctcgaccgcgcacgtcgaatacgaatccccgatccgtcactacgcccacgttgactgcccgggccacgctgactacgtcaagaacatgatcaccggtgccgcccagatggacggcgcgatcctggtgtgctcggccgctgacggcccgatgccgcagacccgtgagcacatcctgctgtcgcgccaggtcggcgtgccgtacatcgtcgtgttcctgaacaaggccgacatggtcgacgacgccgagctgctcgagctggtcgagatggaagtgcgcgaactgctgagcaagtacgagttcccgggcgacgacaccccgatcatcgccggttcggcccgtctggcgctggaaggcgaccagagcgacatcggtgtgccggccatcctgaagctggtcgacgcgctggacagctggattccggagccggagcgtgcgatcgacaagccgttcctgatgccggtggaagacgtgttctcgatctcgggccgcggcaccgtggtgaccggtcgtatcgagcgcggcgtgatcaaggttggcgacgaaatcgaaatcgtcggcatccgtccggtgcagaagaccaccgtgaccggcgttgaaatgttccgcaagctgctggaccagggtcaggcaggcgacaacgctggcctgctgctgcgcggcaccaagcgtgacgacgtcgagcgtggccaggtgctggccaagccgggcacgatcaagccgcacaccaagttcgaaggcgaagtgtacgtcctgtcgaaggacgaaggcggccgccacaccccgttcttcaacggctaccgtccgcagttctacttccgcaccaccgacatcaccggcgcagctgcgctgccggaaggcgtcgaaatggtgatgccgggtgacaacgtcaagatggtcgtcaccctgatcaacccggtggcaatggacgaaggcctgcgcttcgccatccgcgaaggcggccgtaccgtcggcgccggcgtggtctcgaagatcatcgagtaa

SEQ ID NO: 496004 - DNA, 1017 bp, Stenotrophomonas maltophilia
atgaaactgcgcctggcgctgtccgcgctgctgtcctttccattgatcgcccaggccgccccggctgcgtcgccattgctggtcatccatggcggcgccggcgtcgaacgcaaggacctgtcgccggccgaagagaaggctgcgcgcgatgcgttgcgcgccgcactgctgaaaggccatgccgaactggcggccggtcgtccggcgcttgcagcggtcactgcggcaatcaccgtgctggaggacgatccgaccttcaacgctggcaagggcgcagtgttcacccatgacggccacaacgagctggatgcggcggtgatggacggtgccacccaggcagcaggtgcggtggccggcgtgcagcgggtgcgtaacccgatcctgctggcgcagaccgtgatgcagaagtccaggcacgtgatgatggtagggcagggtgccgaagccttcgcggtggagcagggcattgctctggttgatccctcctacttccgcacggagaagcgttggcagcagctgcagcgcgcgcttaaggaagaggtcaatggccaggcccatgccgacctggagaccgcaaagcacttcggtaccgtcggtgcggtcgcgctggatgcgcaggggcagctggccgccggcacctccacgggcggcatgaccaacaagcgctatggccgggtgggtgactcgccgatcatcggcgccggcacctgggccgatgcgcgctgtgcggtgtcgggcaccggctggggcgagtactacatccgcaccgcggccgcgcacgagatctgtgcgcgcatgcgctaccaggggcagagcccggagcaggccggcaagggcgtgatcaacgagacgattccgcagatgggcggcgacggtggtgcgatcgtgcttgccgcggacggcagaatggccacgccgttcaacacccagggcatgtatcggggctggatcggcgccgacggagtcccccatgtcgcaattttcgccagcgagaccctgccggtccccggtcaataa

SEQ ID NO: 496005 - DNA, 1020 bp, Stenotrophomonas maltophilia
atgcgacgcgttcaccggaccctgcgtacccctgttgcctggctggcgctgctcatgctggcctggccgtcggccgcgcccgcgcaggatctgcagggcccgggcttttcctactacgaggtcggcgaccttgaggccccacgtcccgggccgcgtgcatccgcgatgatgctgatgggcggtggcgagtgggtgccggatgccttccagtggtggttgaagcaggcaggcaatggccgtgtactgatcctgcgtgcctccggtggcaatgaactgcaggaccgcctgtaccgcgagatcggcggcaccaccgcggtacagacgctggtcttcgacagccgccgcggtgccgatgatccagccgtgctgcgcgtggtcgctgcggccgatgccatcttcattgccggcggcgaccagtcgcgctacatccgcttctggaagggcaccgcactcaaccgcgcgctcaacgcccatgtacgcgccggcaagccgattgccggtaccagcgctggcctggccatcctcggcggctatgcctatggcgccatggatggcggcagcatcagctcggccggtgcgctggccgatccgatgggcagcgcagtcaccatggacagtggcttcctgcagatgccctacctgcagcgcgtggtcaccgacacccatttcgacaagcgtgaccgccttggccgcctcatcgtgttcgtggcacgcgccgcgcaggacagcggcgaccctgacatcgtcggcatcggcgttgatgaggacaccgccctgtgcgtggagcccgatggccaggcccaggtctacagcgctgatggcgagggcaaggtctgggtggtcagccccggtcgtgatgccgatcgcctggtcgagggcgaaccattgcgcttccatgccgttccggtgaccgtggtcgccagtggcagccgtatgcgcctggacgatttccaggccgaggccgactaccaggccgtggccgacatcagcgacggccagatcgagttcacgcttcggtag

SEQ ID NO: 496006 - DNA, 2739 bp, Stenotrophomonas maltophilia
atgcgtagaaaggcgatggcgtggtcgatccagctagcgttgatgggtgtggctgcttccgcggccgcccaggctccgacgtcctctccggtacaacaactggacgcggtgcaggtcaccggttcgcgcattccgcgcgcccaggtggaaggccccgccccgatcacggtgatcaacgccgaacagatccgctccagtggcttcaccagcgtgccggacgtgctgcgtgcgatgacccagaacggcggtgagacgcagagccagcagtcttccagcggcgccgacttctcgccgggtgcccagcaggtggacctgcgcggcctgggcccgaaccacacgctggtgctggtcaatggccgccgtatcgccgacttcccgatgccgttcaagggccgcagcaacttcaccgatgtctccaacattccgctggggatgatcgagcgcattgaagtactgaccggcagcgcctcggccatctatggatcggacgcgatcgccggcgtggtcaacttcatcctgaagaagaaggccgacggcaccacgatcgacatgcgcatgggcaccaccactgaaggcggtggcgagtcgttcgacatgagcatcgccagcggtttcagccgtggcaacttcaacgcggtatacagcgtcgaactgcagtcgcagacgccgctgtgggcctatgagcgcgacatccaggactcgacccaggacggccccaccgagggttcgcgcatcgcgcgccgtgcgtacctgcgcaccgactacaacgatgactatctggaccccggcgccgccacctgcgaagcgctgtccggccagaaccagggcagcacctaccgcgcctaccgcccgaagtacggctactactgtggcagcgacagctcgatcggctacggcaccatcctcagcaagcgccgcggtgccaacggctacgcgtcgttgagccatgacttcgacaatggccagcagtggttcgccgacgtgcagctgggctaccacacgatgtcgctgatgcgcgacgtcaccaagtggggccgcatggacgccaacggcgatgagtcgggctacttcaacaacgaagccaccggcgagatcgagttctggcagcgccagttctcgcccgaggaaatgggtggcctgcgcaatgccatggtgcgcagcacgcagaagaccttcagcgtgaccaccggcttcaagggcaacctggccggcaactgggactacgaagcggcattgagccattcgcagtaccagtcgcggatcagctgggcgcagatcatcgccgccaaggccaatgacctgttcctcggcccgcagctgggcgtggatgacgacggtttcccgatctacaacgccgacccgtcacgcctgtaccggccgctgacccgcgccgagtacgattcgatcgccgcgcgtaccacctacacgccgaagtcgcgcacggagacggcggcattcactctgaccaattccgcgctgttcggcctgcccggcggtgacgccggtttcgccgcgaccgtggaagtgggccagcaggcgtactcgctcaatcctgatccgctggcgacccagtactactattacagctggaaggattcggacggccaaggttcgcgcaaccgctgggctacggcggccgagctgcgcatgccgctgcacgaaacggtcaacctgagcgtggccggccgctacgaccagtaccgctatgccggccacaccatcggcaaggcgacctggagcggtggcctggaatggcgcccgatcgacacgctgctggtgcgcggttcgtatggcaccgcgttccgtgcgccggacctgcactatgtattcgccggcccgggcaacgatgagaccaccgccgaagacctgtacagctgccgcgccgacggcgccaccgactgcgccgactacgagcgcaacctgatccgcagccgcaccggcaaccgccagctcgacccggaaaccagcacctcgtggagtgccggcttcgtctggtcgccggccgtcggcctggacctgtcggtggactggttcgacatcgacatgcgcgaccaggtgcaggacatggacgtgcgcacgatcctggccaacgaagcgaactgccgcctgggcagcgccgacatcacctcgccgacctgcgtggatgcactcgcccgcatcacccgcagcaacgacgggcgcctgtatggcgtgcgcgtggcgccgatcaacgtcgcccgcgaatccacctccggcatcgacgtcggcctgcgctaccgcctgcagacgggcatcggcgacttcatcttcaacggcacccacacctgggtgaagaagcatgacttccagcgctacccgggcgaccgcaccgaagaccagttcgcagtgaacagcggcttcgacatcccacgcaccaagaccagcctgagcgtgacctgggaaaaggatgcgtggtcggcaacggtgtacggttcgcgcctgggcaagctgccgacctcggacagctacgaccaggtgttcgactgggacagcggcgacagcccgtacgtgaaggcgacctatcgctacaacgcctcgctgcagtaccgcttcgacgaccactcgcgcctgtcgctgtcggtggtcaatgtgttcaacaagatgccgccgaaggaccgtacctacactgcatacccgtactacgacgtgtcctggttcgacagcgtggggcgcacgatcaacctgcagtacacccacaagttcggtggcagcgcgctgtaa

SEQ ID NO: 496007 - DNA, 2772 bp, Stenotrophomonas maltophilia
atgttccgcttcccccgcccttcgctgcagcaggccgtgccatcgaccaccgcgtcggtgctgctgcgctgcctgaccgtgtgcgtcttcgtctgcctggccgccgcggccggcttctacctgctcacggcattcaccgaggacatctcgacccatcgccgcgagatgaatgcagcggcctacagggcccagatctatttcgaccagcgcgaagccctgctgcgctatctgggcgattcggtggtgaggggcaacccggatgcacctgcggcggacagcgaaggcatgcgccaggtgccgctggatggtgctggcggccaaccgggccagcggctgctgttgtcagcgcgcgccgaacacacgctgcaggcactgcagacgcatctgctgctggtcgatgcgcacggcacgcactggctggccggcggcgaggtcgacgtggacctggcgcacctgccatcgctgcgtgcgctgcaggcacgcagcggcagcctggaggcggccgacccggtgcactggctgcgcccgggtgacagtggcgttgcattggcgcagccggtacaggccggcccgcatccgacgcagtggctggtgctgctgctcgatggcgcggcggcggcgagcatgatcgacggccagggcatcggcggctatgcgctgctcgaccgtgcggggcagccggcattgtccagccagaccccgcgtctggatggtgcgggctggaagaccctgcgggaacgccaggacgacagcttcggcacgctgtggagtggcgggcttccgcgcggtgtagcgctggtgaaaagtgtcggcaacgacggctggcggttggtctaccacctgccgtcgcaactgctgctgggtgacctggcggtgccgctgctggtctgcgcgctgttgctgctgctggccggcgtcgcgctgcgcctgctgcggcatcgcgtggacctccagctgatccagccggccctgcagcaacagcgcaggctgctggagaacctggatttcagttcgacggtgatcgacatggcgccggtcggcatctgcgtcctgcgccgcagcgaccgcgcgctgctgctctccaaccagctgctacgcgactggcttggcgaagaaggcgaacacagcgactggcaggcgccatggcgcggccatgccggcgagcgcgggcgtggactggaattcaccacccgcgacggtcgtcagctgcaggtgctgcacgcggcctgccgctaccagggcgacgacgtgctgctgtgcgtgttccatgacatttcccggcaccgccaggcacaggccgcgctgtcgtcggcacgccaggccgccgatgcggccaaccaggccaagagcgcgttcctggccaccatgagccatgaaatccgtactccgctctacggcgtgctgggcacgctggagctgctcgggcacacctcgctggacgcccggcagtcgcagtacctgcgcaccatcgagagttcctcatcggtcctgctgcagttgatcagcgatgtgctggatgtttccaagatcgaatccgggcagctcagcctggagccggcgccgttctcgccgcgcgagctgaccgagagcgtgctgcgcagtttcgctgcctcggccacctgcaagggcctgcagatcctggtctgcaccgacccgcgcctgcccacgcgcgtgctgggtgatgccgaccgcatccgccaggtgctgggcaacctgctcagcaacgcgatcaagttcaccgagcatggccgggtggtactgcgcgtgcgccaggtacagcgcgaaggtgaatcgagcgtgctcgcctggcaggtcaccgataccggcgtgggcatcgccgcggaggaacaggcgcggttgttcgaaccattccgccaggtccgtggcgcggccagtgcacagggcaccgggctgggcctgtccatcagcgaccgcctggtgcgcctgatgagcggcgagctgcaggtggtgagcgagcccggcctgggcagcagcttcagcgtgcgcctgcccttgccggtgctggccgccgccgaggatggcccgaccctgctgccggagccgccgatcctggtgcgcggccgtgatcgcgaactggtcgacagtgcctgcggctggctgcgtcgctggggtgccaacgcacagcccctgcagggcgaccctgcactgctggaccatgacggcgcgatcctgatggacggcgaggccgggatgccgctggcctgggcaggccctcgcgtggtggcatcgatcgacggcggcgaccagcccaccgttgccgccgatggcagcctggtggtgaccctgcatgggatgaccgcgatcggcaatgcactggccaacgtgcagcagcaacgtgcggcgctgccggaaacatcgcgcgcggcaacgccgatgccgctgggcctgcacgtgctggccgtcgaagacaacccgatcaaccgggtgatcctggccgagcagctgcgcaccctcggctgcgacgtggagctggcacaggacggcgtggaagccctgcagcgatgccgagagcagtctttcgacctggtggtgaccgacatcaacatgccgcgcatggacggccacgcgttggcccggcagctgcgcgaggacggcaacccggtgccggtgatcggcgccaccgccaatgccactgccgaggagcgcgagcgctgcctggccagtggcatgcagggctacctgagcaaacccatcgacatcgcacgcctgcgcaaggcgctcacctcactgcgccaaggagaccccgcatga

SEQ ID NO: 496008 - DNA, 1221 bp, Stenotrophomonas maltophilia
atgacccagcgtgtcctgatcctggaagaccagcccttccagcgtggtttcctggccaatctgttcggcagccacgcaggcgtgcaggtcgacgcctgcgaagacgtggatgcggccatcgcgctgtgtgcgtgccagccctacgacctggtggtcagcgacctgctgatgcccgggcaggacggcatccagttcatccaggcgctggcggaacagccgcgcccgccacgcctcgcggtggtcagcgcggccccgcggcggatgatgacctcggcacggctgatggccgaatcgctggggctggatgtggtcggcctgctgcccaagccggtggcggccgccgatgtggacgccctgttcgaggccttggcgcaggcgcgtccggccgccggcgaggcccctacgcgcgcggcggctgcgcccgaaccggatgcatcgcagctgcgccaggccatggccgatggcagcctgacggcctggttccaaccgaagaagtcactgcagtcaggacgcgtggtggcggccgaagcactggtgcgctggcgacatccgcagctgggcacgctggccgctggcagcttcctgccggcaatctgccgctacgggctggagggcgatctgctgcggatgatgctcaaggccagcatcagcgcgcaggcacgctggcgcaagcaagggttccgggtaccggtatcgatcaacctgccccctcacctgctggagcagtcggacctgcccgacgaactgctggcactgaccctggccaacggcggtacgcccggtgaattgtgcttcgaactgatggaaaacagcaccacgcggcacgtcagcgacttctatgccggcgcctgccgcctgcgcatgaagggcttcggcctggcccaggacgatttcgggcagggcctgagctcggtccacaacctggtcaatacccctttcaccgaggtcaagatcgaccgcgcgctggtcagcggatgcgcgcgcgacccggccttgcacctgaccctgtcgacggtgatcgcgctggccaaccagctgggcctgaccatcgtggcagagggcgtggaaagcgatgccgacctggctgccctgcgccagctggggtgcagccaagtgcagggcttcctgatctcgcaggcgctgccgtcggacgagttcacccgcctgctggacgaagaagcgccgcagttggacgagtcgccgcgagccgccctgcgctga

SEQ ID NO: 496009 - DNA, 3228 bp, Stenotrophomonas maltophilia
atgccggccgaggccgctcctgtacgccgactcgctcgccactcactgcgcgtccacgccctgctgatcggcgttgtggtgctggccacgctgcaggccggactgctgctgtcggccggctcgcagctgttcaacgaagagcgcagcaagatcgagtaccacttccgccgcctggacggcacgctgcgcgagcaggagcgcttcctgcgccagtggcggctgcatgatgtcggcacgcatgggcagccggtggccgatgccagcgtggagctgcaacgcgggcccttgttcgccaactttgcggtgatcggaagcgagggggccagtctttcgccaccgactgaactgggcgaccgtttcctgcgcttctacggcacgttctggtcggcctcgcgctatccaccgccgcaatgcctgctggtcgatggccaaggcacgcgcgggctgctggcaccggtacagatcgccggtaccgacgcgagccagaacagcccgcatcacctgcgcccggcgatcgccgacatccaccgggtgctgggtacgcgaccggcggtgcaacgtggtggcatcgtctgggtgggcgtgccatggcgcgaccggcagacctggctgctggccatcgcccacgccccgcaggatgcgcgcctgtggggtgaggacgacaaggactcgcaggccgcactggcctgcctgctcgatcctggccgtgtcgatgactatcgccaggtgctgggtgtcccggtgttccagcggctgtcgctgttcgatgccaacggccagcgcctactgggcgatgcagccgatgccagcgaggctggcacctcctggcaggccggcctcgctggcctgcagttccgcatgcgcagcgagcgcggctggctggcggtctaccacgtcggctggcggcaggtgttccagcacccgcaggggccattgctgggcgcgaccgtggtcgccctgatgctggcactgggcggcacgctggtgctgcgcgcgtaccggcgttcggtcatcgagccgctgcgcagcaaccacgcgcgcctgctggaaagcgaagccttcagtcgcacgatcctggacaacgcgccgatcgggctgtgcctgctgcgtcgtaccgatggcaatgtgctgctggacaacgccctcgcccgccgctggctgggcgaggactatcatgccggcggctggcatggcccgtggcggcgcagcgtactggctgccggcggcaccacgctgggcgatggcctggcctacgccacgcccgaaggccgccacctgctggtaacggcgacaccggcgcgctatcgcggtgagccggcggtgctgtgcctgttcattgacctgagcagccagcatgaagccgaacaggtgctgcagcaggcgcgccgcgccgccgaccaggccaaccgcgcgaagagccagttcctggccacgatgagccatgagatccgcacgccgctgtacggtgtgctcggcacgcttgaactgctggggctgacgccactggatgcacggcaacaggactaccttgcaacgatccagcgttcgtcctcgaccctgatgcagctgatcagcgacatcctggatgtcagcaaggccgaggccgggcaactgagcctggagccaagcccattcgatccagtgcggctgaccgaggacgcgctcgactcgtatgctgccgcggccgccaacaaggggctgcagttctacgcctgcatcgatgccgacgtaccgcccggggtgtgcggtgatgccgcgcggatccgacaggtgctcaacaacctgatcagcaacgcactgaagttcaccgacagcgggcgcgtggtggtccgtgtttcggcacgctggcaggagcaacgctgctggctgcaatggcaggtggcagataccggtatcggcattgccagcgaacaccaggcgcatctgttcgagccatttttccaggccaacccgggcaccgatgcgatgcgcggcaccggcctggggctggccatctgcgcgcatcttgtggcgttgatggaaggccagctgcgcgtggtcagcgagagcggcctgggcagcagcttcagcgtcgaactgccgctgccctcggctccaccggatccacagcaggccccgccgccgcaactacccgccggcctgcaggtacaggtgcggggcagcgtgcgcgaactggtgcaatcgctgtgcgagcgcctgcagcagcgcggtgcacaggccagcgtgtaccgggaggacagcgcagcaggcctgccatcgtccgccgtgctgctcgagctggtcctggacgaccctctgcccgcatgggcgggtggaccgcgcgtgatcgcctgccgcgaaggcggggtgcggccacggcaggtcgatggcgcctggcaggtcggcctgcatcgattcgacgcgatcgtgctggccctggccgcggccagcggccaaccgctggcggccagcgccgaagggcgcctgccggcgacgcgccatttcggcctgcaggtgctggtcgccgaggacaacccgatcaaccaggcgatcctgcgcgaccagctggaacagctcggctgccgcgccgtggtcgccagcgatggcaatgaagcgctgggctactggcaacaaggggcgttcgcgctggtgctgaccgacctgaacatgcccgggctggatggctacggcctggcccgtgccttgcgggcacggggtgtcagcgtgcccatccacggcgccacggccaatgccgacccggccgaacgccaacgctgccaggaatcggggatgcagggcgtgctggtcaagccgatcacgctggaagccctgcagcgcctgctgacccggatcaccgacggtgatgcaccggccgtcgcgatgcaggagcgcgctgcgtccactgcgtcgcacgacaaggatcccccgctgcaggttcccgcgaagatgcagtcgctgttcgtacagaccatgcaggccgacctggacagcctgcgccaggcgatcgccgctgccgatcccgccagggtggcgcaggttctgcaccgcatccgcggcgcgctggtgatcgtcggtgcacctgcgctggtggacagcggcctgcagatcgaacagtgccttgccggcggcgatgacctggccacccaggcggccgctcttgccgggttccagcgacgcctcgagcagctgctgcatccgttgcgcgacgctgcatccccctcccttcccgacgacccgaccctgccatga

SEQ ID NO: 496010 - DNA, 642 bp, Stenotrophomonas maltophilia
atgaccacacggatcctcatcgccgacgaccacccgatcgtgcttgccggcatccgcgacgtactggccggggaactggacctggacatcgtgggcgaagcggccgatccggcgacgctgatcgagctgatgacccggacccggccacaggcggtgatcaccgactacagcatgccgggaggcgatcgcttcggggacggcatcaagctgatctcgttcctgcgccgcagcttcccggagacgcgcctgctggtgctgacgatggtgtccaatccgtcgttggtcgcggcgatgtatgccgccggcgccggtggcgtggtgctcaagagccatggattgggcagcctggtacaggccctgcgcgtggtgctggccgatcgcgtctaccgccccccgggactgctgccggtagccgcgagcgaaccggccgatgcggatgcggtccgtgcgcggctgtcgccgcgcgagctggaggtgatccgcctgttcaccagtggcatgagcgtgggcgacatcgcacgccagctgcagcgcagcgccaagacggtcagcacgcagaagatcagcgcgatgcgcaagctcggtgtggacagcgaccaggcgctgatcgagtactgcctgcaggcctcgctgttcggctga

SEQ ID NO: 496011 - DNA, 3309 bp, Stenotrophomonas maltophilia
atgaacgcctcccccacacggcacggccgtgcgtacgggcgcgcgcacggaaagcgcgtacccctcattcccagcctgttggccactgcgctgtgggcagccctgccggcgcatgccgcagacctcaccggcccgctgctggtcaacgacggtgacaccctgcagctgggtgccgacgacgtcctcacccacagtgcgggcagcttcgcacttgcggtcaccggtaccggcagcaatgcgctgatcgacggcagccgcatccacgtgaccggcaatggcagcggcgtgtccgctgccaatggtggccaggtgcagctgcgcgacgcaacgctgtcgatcgcaccggcgaccggcacgggcttctatgcgctgtatgccaatggtgccggcagcgtgatcgatgcgcgcgatgtcgacatcgatgccacgcgcaacggcagcggattcggcagcgtgcaggcctacaacggtggcgtgatccactatgccgggggcagtctttcaatgaccgggaccggtggcacgctggccggtgcatccggcaagggcagcgagctgcacctggccgatctgcggatgagcgccgacggcggtgcccgcctgcgcgccgacagtgccggcctgctgacgatccgcaacagccgcatcaccctcgcccccggtggcatccttgccggcgtggcggccaacggcgtgggcagccgcgccgagctgtacgacacctacctgcagggcggttggttcgatatcgacagcggcggcagcctgctgctggagaacgtggaagcccattcggtgggcggcagcatgcgcctgctcggcagccgtatcagcaagacctattccagtgcagtgatcaacggcggcagcttctacaccgtcggtggctatggcgtgaacatcaacagctggggacagttgaccgcaagcgatgccgcgttcgatgttcgtgatggctactccggattctggctggccagcgatgagtcgcgcctgcagctgaccgacagcagcatcgacacctggaccgacacctacggttatggcgttgagatcgccggcggagttgccaccgtgcagggcggccggatcaccacgcacggtgatgcgacctacggcgtgcgcgtgaccggctccaccggcagcaccgccagccgcatcgaagccaacggcagcgtgatcgacgtgcgcggcaacggcggcggtggcgtgttcatcggcggctccaccgccaccgcgctgctcgatgccgttgcgatccgcagcgatggcgagaacgtgttcggcatcgtgcacatgaacaccgcgcggctgacccaggccgatcgcctggatatccgcatgaccggcagcaacagcggcggctaccgctcctacctgaccgcgttcggcccgtactggaaccgtgccaccttcaatgacagccacatagagaccgccagcggcgcagcgttctggctgcagggcagcaaccatgccttgaacgtcaatggcagcgatgtgactgcgggcgacggcagcggccgcctgctgcgggtcagcgacacggtattcaccgatggcagcagcgtggcgaccagccgcatcgacttcagcgccgacgccagcatgctgcgcggtgacgtggtggtcgacagcgcaacggctgaggtgcacatggtgctgggcaacggcaccacgttcagcggcgccctgcgcaacgactccggctaccaggtcgcacaactggcgctggatggcagcagccagtggaacgtacgcgccagttccagcgtcggcacgctcgaacacgccggcaccatcgctttcgatgcgccggcggccggcgatttcaagaccgttaccgtcagcggcgactacgtgggcaacggtggccagtggatcttcaaccgcgcgctgggcgacgacacttcgctgggcgaccagctggtgatcaacggcaacagcagcggcaccgccagcgtgagtgtgcgcaatgccggcggcgccggtgcgctgacccaggagggcatccgcctgatcaccgtggccggccagtcggatgcacaattcagcctgcaggggcgcgcggttgccggtgcctacgactacttcctgttcaagggcggtgtgtcgaccccggacgatggcaactggtacctgcgctcggaatacgtgccgccggtcgatccgccgcagccgccggatcccccgatcgacccgccgcagccgccggatccgccggtcgacccgccgcagccgccggaaccgccggtcgacccaccgtcaccgccggagccgccgatcgatccgccgttgccgccggagccgccgatcgatccaccattgccgccggagccgccgatcgatccgccgcgcccgcaggtggaacgcccggaaccggcggcctacccggccaaccgcagcgccgcactgggcatgttccggcacagcctgcacgaccgcgccggtgatcccgccgccgtggccagtgccagcggcgatgccgtggcctggatgcaccttcgcagcgcgcagcccgacagccacgaccgcaaccgccaggtccaggtcgatgggcagatcagcagcatgctggtcggcgtcggccgccgcttcgaagtgggtggcacgggcgagctgcaggccggtgcgatgctcggccacggccgcgcgcgcaatgacagccgctcgcaggtgaccggctacaccgcgcgtggcgtggtcaccggcaccagcgtgggtgcctatgctacctggctgcaggatgcgcacatgcaaggcggcgcctatgtggatggttggctgcaatacggccgcttccgcaacagcgtgcagggcgaaggcctgcagaaggagcgctatgacgcccgcaactggagtgcgtcggccgaggccggctatgtgctgcccctgcggcgcaccgcgcagcgcggcatttacctggaaccgcaggtgcaggtggtgcacagccgctatgacagcgaccgcgtggtcgaggccaacggcacggtagtcgaggaccgcggtggtggcgagaccagcacccgcctcggcctgcgcctgtacagccgtgggttgagcccggcgcagggccaggtgcacccgtacgtggcggtgaactggtggtccggcggcaatggtgcgggcctgacaatggacggcgagcgcctgcagcggcagttgccgcgtgacatctacgaagccaaggccggcgtgcaggtggatctgtccggcggctggcgcggctggggtgaactgagccggcagagcggtggcatgggcttccacgacgtcggtgcccagctgggcgtgtcgtacacctggtga

SEQ ID NO: 496012 - DNA, 1092 bp, Stenotrophomonas maltophilia
atgggtatcaaatgcggcatcgtcggcctgcccaacgtcggcaagtcgaccctgttcaatgcgctgaccaaggcgggcatcgccgcggcgaacttcccgttctgcaccatcgaaccgaacgtcggcatcgtgccggtgccggatccgcgcctgaacgagctggcgggcatcatcaacccgcagaaggtcatcccgaccgcggtcgagttcgtcgacatcgccggcctggtcgccggtgccgccagcggtgagggcctgggcaacaagttcctggcgcacatccgcgaagtcgatgcgatcacccacgtggtgcgctgcttcgagcacggtgacatcgtgcacgtggccggcaaggtcgacccgatcgcggacatcgaaaccatcgacaccgaactggcgctggccgacctggacagtgtcgagaaggcgctgaaccgtgccgagcgtgcggccaagggtggcgacaaggatgcggcggcgcgcaagccggtgctggccaagttgcaggctgcactgtcggagggcaaggctgggcgctcggccgggctggacgaggaagagaaggcgctggtgcgcgacctgttcctgctgaccctgaagccggtgatgtacatcgccaacgtgctggaagacggtttcgacaacaacccgcacctggaagccgtgcgtgcgcatgctgccgccgaaggcgcgcaggtggtgccggtgtcggccgcgatcgaagaagagctgtcccagctcgacgacgaagaccgcgataccttcctggcggacctgggcctgagcgagccgggcctgaaccgcgtgatcaacgcggcctacagcctgctcggcctgcagacctacttcaccgccggcgtgaaggaagtccgtgcgtggaccgtgcgcaagggcgccaccgctccgcaggctgccgccgtcatccacaccgacttcgagaagggcttcatccgcgccgaaaccatcgcgtatgacgacttcatcaagtacaagggcgaagccggcgccaaggaagccggtcgcctgcgcctggaaggcaaggagtaccgcgtgcaggaaggcgacatcctgcacttccgcttcaacgtctga

SEQ ID NO: 496013 - DNA, 621 bp, Stenotrophomonas maltophilia
atgaccgacccgcgtactccctgcaccgtgtgtggcgccatgatcctgctggcgacggcggcccggaacgatgggctctgcatgccgtgccggaatggtacgcggcagagcatggaagaggcgaaggtgcgaaacaaggaaatgcgcgaagagctggaccgatacgagaattccgctgcggggcgccactggaactggctggtggaacaggaaggcggctcgggctgtggattctcaggtctcctgacgccagatcagcgctacttcgcggtttcggtgacaagtagcgaagtctggcgtggcggcattggtacgtacttcgacagttactcgggtgcctattacgaagagacgctcgcaggtcttgaagaaatggggctggtcgaattgggagacgtgctgaaagaagccaagatggtgctgttcggtgacgacgccgtgcccaaggatgaaggtgtccggtgggagaaaatgtacggtcagcataatgagttgccggacggtgtcgaagctctgctgggccgcttgagccagagattttgtgagactgaggagaggctagagctttctactgcactgcagacctacgctgagaagcacaagctgtacgctgcgttctag

SEQ ID NO: 496014 - DNA, 579 bp, Stenotrophomonas maltophilia
atggcaggactgcgactgatcgtcggtctgggcaatcccggatcggaacacgcccggacccggcacaatgccgggtttcatttcgttgaggccctggcggaaaaagccggtgcgcgatggaatgtggacagcaagctgttcggcgagaccgccaaggtcgagatcgccgggcagacggtgtggctgctcaagcccgccaccttcatgaatctcagcggcaagtcggtcaccgccgcacagcggttctggaagatcgagccggaagaaaccctgctggcccacgacgagctggacctgccgcccggtgcggcgcgactgaagttcgacggtggccacggcggccagaacggcctgcgcgataccatccgcctgctgggtcatggcaaattccaccgcctgcgcgtgggcattggtcatcccggccacaaggaccgcgtggtgggttgggtgctggggcgcccgtccaaggaggatgacgtgctgatcgcacgcgccatcgacgatgcgatcgacgtgctgccgctggcggtgcagggcgatttcaacgaagcgatgaagcggctgcacaccccgcgctga

SEQ ID NO: 496015 - DNA, 618 bp, Stenotrophomonas maltophilia
atgtcgaagacccatgaaatcaaggtcaccaagcgtgaactgcagcgtaagggtgcgagccgccgcctgcgtcacgctggtgtgatcccggccatcgtgtacggcggcaacgccgagccggtcgccatcagcctggaccacaacgaaatctggctggcccagcagaacgagtggttctatgcctcgatcctggacctgaacctggatggccaggtgcagaaggtcctgctgcgtgacatgcagcgccacccgtacaagcagctgatcatgcacctggacttccagcgcgtgaacgagaacgaagccctgaccgcttcggtcccgctgcacttcgtcaacgaagacacctcgccggccggcaaggctgccgacgtcgtggtcacccacgaactgaaggaagtgaccatcacctgcctgccgaaggacctgccggagtcgatcgaagtcgacctgggcgagctgaaggccggtgacgtcgtgtacctgtccaacatcaagctgccgaagggcgtggaaatcccggcgctggcgctgggcaaggaccacgacgacgccatcgtcaccgccaaggccggcaaggccgacgaggctgacgaagaagcggctgccgccgagtaa

SEQ ID NO: 496016 - DNA, 963 bp, Stenotrophomonas maltophilia
atgatgcaagagtccccgaacctgctggtcttttccggcaacgccaacaaacgtctggcgcagaacatctgcaaggaactgggggtccgcccgggcaaggcgttggtgtcgcacttctccgatggtgaagtgcaggtggaaatcgaagagaacgtccgcaagcaggacgtgttcgtgatccagccgacctgcgcgccgagcgcggaaaacctgatggaactgctggtgctgatcgacgcgctcaagcgcgcatcggtggccagcgtgaccgccgtggtgccgtacttcggctactcgcgccaggaccgccgcatgcgttcctcgcgcgtgccgatcaccgccaagctggcggccaagatgttcagcaccgctggcgctgatcgcgtgctgaccgtcgacctgcacgccgaccagatccagggcttcttcgatattccggtggacaacgtgtatgcgtccccgctgctgctggccgacatctggcgcgcctacggcaccgagaacctgattgttgtctcgccggacgtgggcggcgtggtccgcgcccgtgcggtggccaagcgcctggatgacgccgacctggcgatcatcgacaagcgccgcccgcgcgccaacgtctccaccgtgatgaacatcatcggtgacgtcgaaggcaagacctgcgtgatggtcgatgacatcgtcgataccgccggcaccctgtgcgccgctgccgctgccctgaaggcgcgcggtgcgctcaaggtcgccgcctactgcacccacgcggtgctgtcgggcccggcggtggacaacatcaccaattcccagctcgacgagctggtggtgaccgacaccatcccgctgaaggacgcagcgcgggtgtgcagcaagatccgccagctgagcgtggcggaaatgctggccgaaacgatgcgccgcatcgccttcggcgagtcggtcagctcgctgtacgtcgactga

SEQ ID NO: 496017 - DNA, 870 bp, Stenotrophomonas maltophilia
atgagcgccgggcgcgacgacgcgggctggtcctggtggccggccccggccaagctgaacctgttcctgcacatcactggccgccgggccgacggctaccacgagctgcagaccgtattccgcctgctggactggggcgaccgcatcggcctgcgcctgcgtgaagacggtcaggtgcgtcggcagggcgagggcctggccggcgtggccgaggccgatgacctggcggtgcgggccgcgcgcctgctccaggatgaggcgaagggcgcgcaaggtgctgacatcatcgtcgaaaagcacgttcctgccggtggtggcttcggcggcggttcgtccgatgcggccaccgtgctggtggtgctgaatcggctctggcgcgccggcctggacgaggatgccctggccgcgctggccctgcgcctgggcgccgacgtgccggtgttcgtgcgtggccacaacgcctgggccgaaggggtaggcgagcgcctgcagccgatcacgctggcgccggcctggtatgtggtggttgaaccgggtgttcatgttcctacgccggtcctgtttgcagacccggatttgacgcgcgacagcccagtggcgaaaatagaggacttcgcttccgggaccctggtcgggaacgcgttcgaaccggtgctgcgccgccgtgagcctgccgtcgatgcagcgcttgccgcgttgagcgacatcggcgcggcgcggctgaccggttcgggaagtggttgtttcgtcgagttcgcatcgcaggctgctgcagagcaggggcggtcgaagttgccgaaggagttgcgggcaagggtggcagcgggcgttgcgcgttcgccactgctggatgcactcgagcaacactga

SEQ ID NO: 496018 - DNA, 660 bp, Stenotrophomonas maltophilia
atgagtggttccctgatccggccgctgttgttggcggtcgtgaccctggcggtgagcgcctgtaccagtgtcggcacgcagaagaccccggcgccagcggtggtcgagattgtttcggctgaagcggcgcaggccgaggcagcgcgcgtggccgcgctgcaggcacagccggactgggccttccaggggcgggtggcggtcagcaagggcaaggacggcggcagcggtcgcatcgactggaagcaggacggccgccgctacgtggtcgaactgagcgcgccggtgacccggcagagctggaagctgaccggcgacacccattccgaagccggtcgcttggaagggctgtccggcggtccgcgcgatggcgaggacgcccagcagctgctgctggaagcgactggctgggacatcccggtcaatcagctgccggagtggatccgcggcctggtggccggggatgctgccggtccggaaaaggtcgagcgcgacggtgaaggccggccgcgccgcatgcagcagatgggctggcaggtgcagtacctggactggtacccggccgacgccggacgaccggcgctgccgcgacggatcgaggccagcaatggcgacgccaaggtgcgcctgctggtggaccagtgggggcagggcacgccatga

SEQ ID NO: 496019 - DNA, 1695 bp, Stenotrophomonas maltophilia
atgccgacgatgcccgcattgattcgcatccccagtgttctgctgctgtccctggcctgcgcccaggccctggcggcggtgccggccaaggcccccgtgcgggccgcggccactgaggaactggcgctggaaccggtgatggccggtgagttcgccctgcaggccggcaagctggccgaggccgcgcgctggtacctgcaggccgcgcagcagaccgacggcgacgccggcctggccgagcgcgcgacccgtatctccatgctggccaacgatgatgccagcgccgccaagggcctggccctgtggcagcagcgcgccccgcgctcgttgaccatgcgcagcgccgccggtgcgctggccatgcgccagggcgatgtgaaggctgcccgcaccgagctgcaggcgctgctggccgaccccgacgagcgcggctggaagttcgccctggccgcgctgatcggcggtggccgcgacccggcggtgccggcgcaggtgctcggcgagctggtcgatgccaatgcgattccgccgaagatcgaggcctggcaggagttcggtcgcctggccctgcgcatggacaagcccgagctggcgcggcgcatgatcgatgaagtggtcaagcgcttcccggaagaaccgcgcgtagcgttgctgcgtgccagccagctgcagcaggcgggcgagaccgacaaggcattgtcgctgctgcacgacgtcgagccgaagacccgccaggaccccgagctgcgcaatgcggtggccatcgcctacgacagcctgggccagccggctgcggccgagcgcgtgttggcgttcggcccgcaggacgtacagacctggggcatgcgcgcctcgctgctggccaagcagggcgacaaggcagcgctgtccaacctctacaacgagctgtcgcggcaggcggccaagccggatccggcgcagcgcctgttgctgggcaagatcgccgaataccttaagcgttaccccgaggcggtgcagtggtaccacagcgtgcccggtggcgatgagctgagcgaagcgcgcctgcgcgcggccaatgcccaggccctggccgggcgcctgccgctggcgctggaggaagtgcacgcgatccagtccgacgcggtggtcgtcgacgatgtgcgccgtgacgcctacctgctggaagccgaactgcgccagcgtggtgacgacagcgccggtgaactggatgcgctggcccgcggcctggccgcctacccggacgacaacggcctgctgtacgcacgtgcgctcacctgggagcgccgcgacgacatcccgcgcgccgaggccgacctgcgcaagatcctggtgaccgacccggaaaacgtgccggcgctgaacgcgctgggctacaccctggccgatcgcaccggccgcctgcaggaagcgctggagctgatcgaccgcgcccgcgtggccgagccggacaacgccgccatcgtcgacagctatggctgggtgctgtatcgcctgggccgcaaggaagaggcactggtacagctgcgccgggcctggaccctggccaaggacccggagatcgcttcccacgtcggcgaagtgctgtgggtgctgggcaagcatgacgaggcccgccacttcttcgacgaagcggccaagctcgaccctgaaaaccgcgcgctgctgcgcgcccgtgagaaattcaatccatga

SEQ ID NO: 496020 - DNA, 1284 bp, Stenotrophomonas maltophilia
atgaccctgtgggtgctcggactgaatcaccagaccgcaccggtggagctgcgcgagcgcgcggccttcgccggtgaggcgttgccgcgtgcgctgggctcgctgcgcgataccccgcagatcgccgaggcagtgctgctgtccacctgcaaccgcaccgaactgtatgccgtggccgagtcggcacaggcgctggaccagtggctgcacagccaggcaggcgacctgcagggctacctgtaccagcatgccgatgccgaggccgtgcgccacctgttccgggtcgccaccgggctggactcgatggtgctgggcgaaccgcagatcctcggccaggtaaaggatgcctggtcgaccgcgcgtgaccacggcctgctcggccagcgcctggaccgcctgttccagcagaccttctcggtagccaagcgtgcgcgcaccgatacccaggtcggcgccaacccggtgtcggtggcctcggcggcggtgcgcctggcgcagaacgccttcgcgcgcctggatgactccaccgtgctgctggtcggtgccggcgagaccatcgagctggctgcacgccacctgagtgagggcaaggtgcggcggctgctgatcgccaaccgcaccctcgcccacgcgcaggaactggccagccgccatggcggcgtggccctgccgctgaccgaactggaccgccatctcggcgaggccgacatcgtgttctcggccaccgccgcgcgcgaacctgtgatccatcgcgagatggtggccaaggcactgcgcgcgcgccggcacaagccgatgctgctgttcgacctggccgtgccgcgcgacatcgaagccgaggtcggcacgctcaacgacgccttcctctacaccgtcgatgacctggaacgcgcggtggaagacaaccgtcgtggccgccgcgaggccgccgccgaggccgaggcgatcatcgacctgcaggtgtcgcgtttcatcgagacccagcaggccagcgcccaccaggcaccgctgcggcagctgcgtgcgttcggcgaagcgacccgcgccgaactgctggagcgcgcacggcagcagctggccaacggcaagcccgccgacgaagtgctggaactgctggcccatggcctgaccaaccgcctgctgcatccgccgaccgccgctctgcgcgcggccgcgctgagtggcgatgccgacctgacccgcgctgccgagcgcctgttcccggccacgccgggttaccgccacccacccgtgagacccgatgacgccgaccctgcgccgtaa

SEQ ID NO: 496021 - DNA, 1083 bp, Stenotrophomonas maltophilia
atgacgccgaccctgcgccgtaagctggaagcgctggccgagcgccgcgaagaactggaacgcctgctcgccgaacccgatgtggtcgccgacaacacccgtttccgcgacctttcgcgcgaattcgcccaacttgaaccggtcgctgccgcgctcgccgaggaagcccgtgccaaggccgacctggccgccgccgaaggcatgcgcgccgaccccgacctgcgtgaactggcagacgaggaaatcgccgcggcgcaggcgcgcctgcaggaactggaacaagaactggccctgctgctggtaccacgcgatccgcgcgacgaaggtaacctgttcctggaagtacgcgccggcactggcggcgatgaagccgcgatcttcgccggcgatctgttccgcatgtacgcccgctatgccgagcgccagggctggaaggtcgagatcgaatcggacaaccccggtgagcatggcggctacaaggaagtagtagcgcgcgtggtcggccgtggtgcgttctcgcgcctgaagttcgaatcgggcacgcatcgcgtgcagcgcgtgccggccaccgaatcgcagggccgcatccacacttcggcggccaccgtggcgatcattcccgaggccgacgaggtcgatgacatcgtcatcaacccggccgacctgaaggtggatacgttccgctcgtccggtgccggcggccagcacgtcaacaagaccgaatcggccatccgcatcacccacgtgccgaccggcgtggtggtggagtgccagaccgagcgcagccagcacgccaaccgcgacaaggcgatgaagcgcctgaaggcgcagctgctcgatgccgagcgccagcgccaggacgccgcgcaggccgaatcgcggcgcctgcaggtcggcagcggcgaccgcagccagcgcatccgcacctacaacttcccgcagggccggatcaccgaccaccgcgtggaaggcctgaccctgtacgacctgcccaacatcctcgccggcgacctcgacccgctgctgcagcggctcagccacgaacaccaggtcgacgccctggcccagctttcggcgggctga

SEQ ID NO: 496022 - DNA, 1707 bp, Stenotrophomonas maltophilia
atgtcggcctggcagcagcgacagcaactgcagcaagcgatcgctcgccagcccgacgacttcgtcgcctgggtgatgctggccgacgtggaactggaagccggcgacatcgctgccggcgaacaggccgcgcgacgtgcgctgcagctgcgcccgaatcaccccgaagcgctggcacggctgggccgcgtggcgtggatggccggtgcacatggcgatgcggccaagctgcttggccaggcctcggcattggccccgcagcacccgggcatcgcgctgtggctgggccatgcgctggaagacgccgacgatgccgaaggcgcagcagcagcctatcgccgcgcgcatgcgctgatgccggatgaaccctacatcgccgcgcagcgcctggcgtggcagcgccgcctgtgcgactggcaggacgtggacacgctggctgcgcaggtacgcgccgcgctcgccgccggccacggtgcggtggaacccttcgccttcctcagcgaagacgccagcgcgggcgagcagttggcctgtgcacgtgcgcgcgccgcactgatcgccgcctcggtccggcccttgccggcagtgacggtacgcgcgcgcggcccgttgcgcgtcggcttcctttccaatggcttcggcgcccatcccaccgggctgctgaccgtggccctgctcgaacacctgcgtcatgacccggcgttgcagctgcacctgttcgcgctgaaccgcgccgatggcagcggcatccgcgaacgcctgcagtccgcgacccggctgcatgaggtggccgcactgcggcatgccgacatcgcggcccgcatccgcgcacagggcatcgacctgctgttcgacctgcgcggctggggcggcggcggcgcgcccgaagtgctggcgatgcgcccggccccgctgcagctgaactggctggcctaccccggcacctcgggcgcgcgatggctggacgccgtggtcgccgacgaattcgtactgccggcagcgctggaaccgcacttcagcgaacgcgtcctgcgccttccgcgggccttccagccctcggacaacacccgcacgctggagccgtcgccgtcccgcgccgagtgcgggctgcccgagcacggcgtggtgttctgctgcttcaacaacagctacaagctcaacccgcgcagcatgggccgcgccttcgcagtgttgcaggccgtgcccggcagcgtgctgtggctgctgtccggccccggccaggccgacgcccgcctgcgcaccgccgcgcaggctgccggcctggacccggcgcggctggtgttcatggccaagctgccgcatccgcagtacctggcccgctacccactggccgacctgttcctcgacacgcatccgtacaacgcgcacaccaccgcctccgatgcactgtgggccggctgcccggtgctgacctgcccgggcgacaccttcgccgcgcgcgtggccggcagcctcaaccaccatctggggttggcccggatgaatgtcgccgatgatgcggcgttcatcgccaccgccagcgcactgggcaatgaccccgcagcactggcctcgcttcgcgccgagctggtgcaggcgcgcgaatgcagtggcctgttcgacatggccgggtttgcccgcgacctgtcggccctgctgcagcggcttgccggtgaacacggctggcaaggtgtcgacaacacctga

SEQ ID NO: 496023 - DNA, 783 bp, Stenotrophomonas maltophilia
atggccaagctcaagcgcaaggactacgacgaactgctgctgccgctgcagctggaactgaccgcgatggcgcgctgggtgcagctcagcgggcaacgcctgctggtgctgttcgagggacgggatacggcaggcaagggcggcgcgatccaggccatcagccagcatctcaatccacgccaatgccgggtggtagcactgcccaagcctaccgaccgcgaagccacgcagtggtatttccagcgctatgcctcgcatcttcccgccgccggcgagatcgtgctgatggaccgcagctggtacaaccgcgcaggcgtcgagcgggtgatgggctattgcagcgaaaccgagtaccagcagttcctgcgccaggcaccggtgttcgagcagctgctggtggatgacggcatcctgctgttcaagtactggctgtgcgtggaccaggagcagcaggagaagcgcttcgccgaacgccacctcgatccgctgaagggctggaagctgtccccggtcgacctgaaatcgcgcagcaagtacagcgcctataccgaagcccgcgaggcgatgctgcgcgcgacgcatcgcgaggcggcgccgtggacgctggtggatttcaacgaccagcggctggggcgactgaccctggtgcgcaacctgctggaccggttgccggacacacgggtggatgcgccgttgccggagctgccgaagctgaagggcaagctgcatcgcgagcactacgatgtgctgaagccgatcgaggacttcccggtcgaagaatag

SEQ ID NO: 496024 - DNA, 408 bp, Stenotrophomonas maltophilia
atgcagcagtacctgcttctgatctacatcgagcctgccctgctgcaggccctgcccatcgaagaattcaacgcgctgatgcgcgactgcctggcccacgccgacaagctgcaggccgaaggcacgctgctggccgcgcagaaactgcagccggtcgacactgcacagaccctgcgcgtgcgtgatggcaacagccgtgttctcgatggcccgttcgccgaaacccgcgaactgctggccggcttcaacctgatcgtcgcccgcgaccgcgacgaagccatgcgcatcgcccgcgacttcccgtgggcgcgcttcggcagcatcgaagtgcggccgctggaagacatggacgccgagcgcgaacgctgcggcgccccggctgcggctatggcagcagccgtaccctga

SEQ ID NO: 496025 - DNA, 2082 bp, Stenotrophomonas maltophilia
atggcacggtggcaatggatggcggcaggcgtagcgttggcgacggtagtggcattggctgcgacctggtgggagacaccgctgcatacgctggctgaaccggcgggtccggctccgacgccgttggcgtggaccgcgcagatcgaaccgctggccggcgatggccacccgggtgaccgtgatggcgcgtccgcgcaggcacgcttcgccgatccgtacgcgttgctgcgcagtgccgatggcagcgtctatttcaccgatgccggcgacaacaaccggatccgtcgccgccttcccgatggccgcgttgaaacggtggccgggcagggcgagggacgtgtcgatggccctgcactgcaggccagtttcaacacgccttcgggcattgccgccgacgcgcagggcaacctgtatgtggccgacaccggcaaccatgcgatccgccgcatcagcaccgatggccaggtgaccacgctggccggtggcgaacagggccacgccgacggccctgccgcgcaggcccgcttcgatgcgccgatgggcatcgccgtggatgcgcagggccaggtttacgtggccgatacgttcaacgatcgcatccgggtgatcggtacggatggcagcgtgcgcaccctggccggtggtgatcggccgggccttgccgatggcgtgggcgccgctgcgcgcttcgatacgccggtggcgctggccttcgacgcgcagggcgcgttgctggtggccgacctgttcaacaacgccgtgcgccgggtgggtgccgatggtacggtcagcaccgtggtcgccgccggtggcgtgatcaatgggccgctgtcgttggccaccacccatgacggcgtgctgtacgtgggtgatctcgatggccgcatcgtgcaggtgacgccgcagggccatcagatcgcgctggtcggcaatggccgcctgccgcgcctggcccgccccagcggattggcgctggatgccgatggcagcgtgctggtggccgacgccgccagctaccgcctgcatcgcctgcgcccgctgccggtgggcgacctgccggcaccggcactggtcggcccggctgccgatgccgcgctgccgaagaccgggggccgttggccgctggcaccgcaggacggctggcacgaagtggtcggcaccctgggcgaggtgcgcggcaacttcaccggtgagagccgccaccacctgcatggcggcttcgacgtgcgcggtgatgtgggccagaccgtgctggcgatcgccgaaggcaagatcagcagcccggtggccgcctggaacctgggtgagcaggccgagggcctggtcgtggatcgcctcaagtacatccacatgcgggtcggccgcaccccgcgcgacgaaccctacgatgcgcgctggcaggcgctgtacgacgagcagggcaggctggagcggatgcgcgtgcgccgcggcatgcgcatccacgtcggtgaccgcctgggcagcatcaacaaccaggcgcacgtgcacctggcggtgggtaccggcggcttcgagaccaacgcggtggcgctgggcttccagggctacgccgaccacttcgcgccgcgcatcaccgatgtggccctgctggatgacaacgaccagccgatggcggcgggcggcgatggcgtggtgatggtggcgcgccagggccgcggcgtgcagatcgtggtcgaggcctgggaccaggtcgacaacaacctgccgcgccgccgcctgggcatgtaccaggtgggctaccagatcctcgacgccgatggccgagcgctgcagggctatgaacagccacgctggaacatcgtgttcaaccgcatgccgccgcagaaggaagcggtgcgggtggcctacgcccccgacagtggtatcaccgtgcacggcagcgcggtgacccggttccgctacctggccaccaacaccgtgcgcgacggcctgatggaaaccgggcgctggcagccggcggcgctgccgccgggcgagtacatcgtgcgcgccagcgtgcgcgactacagcggcaacgaaggcgtcggcccgcgcgagatcagggtacggctgctgccatag

SEQ ID NO: 496026 - DNA, 1521 bp, Stenotrophomonas maltophilia
atgccccgcgttctcccgctcaccgccctgctgctggccgcattggccagcacatccgccactgcttcgatcacggtggcgccgcagaagccgtcaatcaccgccgatgcgatgcatcaggcctatgccacgcgctgggatgaagccatccagcaggcgcgtggcggcaacacgctgggcgcgctgatcagcatggaacggctgatggaggatcccctgctggacgacttcgatgccgagcatcgtggccgcgcctcgcaggtcgctggctggaccgcactgatgcagaagaagccggccctggcccgccgctacctgcagcgggcgcaggaggccctgccggaggatgcacagatcctgcttacccaggtgtcggtggaactgtcggacaaccagccggccgcagccaccaccttcctggtgaaggcactgcagcatgccgacgcgccgctgccggtcgatcaccatgccatcaactacctgcagtaccgcctgcgtgaccagccgatgaagcgcatggacctgctgcaggcgctgtttgacaacggctggaaaagtgccggcctggaacccaccgggctgtggctgacactggccacgctgcaggccgacaatggccgtggcgacggcattccagccacgctggcccgcatcgacagcccggccgagatcatccgcctgcgcagcgacaagcgcttcgaccgttatgtcgatcgcggcgatgcgcgtttcgatccggtgcaggcggcgcagcgccacctcgatgaactgcgcgtctccggcctgctcgaccgtgcactggacgcgcgcatggccgagttcagcaccaccctgctcatgctggaccgcaacgaggaagtgctgtcgttgaccgagggcatggccggtgccgcgagcaacggcgaatcacctgccgccgccgaagcggaatgggtggcctggctgctcaacagccggctcaccgcactgcgccggctgggccgcaccgatgaggcactggccacggcgcaacaggcccaacgcatcggcgcgctcggcccggatggtgtcgagcatcagatgaatgtgggcttcgtcttcagttcgctggggcgcatgcaggacgctgcgcaggcagtgaatgacatgccgggcctcgccggctacggcaaggccgcgcaggcgctgctgcagttcgccgccgcccgcgagcgcggtgacgccaaggcgcgcgacgcagcacgcgcggtgatcctggcccagcgcgaggatgcccgcctgttccatcgcgaaatgctgctggaggaaggcaacctggacggtgccgccgccgtgctgatcgaacagctgcgctcgcccatcgaacgcggggaaaccctggccagcctgcaggacatgcgaacctatccgtcattgccgggcgatgtgcgcatcgatgccgcgtggcgtgcactcaagcagcgtgccgacgtgcaggccgaggtggcacgcgtcggccgcatcgagcgctacgacctggtcagcacctccacctcgcgctga

SEQ ID NO: 496027 - DNA, 777 bp, Stenotrophomonas maltophilia
atgtcccctcgccccgtcctgctcgcgctgttgctgctgcccagcctgtggcccgggctggccgccgcgcgcaccgtctaccgctgcgtgcagggcaacaccgtcagcctggccaccgcgccggagccgggatcgcggtgcacgccgaaggagatcgacgacaacgccgtccagaccccgaacctgtggggcaacatgggcgtgttcagcggcgtgctgtacgagcgcgaacaggacggggcgctggtctactccacgcgcaacctgcccggctcgcgggtgttcctgaagttcaccgtggccacgccgccaggcgagccggcgcacgaaggcctgggcaaggtcggcacgccgcagctggcgcagcacgccaggcagttcaaggccgcgtccagggccaccggcgtcgatgatgcctggctgcgtgccatcgcccacgccgaaagcaatttcgacgcgctggcggtatccagcaagggcgcacagggcgtgatgcagctgatgcccgaaaccgcgcaggaatacggggtgagcgatccgttctcgccgcagcagtcgatcgagggtggcgcgcgctacatgcgcgcgctgctgcgccgctacaacggcgaccgcccgttggcggcggccgcctacaacgcgggcatcggtgcggtcacccgctacaagggcgtgccgccctacgccgaaaccctggcctacgtggacaaggtaatggcgctgtacgcacgctaccgcgaagcgatgggcatccgcaccgaagtgccggcgcgctag

SEQ ID NO: 496028 - DNA, 1374 bp, Stenotrophomonas maltophilia
atgaccgagcccgcaacgccccccgagcacctgcgccgcagcctgtccaaccgccacctgcaactgatcgccatcggcggtgccatcggcaccggcctgttcatgggatcgggcaagaccatcagcctggccggcccctccatcgtcttcgtctacctgatcatcggcgcgatgctgttcttcgtgatgcgcgcgatgggcgaactgctactgtccaacctgcagtacaaatccttcatcgatttctccaccgacctgctcggcccgtgggccgggttcttctgtggatggacctactggttctgctggatcgtcaccgccatcgccgatgtgatcgccattgccgcctacgcgcagttctggttccccgggcttgaagcttggaaaccggcgctggcctgcgtgatgctgctgctggcattgaacctggtgacggtgaagctgttcggcgaaatggaattctggttcgcgctgatcaagatcgtggcgatctgcgcgctgatcatcactggcgccgggctggtggcgtggggcttcacctcacccagcggccacaccgcgtcgctgtcgaacctgtggaatgacggcggcatgttcccgatggggctggtcggcttcttcgccggcttccagattgcggtgttcgccttcgtcggcatcgagctggtcggcaccaccgccgccgaaaccgccgaccccgagcgcaacctgcccaaggcgatcaactcgatcccggtgcgcatcatcatcttctacgtgctggcgctgatcgcgatcatggcggtcaccccgtggcgccaggtggtgccggacaagagcccgttcgtgcagctgttcgtgctggccggcattcccgccgccgccagcctgatcaacttcgtggtgctgacttcggccacgtcctcggccaacagcggcatcttctccaccagccgcatgctgtacggcctggccgaagagggccacgccccgcgcgggctgtcgaaactgtcgcgcgccgcagtgccggcccgtggcctgctgttctcgtgcctgtgcctgctgggcggcacgctgctgatctacctgattcccaacctggtgaccgccttcaccctggtgacgacgctggcgacggtgctgttcatcttcgtctggtcgctgatcctggtggcctacatggcctatcgtcgtcgctatccggagcgccatgctgcatcgatcttcaagatgcccggcggcgtcgcgatgtgctgggcctgcctggtgttcttcgccgccgtgctggtgctgctgagcctgcagggcgacacccgccaggcgctgatcgccagcccggcgtggttcgtgctgctgggcgtgggctattgggtgcgtcggaggaccgcgaagtga

SEQ ID NO: 496029 - DNA, 1617 bp, Stenotrophomonas maltophilia
atgagccggctgcgcgtcatcatcggcggcaccgccctggccctgctggccgctgcgctgccgatcgcggtcatggcctacgccacctgggaccgcgcgatcagcgtcgaacagcagcgcctgcgcgacatcgccgatcgcaccctgcgccgctccgacctgtcctaccaggaagcgctggcggcactgaaatcggccgaggccggcgcctacgtaccctgcagtcccgaacacatccggcgcatgcagaccctggtgatgaccaccccatcgatcgaccagatgggctacttcgaaggtggcaagctgcgctgcacctcgtggggtccgttcctgtccgatgtggatcaacccacgccggaccacgtcaccagcgacggcgcaggcattgcagtggatgtgcgcccggaaatcagcggccgccgccaggtgctggcggtcctgtatgggtcctacgacgcactggtggacccgcgccgcttcgtcgatgtcattgccgacccgaacgtgcggctggcgctggccagccccgatggacgcctgctggccaaacagcccggcctggatccggacctgctggaggcactgctgcgcgaccccggcgaaggcctggatcacgccacgctgttcgccaccgcgcgcaacgaggaatggctggccatcgccaccacgccgcgcaccgcgctggccgccgccttccgccagcaggcatggctgtacgtgccggtcggcctgctgctggccgccgccggggccggcctggtgatctggctgtcgcggcgccgcctgtcgctgcgcggtgagctcgccaccgccatccgccgccgcgagctgtacctgcattaccagccgatcatcgaactggacaccggcatctgcgtcggcgccgaggcgctggtgcgctggcaacgcccggatggcacccaggtgcggccggacctgttcattccgctggccgaagaggccggcatgatcgccgacgtcaccgacctggtgatcgagaacgtggtgcgcgacatgcgcgagctgctggtggccgaccgcagcgcgcacatcgcgatcaacctcgccgccgaagacatcagcagcggccgcgccctgaagatgatttcccggcacatggccggcagcggcatcctgccgcagcagatctggatggaggccaccgaacgtggcttcctcgacctggaccgcgcgcgcaccatgcttgccgccgcccgccgcgccggccacagcgtggcgatcgacgatttcggcgtcggcttctccagcctgcagtacctgcagcagctgccactggatgcgctgaagatcgacaagtcgttcatcgatgcgatcggcaccgaaagcgccaccagcccggtcacgccgcacatcatcgacatggccaaggagctgggcctgtgggtggtggccgagggcgtggaaaccgaagcgcagctggcctacctgcacagccggcatgtggaattcggccagggctggctgttctcgcggccgctgccgcgtgatgagttcgtcgccttccaccacaagcggcagcagcagtacggcgctgcacgcgagcacatgcagaacccgcgcagcgtgccgatcgagcgtgaagggatcgagtag

SEQ ID NO: 496030 - DNA, 1185 bp, Stenotrophomonas maltophilia
atgagcggccacgccatcgatgcggccagcccggccggtgaggccacgcgcttgccgtgggcgggcctgctggcgctggcaggcggcggcttcatcaccctgttgaccgagaccctgccggccggcgtgctgcgaccgatgggcgacagcctgggcgtgagtgatgcggcggtgggccagctggtgagcgtgtatgcgctgggctcggtgatggcagcactgccgatgacggcgttgacccagcgcctgccgcggcgtccgctcttgctggcggccatcgccggcttcgtggtggtcaacacgttgacggcgctgagcagcagctatgcgctgatccttgctgcgcgtttcctggccggcgtgagcggtggcctgctgtggtcactggtggctggctatgccgcacgcatggtggtgccgtcgctgcaggggcgcgcgatcgcggtggcgatggtgggatcgccgttggcgctgtcactgggcgtgccggccggtacgttgctgggccagcagctcggctggcgctgggcgttcgcgctgatgagcgtgctgggcgtgggcctgctggcgtacgcgcgctgggcactgccggcgctgccagcggccggtgccggtcaacgtgcgtcgctggccaaggtctggcgcatgccgggcgtgcgcagcgcgctgctggtgatggtgctgtacgttctggcgcacaacgtgctctacacctacatcgaaccgttggcggtggaggcgggtgccggcccgtggctggaccggctgctgctcgccttcggcgtggcggcgattgccggcatcggcattgctggttggggcgtggatcgccacctgcgtgcgctggtgtgggcggcggtgatcggcttcatcgtaccggtgctggccttgctggtatggcccggcgtggccagcacgctgctgctggcgacgatcctgtggggcgtggcgttcggcgcggtgccgaccctgttccagaccgccttggcacgacgcgccggggccgctgcggacctggcgcagtcgatgctggtgaccggctggaacctggccattgcggccggcggcgtggcgggcggcgtgctgctgcaggccagcggcccgagccagctgggatggttgccgctgctgttgctggcggtgaccgtcgcgtggttgctggcacggccgaaggcgtgggcgtaa

SEQ ID NO: 496031 - DNA, 1260 bp, Stenotrophomonas maltophilia
atgatgcccggagcggcaaccggctttttgcgccgcgccgtgctgcctaacgtggcgggcctctccccacggatcaccgcgatgaatgccgctctttccctcgaacctgcaccgatgctgccttcggtgcagcggctgctgcagcaggtccacccgacgcgcctggtcggtgcggtggtgctggtgtgcgagcacggcgtgctgcgccatgccagcgcgaccgggcaggccgatcgcgagtcggccctgccgatgcagcgcgatcagctgttccggctggcatcggtcagcaagccgctgttgagcacggtgatcctgcgcctggtggccgagggcgtgctcgacctcgatgcgccggtgcagcgctggctgccggacttccggccggcgctggccgatggccgcaggccgccgatcagcctgcgccagctgctcagccacagcagcgggctgggctaccgtttcctggaagccgatgcgcacggaccgtacgcccgggccggcgtcagcgatggcatggacgccaacccggtgtccctggccgagaacgtgcgccgtatcgcacaggcgccgctgctgttcgaaccgggcagccaatggctgtactcgttgggcgtggacgtggccggtgcagtggccgaagcggcgaccggtgaaacgctgcaggtgctgttccagcgtttgctggctgcccccctgggcctgcgcgataccgcgttcgccacgcgcgctgccgcacggctggccacgccctatgtgagcggcacgccgcagccgcatcgcctgcaggaaggggaggtggtcgcgccgttcgagggaacggtgggcatcgagtacagccttgcgcgtgccctcgatgccagccgtttcgcttcggccggcgccggcctggtgggtactgccgatgacgtgatgtcggtgctggaggcgctgcgtgacgtgcagcgctccggcctgctgccgcccgcgctggcggcagagatggccagcccgcaggtgggcgaatttgggccgccggaaccggccggctggggcttcgggctgggctttgcagtactgcgcgaggccgctgccagcggcacgccgcagcgcgaaggcacctggcgctggggcggcgcttatgggcacagctggttcgttgatccggcgcgtgggctgagcgtggtggcgctgaccaacaccctgtacgaaggcatggatggcgcctttgtcgatggcctgcgcgatgcggtctatgcagacctggaggctgcgcgatga

SEQ ID NO: 496032 - DNA, 900 bp, Stenotrophomonas maltophilia
atgtcagtcctggacaatctcgccaacctgcagaccttcgtgcacgccgccgacacgcgcagcttcgtcgagaccgggcgcctgcagggcatctccgcatctgccgccggcaagtgcgttgcccggctggagcatgcactgggcgtgcgcctgttccaccgcagcacgcgcagcatcacgctcaccgccgagggccagctgttcctggcgcgctgccggcgcatcctcgacgagcgcgatgccgcacgcaccgagctggcacaaccgcatgccacgcccagcggcacgctgcgcatcagcctgccgctggtcggcgatctcaccctgccgttgatggccgagttcatggcggcgtatccggacatccgcctcgacctggatttcagcgaccgcctggtcgatgtcatcgaggaaggcttcgatgcggtgctgcgcgtcggtgaacccagcgactcgcggatgaacgcacgccggctgggggtgttcccgcgccgtgtaatcgcctcgccgggctacctgcagcgccgcggggttccgcgcacgccggcggaactgatgcagcacacgctgctgcactatcgcttccccagcaccggcaagctggagccgtggccgatccactggcccgatgacgaagcaccgcaggaacttccggtgcacatggtggccaacaccatcgaggcgcgggtggcgctggcactgcgtgatgtcggcctggccttcgttccggtgcactcggtgcgcgatgcgctggccgacggccgcctggtcaccgtgctggaggatcatgtgcactcctgcggcaccttccacctgctgtggccctcgggccgccatgtgctgccgaagctgcgggtgttcatcgacttcgtcggcgcccgcctggacaccgtgccgtag

SEQ ID NO: 496033 - DNA, 1608 bp, Stenotrophomonas maltophilia
atgaccccgcattccctcacgctcgatcgcgtgtcgtatcgactggccgacggccgcccgctgttttccgatctgacgttttccttcgatccggtcgccacaggcctggtcggtgcgaatggcgctggcaagagcgtgctcgcacgcctgctcgccggccgggtgcagccagagaacgggcaggtacgcggcagcggccgcgtgttcctgttgccgacgcccggctatccacccgctggcacggtcggtgaactggccggcgttggcgctgaactggccgcactgcaacgcatcgaagccggcagcgtggacgaggccgacttcgcctgcgtcggcgaccgttgggacctgcgcgagcgcctgcagcagcaatggcaggcgctacggctgcccgacgacctcgatcccgcccaacccgccgcgcgcctcagcggtggccaggccatgcaggtggcgctgtccggcgcctgggccagcggcgctgattggctgatcctggacgaacccagcaaccacctcgatgcccgccatcgccagcagttgtacgaacggttgcagcagtggcgcggcggcctgctggtgatcagccatgatcgcgaactgctggcgcacatgcagcagatcgtcgagctcgacgcgcgcgggctgcatcgctatggcgggccgtggcagcactacgccgacgcgcgtgccgccgaacgcgaagcggccgcggcacagctcgaccacgcccgcacccagcaccggcagcagcagcgcagtgcgcgcgaacagcacgaacggcaacagcaacgccaggcacgtggcaatcgcgatgcaaagcaggccaaccaggcaccgatcctgctcggccggcagaaacaacgtgcagaggccagccacggccgcgcacagcaggtacaggccgagcgcctgcaggccagcgcagaccagctgcgcgctgcagcctcggcggttcacgccacaccggagctggcactgtttgccggcgagggggaacgcggcagcgcacgcctgctgcaggcggagtcgctggtgctgccgcatggctgccgcgcgccgttgcagctggacatccgccgcggccagcgcctcgccgtggttggtgacaacggcagtggcaagtccacgctgttgcgcgtgttggccggccagttgcctgcacgcagtggcaacgtacaacggcatgcaccactggcgctgctcgaccagcagctgctggggctctccggcgaacgcagcattctcgacaccgtgcaggctgccaacccggcggccaataccggtgaactgcgcacacggctggccctgctcgggctggacgcgcagcgcatccagcgtgcagcccatcacctcagcgatggcgaacgggtgaaaggcgcgctggccagcgtgctgtatgccgaccccgcaccgcagctgttgctgctggacgagcccggcaatgcgctggatctgggtgccctgcaggcgctggaagaacttctggtggcctggccgggcgcgttggtgatggtcagccacgaccggcatctgctgcaggcgttgcggccgacgcaggtgctgcaggtgagcaccgagggttggcagtggcgtgacgccttgtag

SEQ ID NO: 496034 - DNA, 1326 bp, Stenotrophomonas maltophilia
atgaacactgtttcccgcgccgaccgtcgccttccggtctccgtgctgtccggcttcctcggggccggcaagaccaccctgctcaaccagatcctgcgcaaccgcgagggcttgcgtgtggcggtcatcgtcaacgacatgagcgaggtcaacatcgatgcgcagctggtgcgcgagggcggcgccgaactgcgccgcaccgaagagacgctggtggagttcagcaatggctgcatctgctgcacgctgcgcgatgacctgctgcaggaagtgcggcgcctggccgatgcggggcgctatgactatctgctgatcgagtcgacgggcatcggtgagccgatgccggtggcggccaccttcgcggtacgcgacgagcagggcttcagcctgagtgacatcgcgcgcctggacacgatggtgacggtggtggatggcagcgcgttcctcgccgacttcggctcgacgctgcgcctggccgagcgtggccagcaggctgggccggatgacgatcgcggcgtggtcgacctgctgtgcgaacaggtcgagttcgccgacgtgatcgtggtcagcaaggtcgatcagaccgatgacgaagtgctgcaggacacgctggccgtgctgcgtggcctgaaccgcgacgcgaaactgctgctgtccagcttcggtgacgtgccgctggccgagctgctggacaccggtcgcttcgacttcgagcgtgcgcaacgtgcgccgggctgggtaaaggagctgcgtggcgagcacacgccggaaaccgaggagtacggcatcgccagtttcgtctaccgctcgcggcgaccgttccatcccgcgcgtttcgcccgcgcgttgcagtcgggcatgccgggcgtgatccgcagcaagggctggttctggctggccaaccgcatggattgggtgggcgagctgaacaccgtaggtgccgcgacgcggacgcaggcggcggggttctggtacgccgctcgcgatcgcgtgcgtgccgggctggaggacacgccgccgttgctgccgcccacgccgctgccgtacagcgacctgggctgggcgcggcagcaggccgattgctggagcgcaccgttgccggggctggaagacttcccggatgcggccgcgcactcggcgatgcaacgcctgtggcacccgttgtggggggatcgccgccaggagctggtggtgatcggcgtgcacatggatgagcgcgcagtgcgcgcagagctggatggctgcctgctcaacgaccaggagctgcgtgcgggcccgctgctgtggcatcagttgccgcaggcgttcccggtgtggaagcggtga

SEQ ID NO: 496035 - DNA, 372 bp, Stenotrophomonas maltophilia
atgaagtcgccttctgccgccctgcttgatgccggcgcggtcgccctgtccagcctgtgcctgctgcactgcctggcgctgcccctgcttgccgccacgctgccgctgttcggcacgtgggccgaagcggaatgggtgcatctgctgttcgtggccatcgccttgccgttgaccggctacgcgctgtggcgggccgagcgccgccatccgttgcccgtgctggcctgggccaccgccggcgccgggctcggcctgctgctggccggcgcgctggcgctgccctcgcacgactgggaaacaccgatgacggtcaccggcagcctgctgctggccgccacgcacatctggaacgcgcggcgccgccacgggtag

SEQ ID NO: 496036 - DNA, 285 bp, Stenotrophomonas maltophilia
atggctcatgtacacaagcatcgaaagcagttgctgacccgggtgcgccgcatcggcggccaggtggcggcgttggagcaggcgctggacaggccggagggtgaggccggcgactgtgcggacgtgctggtgcaggttgccgccgtgcgcggtgccgcccacagcctgctgatggagctgctgcacgagcacctgcaggaacacgtggtgggcgccgaagacccgcagcagcgggcggccgaggccgaggtgctggtcgagctgctgcgccgctacggcaaatga

SEQ ID NO: 496037 - DNA, 993 bp, Stenotrophomonas maltophilia
atgggggtatccactccaccgctggcccccatgcacctggacgcccttgccgccgcccgtcgccacgaacaccgcttcgacgacggcaacccgctggccgaacgcaatacccgccgcgccctgtggctcaccgtcagcatgatggtcgtggagatcgtcggcggctggtggttcaactccatggccgtgctcgccgacggctggcacatgagttcgcatgcgctggcgctcgggctctcggtgtttgcgtaccgctgcgcacgccgctacgcgcacgacccgcgcttcgccttcggcacctggaagatcgagatcctggccggctataccagcgccatcgccctgctcggcgtggccgcgctgatggccgtgcagtcgctggagcggctgtgggtaccagcaccgatccactacaacgaagccatcgccatcgcggcggtcgggctgggcgtgaacctgctgtgtgcctggtggctgcacgacagcccgggccacgcgcatcatcaccacggccatgaccacgggcatggccacgaacaccacgaccacgggcatgcgcacggtcacgacctcaacctgcgctcggcctacgtgcacgtgctggccgacgccgccacctcggtgctggccatcgtcgccctgctcggcggcaagctgcttggcctcacctggctggacccggtgatgggcctggtcggcgccgtactggtcacggtgtgggcggtcggcctgctgcgcgacagcggccgcatcctgctcgacgcgcagatggacgcgccggtggtggccgaagtacgcgaggtgatcgaacagggcccgtggccggcacgcctggccgacctgcacgtctggcaggtgggtcgcggcaagtacgcggtcagcgccagcgtggtcaccagtgacgccacgctggatgccgataccgtgcgcaacgcgctggccatccacgaagaactggtgcatgtaacggtggagatccaccgcagcgagtga

SEQ ID NO: 496038 - DNA, 285 bp, Stenotrophomonas maltophilia
atggcgcagggaaaggcaccgtggtgcggcgtggccagttggctggggattgctgtggggtggggcgcgggcaccgtggcggcgcaggcagcggtggcggcaggcggcaatggcatggccgctgggctgggcgtgggcgtgctgggcgcggccttggtgggcggcggcctggcagtggccgcgcgcgtgcgtggtgagcgctggccgtggatcggcatcagcggtgcggtgctgagcgcgctgccgctgctgatgtacctgctgcggatgatgctgaagctctag

SEQ ID NO: 496039 - DNA, 417 bp, Stenotrophomonas maltophilia
atgcgcacgctccgcctgctgctgcccggtgccctcctgctgctcaccgcctgcggcgacgatgcgcggcttcccttctccgccgacccattacaaggctgcttcgccaccggcgcgcgcaagcccgccgacttccgcatcgacaaggaaggcggccagtacttcgtttccttcagccgtggcgagcagtggcagcgcgaaccgaacgccctgcacaaggccacgtccagcgagatcagccgctactttcgcgacgacgccgaccagatcgacagtgccctgatccgcatgtccggcggcttcggcatcttccacttcaacaagggcgcgacactgaagggcaaggccagcgacagcgactacatggcgctgatgctgatcggggctgggccggtgtatgcggtgaagtgcgattga

SEQ ID NO: 496040 - DNA, 921 bp, Stenotrophomonas maltophilia
atggtggagcctagggcaggctcggctctacaacagctgcggtaccatgccctcccccgaaccgccccggtacccgccgtgccccattacaccggtcccctgctgacccgcgacagcgccgataccctgcgccgtgcccatgaaaaaggcgccgccgactggcagggctcgctcgacctcgggcgcagccaggacagcgtggcgctggacgcggacggcttccacttccggggccagccctatccctggccgggcaagctgaaggaccgcacgctgtactactgggatggcgaggacttcgcgccgatctcgcgctacagcggctcgctgatcaagctggtgccgaccgaatggggcgcaccgaccttcgagatcgacggcatcaagatgctgccgacctcgaagctgtcgccattcgaggatgcacgccgcaaggtggagctggtcgccccggccggcaaggtcatcctcgatacctgcggtggcctcggctacttcgccgcctgtgcgctggaagccggtgtcggccagatccgctcgttcgagaagaacgccgatgtgatgtggctgcgcacgctcaacccgtggtcgccggatccggactcggctgccgccggtggccgcctgcagttcagccacggtgacgtctcgcagcagatcgaacaggtggccagcaacagtgtcgacgcaatcctgcacgaccccccgcgcttcggcatcgccggcgagctgtactcacaggtgttctacgaccacctcgcccgcgtgatccgcaagggcggccgcctgttccactacaccggtgcgccgaacaagctgaccagcggccgcgacgtgccgcgcgaagtggccaagcgcctggaaaaggctggtttcaaggccgaactggcgcttgacggcgtgctggccgtcaagcgctga

SEQ ID NO: 496041 - DNA, 969 bp, Stenotrophomonas maltophilia
atgcgcttgttgctgcgtgcgttgccgttgttgctgtgttcgctggcggtacatgccgccgaggtggatcgccgtatcgcggtgaccatcgatgatctgccgtgggcacggctggaccagatcgtgccgccggacctgcaggcgcggcatgaggcgttgatggcccagctgcgtcaggcaggcgtgccggtggtcggcttcgtcaacgagaacaagcttgaggttgatggacaggtgcagccggcgcgggtacagatgctgcgcgactggcgcgatgccggctatgtgctgggcaaccacacctactcgcacatggatctgaatgcgaagggcctggcggcgttccagcaggatttcctgcgcggcgagacggtgctgcggccgctgctggccgagaaggggcaggcgccgcagtggatgcgccacccctacctgcgtgccgggcgcaccgcggatgagcgggtgcagatggatgcgttcttcaagcagcatggctaccgcgtggcaccggtgacggtggacaacggtgagtgggtgtgggcgttcgcctatgccaacgtgatgaacgagcaggcggactcgcccgcgcgcgcggcgacgctggcgcagctgcgcaagggctacgtgccgtacatgctgaacaagctggactactacgagaaacagtcgcaggcgctgctggggtacgcgctgccgcaggtgtggctgatgcacgccaatgagctcaacgcggccaccttcgccgaactggtggcggccacgaagcgccgcggctatcgcttcatttcgctggacgaggcgatgcgtgacccggcctacgcgcggggtgccgagggctacaacggccgctatggccctagctggctgcaccgctgggcgatggcggagaacaagccgaaggacttctacgccggcgagcccgaggtgccggcgtgggtgatgaagctggccaaggtcgattcggagtaa

SEQ ID NO: 496042 - DNA, 645 bp, Stenotrophomonas maltophilia
atgagcgccgccacttcccgaatccgccgcatctgtgggcaggggccgatcctgttgatgctccagtgggtcgcgctgctgtctgtggtgctggctgccggcttcttccattaccgcgtggagctgttgctggagccggtgacggtggcctgtgggggcccggacgcgcaggcgcgattgcaggttgccgaacaggtgatggcgcgtgcgggcgcactggatgactggcaacccctgggctggattccatgggtaggcctggtgctggccttgctgggggccatggcggtatgcgcaagccgtgcgctgtggctgcgcgatcggctgcgcacggcgaacgtggcgcttatggtgctccacggtggcgcactggctttggccggatgggtgctgcacctgtacgagaatgcgtggagcaatgtggcgcggctgtcacccacggcgtgcctggtggagctggtgtcggagggcgatgtaccgctggagcaggcgcagcgcgtggtgttccacatcctgacgcgggtgaacgcgccactgctgcgtaatccggatgatctggcgctggtgttgacggtgctgttgttggccgcgatggccggcggcgttgccctgtggcgtgcgatcgcgcgggcccgggcgggctga

SEQ ID NO: 496043 - DNA, 681 bp, Stenotrophomonas maltophilia
atggtgatgctgtatctggtggtacgaacgctgctgccactgctggcgttcgtgctcgcatggtggctgctctcgcgcctgatcaatgcgcgcgtcgcccggatgccacgcgtcccgttgaacctgccggagcacagcagcagcccccgcaggaaggatcgacgcatctacgcgcgcaagctgcggcgcaagccgggcctgcgcacggcaacccgcgccgccaccgcaccccgcagctggcacgtcgccgcggccatcctctcgctgatggcgctgatcgccaccgtgctggtcatccccgatggcgcacgcttgcaggtgatggtggacaatctcaccggttatgcgggaaccgtcgtcgaggcgcaggttcccgtggccgcacagcccgtcgtgctggaggcatggcaacccgcgctcgcacagctggggcggcccacggcgatgcgctacccgatcggtcgctccggcggtgagcatgaagcccatgcggtcgtgcccgtgcaggtccggcagcagggcgaccgcctgcaggtggccatcgcgctgccgttggacaccgaaatgctgcgtgcggaactggcacggctggccgggttgccaatcgaggccattgacgtacagcaacgcgaggttgcgccatggagggagtcgggctggcagccactgcccggcccttag

SEQ ID NO: 496044 - DNA, 174 bp, Stenotrophomonas maltophilia
atgcgccagaccagaacacccccgtggaagaagcccaaccccaagggccagacatcgcaaccgctatcggatgcgcagaaggcggcggcacggcaacgtgccgaggagaacgggcggcgctatcccaacctggtcgacaacatgtgggcggcgaagctgccgcgtgggtcgtga

SEQ ID NO: 496045 - DNA, 813 bp, Stenotrophomonas maltophilia
atgcctgcttcccgcatccgcctgcatgttgaagataccggtggcgacggccgcccggtgatcctgatccacggctggccgttgtccgccgatgcctggaagacccaggttgcgatcctgcgcgatgcccagtatcgggtcatcagctacgaccggcgcggctttggccgctctgacaagccgaccggcggctatgactacgacaccctggcggcagacctggcgggggtgatcgaggaacgtgacctgcgcgatgtcaccctggtcggtttctcgatgggcggtggcgaggtggcgcgctacgtggccaaccacggccaggatcgcctgcacagtgtggtgttcgctgcggcggtgccgccgttcctgctgcgcagtgacgacaacccggaggggccgctgacccaggacaaggccgatgaaatgcgcagcggattggagaaggaccgcgaggcgttcttcgacggcttcacccgcgacttcttcagcgccaatggccagttgatggtgaccgaagagacgcgccaggcggcgatcgcactgtgccatcaatccgaccaggcagcggcgctgggctgcatgaaggcgttcgccaccactgatttccgggatgacctgaagaagatcacggtgccgacgctgatcctgcacggtgacagcgatgccatcgtgccgttcgagggttccggccagcgtacccacaaggccatcaaaggtagcgaagtggtgatcctggaaggcgcgccacatggctgcaacaccagccacgccgaccgcttcaatctggccctgctgaacttcctgaagcgctaa

SEQ ID NO: 496046 - DNA, 480 bp, Stenotrophomonas maltophilia
atgctgctgctcaccctgcccttgctggccgccggcctcgccaccgcaccgtcgcccgccgatgacctgcgcgaacagatccgccaggccgatacccagctgtttgctgtggccttcgaggcctgcgacgccgaaaaggccgccgcgatgaccaccgaagacatggagttcttccatgacaaggacggcaagtcggccagcaaccgcgaggatttccgccgcagcgtggccaacctgtgcgacaacgcgcgcaaggacggctggcgcctgcggcgcgagctggtggactcctcgctgcaggtattcccgctgcacgacgagcgggcgctggaaatcggcgaccaccgcttccacgagcgcggcaaggacggcgtggagcactgggtcggccaggcccgtttcatccaggtctggcgccgcgtggacgggcactggctggccgaacgggtgatcagctatgaccaccggccggcggactga

SEQ ID NO: 496047 - DNA, 417 bp, Stenotrophomonas maltophilia
atggcagagatcacccccaaccaccccgactacggcctcaaccagcaggtccgccagggcgtggccgcactggacgcccagcatggacgtccgttcgaccagaccagcgaacgcctgaccgccagcctgactgtgctggcccgcgagcagggcctgcagcaggtcgaccacgtgctggtcagcaacgccacggcccagcacccggccgggcacaacgtcttcgtggtgcagggcgacccggccaatccggcgcacctgcgcgcgatgatgccgacggctgtggcgatacagacgccggtggagcagtcgatgcagaaattggggttggccccgcagcagccggccgtggggttagtgcccgaacagcaggcccgtgagcaggagcagcagcagaacccggcacaccgtctgggctga

SEQ ID NO: 496048 - DNA, 576 bp, Stenotrophomonas maltophilia
atgctgggtatccaccgctggctgcgcgccggcctgatcttcacgctggtgggtgcactcggcgcctgcagcagccgcataccggatgcaccggagccgctggatctggtcaagccgatcaacgtgaccgagcccagccaagcggtgcggttcgagttcgagacgaatgcccgcagtttctatccggggcgaccctatgtgctggatcttgaggtgcagcgacatgctcccgggcctgacagtgggcttgacatggacactgttcatgttcccttccagctgtccctgcagcgctgggtcgcaggtgcctggcaggacgttgcaacgtctgatgtctatcaggcaagggcgcgcaatctgggtcagccgctccccgaatggcatgcatcggcagcctggcgctacgcgcatcaggtatcgatggacgccagccgatacaggttgaacatcgtcaccctgccgatggaaaccgatgcccgctaccgcctcgatgtgcgcacggtgcagcccaccctcttgctccagcattacccggcacagctgcgggtccacgcggaccctctgtcgggaaaatga

SEQ ID NO: 496049 - DNA, 576 bp, Stenotrophomonas maltophilia
atgctgggtatccgccgctggctgcgcgtcggcctggtcttcacgctggtgggtgcactcggcgcctgcagcagccgcgtaccggatgcgccggagccgctggatctggtcaagccgatcaacgtgacccggtctggccaagcggtgcggttcgagttcgagacgaatgcccgcaacttccacccgggtcgcacgtatgcgctggagctggagttgcagcgccaagagacgcgaaagcccgacgagcctgacgtgggcacaatgcggatcccgttcgaggtgatcctgcagcaatggggtgctgatgcctggaaggatgttcccacctacgacagctatcaagccggggtgctcaatgctggtgagcagcttccggaatggcatgcatccagcgaatggcggtatacgtcgccgcacgtgggcagtgatggccagtacacgctgagcctggttgctctgccactggaaattgactcccgctaccgcgtggacgtgcgcacggtgcagaggaccgaggcactgcaggattactcggcccgtttgcggatccatgccgcccgtcccgccggaaagtaa

SEQ ID NO: 496050 - DNA, 1146 bp, Stenotrophomonas maltophilia
atgttccgtaatcctctcttccgctcggccgccctggcccttgctgtatcgctcagcctcggcgtgccttcggcgttcgccgataacgcgcccgccgccagcgccaccaccgccgtgcagcgccaggccgtggccaagggcctgtacgagctggcctatagcccgaaacagaacgccgtgttcgtggcctcctccggcggcttcggcgatgacgccggcccggcccaggtgctgcgcctgaacccggccacgctggccgtggaaacccgtatcccgctggagcgcaaggcgttcggtgtggtgctggatgacgctcacaaccgcctgtacgtaggcaacaccgtggacctgtcggtgaccgtggtcgacaccgcgcagaacaaggctgtcggcaccatccagctgatggagaagaagaccggcaaggatggcaaggccggctacacccacgacctgcgcgagctggtggtcgacagcgcggccaaccgcctgtacgtgaccggccacagcagccagccggacgtgagcagcgtgctgttcgtgatcgatacgaacacgctgaaggtgatcaacaccatcgacggcctgggcaatgccaaggcaccgggcctggcgctggatgccgccaacaagcgcgtctacaccagcaacctgctggccgacctggtggtggtgggcaccgattcgaacaaggtggtggcgcagcacaagatcgccgccgagcagccgatgaacatcgcgctggacccggccggcaagcgcctgttcgtgaccgaccaaggctcggaattcctgcgtggctaccaggccaagagcagcggcctggtcagcaagcatccgggccagcgcgtgctggtgctggaccgcagtaccggcaaggaactggccagcatcccgaccgatgccggcccgctgggtatcctgctggatgcaccgcgcaagcgcctgtacgtgaccaaccgcgaagccggtacggtgaccgcatacaacagcgacagttaccagaaggtgggcacctacaaggtaccgacccacccgaacagcctggcgctggatgcgaagaacaacgtgctgttcgtgagcatcaagaacggcgagaaggatgacaagggcgctgacgagagcgtggcgcgcatccagctgtaa

SEQ ID NO: 496051 - DNA, 1014 bp, Stenotrophomonas maltophilia
atgcacaaggacgatgccgaacgctacagcgtaaccatccatctggcggcccccggcacgccgcgctacggccgtgatgccgagggaaacaggtttctgctggagccttcgttcgcggggcacatgttcctgtcgctgcgccgttcgggtgaagccttgccggagagcattggtttcacccacgcaggcaccaaggacgagccgaacaggggcaaagtcgatgacatggacgtgtcggtctacgacaagccccgcttcgagcgcacgatcgagatcagcaaggcgcagtacgaccgcatcctcgagttctcggcagacccgaagaagcacggcttcgacatgaactacgacttcttctccaacgcctgcaccgatttcgcctggggtgccctgaaccacgcaggcctgcgcccggtcgggctggccggggagatcaccaactacgagggcgccaccagggtcctggacaacatccgcgccgtcaacgccattccgcagcaggtgaagggcagcgagctggacagggtgcagtggaacccgatgccgaagcagacgttccgcgagtggatgttcaccgagaacggcgagcagtggcgcggcaacagcaccctcgcggcaagcggcacgcccgcagacccggcgcacggggatcatgcccgcctcaaccagatccaccagcaggtggccgacctcggtgctttcggtgcacgcaacggcaatgtcagtgccagcctgctcgcgctgtcgaaggagcagcagttctcgcgtgtagacgaagtggtgctgggcgagccacgcggtgataccgcgccgaagctgttcatcgtgcagggggacctcggtgacccggcacaccagcgcgccagcatgcctgcggagctggcagcgcaggcaccagtggaggcctcgttcgaacgggtcgcgcagttgcagcagaacccgccgcagcgcgatgtgcagcgcctgcaggaagagcagcaactgcaacagagccacggcccacggatggcatag

SEQ ID NO: 496052 - DNA, 636 bp, Stenotrophomonas maltophilia
atgacgcggccaccgcggcggggggccgtggtactggcggtgctgggcgcgctggcggcatgccgtgcgtcaccagcgcctgaggttgcgccgcccctgctgacgcgcgcacaggccgagtcccgcacggttgtgccgttcacgcgggccgtgcagttgcagaaggccggtcggattgccgaggtcacgtttgatttgccggcaccccagaagccggccattccgattctgaacatcgggttgcggctgcaggataccgacgcgcgacggctgctggatgcttcggagaagatcactctcggacgtttgccagcgcggctgcgcctggagcggattgatggcagctcggctcgtcatgtacagctctggcagcgtacccgcgatggacgcgactcgcagaagatcgccgatgatggcgtggtcacagacctgacgacggggagtgtggacatcagcagcttggccgaggccgggttgtactctgaagacgtgctctatcgcacgctgcagctggcgcaggtcggaggcattgcacccgggcgctacgttctgctggtcgaccttgtggaggatcgaccccagctggatggcctgaaagcagaattgatcgttggctaccaatcactaggaaagtag

SEQ ID NO: 496053 - DNA, 927 bp, Stenotrophomonas maltophilia
atggagcaggcaacacgctacaccgcaaccctttatctggccgcccccggcaccccgctgaaaagtggaggcgtctcgccgcgcggccatatgtacttccaagtggccgcgggcgacgaggcccacagttacggcttcgcaccgccgcgccaggcgccgggcgaaacccccaccggcgtgcagtacgcgcaggtgcgccacgacgatgccgatgagcatctggacccgtactacagccgtaccctggaaatcaccgaagagcactacggctgcctgcgtgacttcgccgaggaaccggccgagttcgaattcgacgttgatcgcccggccaccatcaaccgctgcagcgatttcgtctgggcggcgctgcactacgccggcctgcatccgctgccggcgccgctggatggcggcagcaacctgggcgagttcgcggtgttgttcaacctgccggaaatccagtgcattgccgcgccgttcccgggcagcgatctgaatgccgaaacccatcatgcgatgcccgagcgcgaggccgagcaccatcgccagggtgaccgcgccagcgatgagccgccgccgacgccgattgaagtggccggcacgctgctggacccttcgcatccagaccatcgcctgttctcgcagctgatccagaaagtggccgaactggatgccgcgcatggccgcccgttcgatgcggccagccagcgcatcagcgccagcctgctggtgctggccaagcagaacaatctctcgcgcgtggaccacgtgctgctcagccagccgaccaagagcagccatgcggcagagagcatcttcatcgtgcagggcgaccgcaacgaccccgggcaccgccgcgccagcatcgccactgaagtggcggccaagaccgatgtggccgattcgctgcggttgaaggagcaatga

SEQ ID NO: 496054 - DNA, 870 bp, Stenotrophomonas maltophilia
atgagcagagcaccggcttgccggcttgcctccttcgccctggtggccgtgctcagcaccaccgcctgcgcgaaggccccatccacggaaaaggacccgaacggaacccccatgtccgaaaccgcaaccagcccacgtacggtgggcggacagacctacacaatgcagccggtggaagctcggcttggcccgcaccgcttcatgttcccggccaacctctactacaaccagacgggccccttggccgatgggggcgtcatgctcactgtgttctggcctgatttcgatgcagcgcctcctggtgatcgcccggtgcgcagcacgcaggacagccggcggcaggtactggtcgagcttaggtacatcgatcgcgttcccatccagaactatctggcacgtcggtccagcagtgaggccaccagcgcgccggggtcgctggagcgaagagacccggtagagaatcttgcgctacgcgttgcacaacccgagcgatggggcctgacgccctattcgatcgacccatcgttgatggaagcctatgcgaaggagtcagaggctgcgctgggcaggccttacgtgcacaacccggggatggagccagactggtatgtggcccgctcggcggaggggcaactgacaacgttcatcagctgcgacccggcagatcgcattcctgacggacttgtagctcagggaaagacacttgaacgcgtcggagaaggccagatcgcaatgtgccgccattccatcgtggatgtgggcgacagcatcgccatcgagatgaactatgcacgcgtaatgctgagcgactggcagcgtctggaaaccagcgtgcgtgatcttctgagccgctatcgcgttcagccgtaa

SEQ ID NO: 496055 - DNA, 1326 bp, Stenotrophomonas maltophilia
atgagcggacttaccgataaggatattcgtgtcctgtcctcctacgcgaaggagggaaatcgcgagctgtattggaactatctcgcgcagcttcccgacaatgatggctatggactgctggcgttgggtgttgtgcgcaacgacagcctccccggccgggtggccaacagctttgcaaccgccgttgccgagcaacaggccacgctgttcggcaacgagaagaacgtagcgttcaccgaacgcaggcaggaaaccttcggccaggatctgatcagaaacgacctggcggagcgcagaagttgggtggaggccggcaggcccgatcttgctctcaacctgccctatacgagcacgctcaagtcccacgatgtttccttcgaagctaacaacctcaatgtgaactgctggacgccgcgcttgctgctggtgtccacggagcacaaacgcggcgagcaggcagccgaaaaggtatggcagaacatgctcgacaacagcgctgccggcgcattccgtgccggcaggacggcagtcagcgtgcacctggatatgccgcagcccgctgggcatttctacttcgttgagctgagcaagttcgagggcgcagcgctcctgcagcgcgacgccgtcgatccgaacgtgattggtaccaagttcgactaccacagctacgaccccaaggacggcagctggaaccacacagtgggcgttcccccgctggatagaacaaccaaagagaccgatcccgccgagatttccgcgttgaacgagacccgcgaagttcgcttggaacgcgagaccaaggcgaagcagtttcatcctgaagatccctacagagagatcgccaagagcccacgcgtggtatctacgcaggaacccgagcctctccatacggaaggacgccgcatcgcagcgatagcgccaggcagcccggactacgcgctccatcagcagatccgccagggcgtcgctgcactggacgagaagcacggccgccccttcgacgcgaccagtgagaacctcgccgccagcctgacagtgagggcacgcgagcagggtctggaacaggtggaccatgtggtgctgagcaacgccacggccaatcagccggcggggcacaccatctttgttgtacaaggcgagctatctgaccctgcccacctgcgtgcaggaatgcccactgccgtggctgcacaaacgccggtggctgagtcgctgcagcaactgactgtggtgggcgatcagcgcgagctcgcccgccaagatgagcagcaggcgctggatgcacgtgcgcaggaacagcaaagccacgccatgcgcatgggctga

SEQ ID NO: 496056 - DNA, 216 bp, Stenotrophomonas maltophilia
atgaccaagatcgaccctgcatggctggaagctttcgacaaggagcttctctacttgttcgccatcgatcatggcgacgcaggcatggatgagtacctgctgggctgttacgcagacctgccggcacgcgaagcggcgctggcgttcggcagcgactacgacctggagcgcgacgatgcgctgtggccacggccgggcgtggcgtcggaaagttaa

SEQ ID NO: 496057 - DNA, 369 bp, Stenotrophomonas maltophilia
atgaacacatcggacttccgttccctgcacgcgcaatacgatccggacaacgccgaacccgagcgcgaaccgtccgtcgatcccaacgccttcgtcgccacgctgcgccgtatcggatctggtgcggctgcggatggccagccttggccggaacggcatcaactgcctgggcgatgtcttcagttggcggatgcggattgcgcgttggcggggctgcgtgtggtggcggagctgatgctggctgcggagcggactaggcagaatggtgcgcccgaggagtacctgggggatcgggtgatggaggggttgaagatggcgtgtgtggcgttgactgcgcaggtggctgagcgattgcaggttcaccgataa

SEQ ID NO: 496058 - DNA, 948 bp, Stenotrophomonas maltophilia
atgggatcgaaatacagcataaatggatttattaatgcagccctgcggaggagtggcaagacgctccttgtagaagggatatccgaccggaatgttattctcaggctgcatgctgaaagggattgtgacgcagtatttacggttgatcaggccggcattcttgagggtgaatgctgtgctggaatgggtaataaagaaaaagtgaaggaagtggtaagagtggcgcagcagctcgcgaataatttgccgaggatcaatgatgtgctcgcggtgctgaaagatcgggaatgggatggattgcccccgggtgagttccgactttctaatgcttgggtcgcgcctgtccagggagccagagaattctccacgcaaggtcattctattgagaactacaattttcgacgggatcatgtcgtcgcctatttgaagatggcgtttagtgggtcactgaagaatggattcttctcattaattaatgatgaatttaaaaaaatccttgtagtctcctcgtgtctttcgcttgcactgcaggaggagggggttttatcaagggtaggggggttattgaggcacgagcactttgagcccaattcagatcgtgttgtgatcgccacttccttgatttcttcacttgaaagtcgaggatgtgccgaacctcgagcgaaaatgatcgtcgatcgtataaatgggcttgttgagaatcatgaggattccctcagcacaaatatctcaattcaatggcttcctcatggtcacgcgggagaggagtgtatctgggcgtgtataggtgcatacgctcgcctttcgggggttgatagtgtggtctgtaacagcattgtgagttttgggcgggatgagcggcaacgttatatggcaactttgttggctaaaacagtgcctgaggatattttccccctgcctgagatagtggaatggcttgcggcttag

SEQ ID NO: 496059 - DNA, 1431 bp, Stenotrophomonas maltophilia
atggaagagcgcaagtccactgctagtccgttgtttattcggcgcattgtcgttgaggggcttcatgggcaaatggatgtcgatatgacgctgggcccaggtctgaatgtcatctatggcaagaatggtcgtggcaagacgacaatgctgcaccttctggctaatcttcttgagctcgatttcaacagatttagatacatcaagtttcagcgaatctgcgtttggacgtctgcagatgacaaggtcgaaattgaaagggatgaggatagttcggcgatcagagtatctgttaacggggctttgaccggatcttctatagacgcgctatcgccgctagagctgacttctctcagaactgttctcggcggccgcgcgacatatcttccggctttccgctcggttctggagcgaacaaggcgagatggatatggtgttggcaggtacagtgaagcacgatctgaagaattggaatcgcttcagaaattggaattcatagccttgagggagggttccagagaaaatctgtccccccggcaggtgcacgaggaagcactctcctcggtagaaaaaacacttgtttgccgccagtggtttggcgaatttgttcctgttattcgctacccaagtatttcagatgtcgagacttccttaactgaagagtggcgccgcgcgcagtacgaaataactgccaaagagcagcgaatgttcgaggaaacattcgtaaaggtatttagagttagtgctgggctagaaagcactgaatccaaggattccaatgaaggtattcttcaggagatatccgatcttcttgaggctcaggaattggcttcgggtgtcgagaattccaaagaaataaatcaggaccttctgcggtccgcacgtcagcttggctcgtcacctcaaccctctggggtcaatagatatcttcttgatatttataggaaggcattgttggagcgagaggggactcgaagaaatgcgcttcgcaaaacgcgagagttcgagaattcagttaacaaattcttggatggaaaacagctgaagattggcaggaacattgaggaaaagcggccgacgaaaagacttgtttcaatttcgaccggggcaggtcattcatatggaatgaatgcgctctcctcgggtgagaggcaaattataacgatgctgtactgcgcgagccgtaccaagttcacgtctggaatgttcctgattgacgagccggagctttcgctccatatcgattggcagcgcataattctcaacgagttgacccgccaagcaccggatcgacaaattgtcgtgtgcactcactcgcctgaagttggggctgagcatttgttcgatgttcaagattttgagcctaatgcttctgcgcgaaagcagccttcactttttgacgatgttcagcctgatgacgtggatgaggcataa

SEQ ID NO: 496060 - DNA, 2688 bp, Stenotrophomonas maltophilia
atgaactggttgaacgaggtgctgaacaacgacccgaatcctgtggaaacccaggagtggatcgagtcgttgaaggccgttattgatgtcgagggctccgagcgcgcgcatcagctgctggaaggcatggtggaactgacccgtcgttcgggcgcctacctgccgttctctcccaccaccgaatacgtcaacaccatcgaaccgcagttcgaggccaagagcccgggcaacgccgagctggaatggcgcatccgttcgatcatccgctggaacgcgatggccaccgtggtgcgcgccaaccgcaagccgggtgacctgggcggccacatcgcctcgttcgcctccggcgccaccctgtacgacgtgggcttcaaccacttctggcgcgccccgagcgagaaccacccgggcgacctgctgttcatccagggccacagcgccccgggcatctacgcgcgttccttcctggaaggccgcatcagcgaagagcagctggacaagttccgcatggaagtggacggcggtggcctgtcctcgtacccgcacccgtggctgatgccggactactggcagaccccgaccgtgtcgatgggcctgggcccgctggccgccatctaccaggcgcagttcatgcgctacctggaaaaccgtggcctgatcgagaagtccgaccgcaaggtgtggtgcttcatcggcgacggcgagagcgacgagccggaaaccctgggtgccatcgccctggccggccgtgaaggcctggacaacctgatcttcgtggtgaactgcaacctgcagcgcctggacggcccggtgcgcggcaacggcaagatcatccaggaactggaaggcgtgttccgtggcggcggctggaacgtgatcaagctgctgtggggcggttactgggatgccctgctggccaaggacaccaacggcgtcctgaagaagctgatgatggaaaccgtcgacggcgaataccagaactgcaaggccttcggcggcgcgtacacccgcgagcatttcttcggcaagtacccggaaaccgctgcgatggtcgccggcctttccgacgacgacatctggcgcctgaaccgtggtggccacgacccgcacaaggtgtacgccgcctaccaccaggccgtgaacaccaagggcatgccgaccgtcatcctggccaagaccgtgaagggttacggcatgggcagcgccggtgaggcactgaacccgacccaccagaccaagaagctggacgacgaagcggtgcgccacttccgcgaccgcttcaacattccggtgaccgacgcgcagctggccgacggccaggtgccgttctaccacccgggcccggattcgccggaagtgcagtacctgcaggaacgccgtgccgcgctgggtggttacctgccgcagcgccgccgcaaggccgacaagaccttcgtggcgccgaagctggaagcctacgagcgcctgctgaagagcagcggcgagcgcagctactccaccaccatggccttcgtgcagagcctgaacatcaccctgcgtgacaaggaactgggcccgcacatcgtgccgatcgtggccgacgaagcccgtaccttcggcatggaaggcctgttccgtcagatcggcatctacgcgccgttcggccagaagtacaagccggtcgacgccgaccagctgatgttctaccgcgaagaccagagcggccaggtgctgcagcagggcatcagcgagccgggtgcgatcagctcgtggatggccgctggtaccagctactcggtcagcaacgtgccgatgctgccgttctacatctactacagcatgttcggcttccagcgcgtgggcgacatcgcctggcaggcagcggacatgcgtacccgcggcttcctgctgggtggcaccgccggccgcaccacgctgaacggtgaaggcctgcagcacgaagatggcttcagccatctggtggccggtggcattccgaacgtgcgcagctacgacccgacctttggcttcgaagtgacggtgatcctgcagcacggcaccaagcgcatgatggaagaccaggtggacgagtactactacgtcaccctgatgaacgagaactacacccacccggaaatgccggaaggtgcggccgaaggcatcgtcaagggcatgtacctgctgaccgacgccggcaagccgaagaagggcgagctgcgcgtgcagctgctgggttcgggcaccatcctgcgcgaagccattgctgctgccgagctgctggacaaggacttcggcgtgaccgccgatatctggagctgcccgagcttcaacgaactgcgtcgcgatggtttcgacgtggaacgtgccaaccgcctgcatccggaaggtgagcagcgcaaggcctacgtgaccgagctgctggaaggccgccagggcccggcgattgccgccaccgactacgtgcgtgcgtatgcggaccagatccgcgcgttcgtgccgatgtcgtacacggtgttgggtacggatgggtttggccgttcggatacgcgtgcgaacctgcgtcggttcttcgaggttgaccggtactacatcgcgcatgccgcgattgcggcgctggcgaaggaagggaagatgaccgcgaaggatgtggcccgggcgatcaagcagtacaagattgatccggagaaggctaatcctgttggggtttga

SEQ ID NO: 496061 - DNA, 561 bp, Stenotrophomonas maltophilia
atgagccgccccccttcccccagagcccgttccaccgatccggcggtgccccgccgcaacggccagccacgcgtgctgagccgcggtgacctgcgcctgctggtgctggccctgatcggcgagcagccgcgccatggctacgagctgatgcagctgatcagcaaccagttcatgcaggcctacacgcccagcgccggcaccatgtacccgctgctggccagcttcgaacaggctggctggatcgaggccgaggaagtggatggcaagcggatcttccgcatcaccgccgcaggcgagttcgagctgaaggtgcagcgcacccaggtgcgcctggcgcagcggcgtgccttcgaccgtgcccgcgagatcaccaaggcttcgctgccgccgacgctggccactgccctgcgcgaattcaagcgggcgctggtgcatcaccacggccgctgggccgagggcgaggcggacgaagtggcggcgctactgacgcgggcctcggccctgctcaacggtaccgccggtaacgagcaaccaccgatttcaacgacccagccagactga

SEQ ID NO: 496062 - DNA, 798 bp, Stenotrophomonas maltophilia
atgaccgaacacaacaacacgcgcctgcgcctggatgtgcgcttccgtgaactgaccgtgctgcgcaccgaagaagtcaccccgcacatgcgccgcgtggtgctgggtggcgacgatctgaccggcttcgattctcccggcgccgacgaccacatcaagctgttcttccccaacgccagcggcgagatggtgctgccggtgctgaccgccgaaggccgcagctatccggccggcaaggagccctcgccgtcgcgcgactacaccccgcgctggtgggaccacgaatccggcgagctggccatcgacttcgtgctgcacgaccagggtattgccgggccgtgggccgagcgcgcgcagccgggcgacacgctggtgatcggcggcccacgtggctcgttcgtggtggccgacagctacgacgcctacgtgctgatcggcgatgaaaccgcgctgccggccatcgcccgctggctggacgtgctgcccgacggtgccgaggtgcaggccttcattgaagtgcgcgacgaggccgaacgccaggacctgccgcagtacgagaacgtgcgcatccactggctggagcgcaacggcttcccggcggccagcagcacgctgctggaagacatgctgaccgacttcgaggccccggacggcgatgtcttctactggatcgccaccgaatcgcgccgcgcgcggatgatgcgcaagttcatcgaaggccacctgggcgtgccgcgcgactggatccgctcgaccggctactggaaggcccacccggacgaagccgacggcgattga

SEQ ID NO: 496063 - DNA, 831 bp, Stenotrophomonas maltophilia
atgcaggacgcgcagtactggttgaacgaattctggtcgggcctgagcgtgctcgatctgctgggcggcagtgtgctcggtacgctgcttggcctggtgctgggcatcctcggctggcgctggctgcacagccggggttggttgcagcggcgcaagcgctggcatcactggctgctggccggctacgtggtgctgctgccgctggccacggccttcttcgggctgcagctgggcttcaccgccggtgcgcaccgcgcgctgttcaagcagctcgatcatttccagccgcacctgcagaccctggtggaaggctggagcgaaggcttcaccgactcgctggacgacccgcgcatgcgcgaggcgttgcgcagccagggcacggtgggcgatgtggccgacaccattgcctctgcctacctcagcgaacatccgttgcccggcctggaccgtcttggcaacggcccgttggcgcgcggtaccggctgggtgatcggcaaggtgcgcgaaggcctgctgcgcggcatggtggaagacacgctggtggacaaggccggcaccctcggcctggaacccaaggtggtgcgcgaggcgctgaccatgcatgtggatgagctgctgcacacccgtggcgtgctgcggctggtgaaggcgcagatcaacggcatgatgcccggcgtgtacttcgggctgctgttgccgctgctggtcgtcgcactgctggtggcgctggagatctgggccgcgcagcggttcgggtggacgcggcagatggtagtgccggccgcggtccctcctgtagggccgagcccatgctcggctcatcgcgcgtag

SEQ ID NO: 496064 - DNA, 402 bp, Stenotrophomonas maltophilia
atggccaaactgaccctggccagcgtggatgcgctgcgtacccgctttgccgatgacgccgcctgcgatgcggcgctggccgccttcgccgacgccgctgacctgcgcgcgccgctgcgcgagctggtggcggcacagcaccgctacctgcaggccgaattcgaagtggcccaggtggccgacgtgctgcgccgcgaccagaagtacgcgccggtgggccggccttcgatcaacatcgtgcagctgcgcaagcaacaggccgcgaccaagcaggcggcgctgatcgcgcgccaggtggtggcgcaggccgcgcagacgttcgtgcgggtgagcgggctggcggtgaaggccaagcagagcccgagcgaagcatgtggggcgtggctgggcgcgttgcgctga

SEQ ID NO: 496065 - DNA, 708 bp, Stenotrophomonas maltophilia
atgagcgccacccgtaaactgctgctgccgctggccctgaccctggccatcgccgcctgctccaagccggccgacaccgctgccccggccgccgatgccgccgccccggccaccaccgagcaggccgccaccccggcggctgatgccgctgctgccgcgccggccgccgaagcgatcaagatcgcctcgggcacctacaagctggatccgagccacaccgacgtgctggcgcagtggagccactttggcttctccaacccgagcgcgcacttcggcaacgtcgaaggcaccctggtgtacaacgccgaagacgtgaccaagtccaccgtggaagtgaagcttccgctgagcggcctgaacagcttcaccgccaagttcgacgagcacctgaagagcgccgacttcttcgacgccgccaagttcgccgatgccaccttcaagagcaccaaggtggaagcggccggcaccaacaagctgaccgttaccggcgacctgaccatcaagggcatcaccaagccggtcaccctggacgtcaccgtcaacggcggcggcgagcacccgatggccaaggttccggccgccggcttcgatgccaccaccaccctgaagcgcagcgatttcggcgtcggcgcctacgctccgaacgtcagcgatgaagtgaagatccgcatcaccaccgaagccaccggcgaaaagccggccgcttga

SEQ ID NO: 496066 - DNA, 591 bp, Stenotrophomonas maltophilia
atgtcccacgcgctcgacgccgccgccctcgatcagctgttccgcacggcccgcacccagaacgccttcctcgacaagccggtccccgagagcctgctgaaggaactgtacgacctggtgaagtggggccccaccgcggccaacaccacgccggcccgcttcgtcttcgtcacctcgaaggaagccaaggacaagctggccccggcgctgtccgaaggcaacctggccaagaccatggccgcgccggtcaccgtcatcatcggtttcgacctggacttccacgagaagctgccgtacctgttcccgcacaccgatgccaaggcctggttcgacggcccgcaggaaggccgccacgaagccgccatccgcaacggcagcctgcagggcgcctacctgatcctggccgcgcgcgcgctgggcctggatgccggcccgatgtccggcttcgacccggccaaggtcgacgaagccttcttcgccggcacctccatcaagtcgaatttcctggtcaacctgggttacggtgatccggcgggcctgttcccgcgcctgccgcgcctgtcgttcgacgaagcggcgcgcatcgcgtaa

SEQ ID NO: 496067 - DNA, 960 bp, Stenotrophomonas maltophilia
atggtgaaacgatcgagcgcgccctggacggtcactgacggccgcgcgggcaatgtccgccaggcggttgcgctggcctcggcactgcgccagggcacccaccgaccgctgctgctgcaaccgcgcgcgccctggcgctggctgtcgccgcgccgcctgcccggcgatgtgaacggctacggcgaggccttcgcgacgctggctgccgacgccccggcgctggcgatcggctgtggccgccaggccgctggcgccctgcgcgtgctgcgcgcacgcggcacccaggtggtgcagatcctcgacccgcgcattggcgcgcgccactgggacgtggtggtggtgcccgaacacgacgccctgcgcggcagcaacgtgctcaccctgctcggcagcctcaacccggtggacgatgactggctggcctggggccgcgctgcgttcgccggcttcagcaccctgcccggcccgcgcacagcactgctggtcggtgggccgacgccgctggcgccttgggacgagacggcgatggtcggcgtgttccaggcgctggccgagcagatccgcagcgaaggcggcagcctgctggccaccacctcgcgacgcaccccaccggcgttggcggagatcctgcgcgcgaaattcgccgacctgccgcacgtgatctggggcgatggtggcgacggtaccaatccctatggcggcctgctcggctgggccaaccgcgtggtggtctcgcccgattcggtgaacctgctctcggaggcctgcgccacgcgcatgccggtgatggtggcgctggccgacacagcgcagggccgcttggcgcgcttccagcagcagctgcgcgaacgtgggcggttgcaggcgcactggctggactggcagtacgaccgcatcgaaccactgcgcgagaccgcgcgggtggcggcggaagtgaaacagcgcctggcatcacggtaa

SEQ ID NO: 496068 - DNA, 852 bp, Stenotrophomonas maltophilia
atggatcgtttttcccgcctgccccgcgccgcgctgctgatcgccagcctgctggcgaccgcaccggcctgggccaacagcaccgcctgccgcgagcgctaccccagcgtggcatcgcaggcggcgatgctggacgtggcctggaccaccgccgaacgcctggacgcgctgcccgatgtggacgtggtggtggccgcgcgcggtggccaggacctgagccgctatggcctgcgccacagccacctggccttcctgctgcgcgaggacgacggccgctggcgcgcgatgcacctgctcaaccgctgcaagaccgacagctcgcagctgtaccacgagggcctcggcaacttcgtcggcgagagcggcggccataccgacctgcgcatgggcgtgccgtcggcccccttgcgtgccgcactgcgcgcgatgctggtgccgccgtcgatccagcccaaggcgctgcacgaaaccaagtacaacgtggtcgcctacccgttcgccaccgactaccagaactccaaccagtgggtgctggaagtgctggcggcggcgatggcgcaggccgaaggcgcgccggccatcgtcaagcgcgaacaggcacagcagtggctgcgccagcagaagtaccagcccagcgtgctgcatatcggcctgggcaagcgcgtgggtgcgcgcctgttcgtggccaacgccaccaccaccgaccatccggccggcgaacgcatctccggcaactattcggtggtgacggtggaatcggtgttcgacttcctgcaccagcgcagccagctgcagcaggaactggtgatcccccatgtgccggtggccggtgccaccgccgcctcgccctga

SEQ ID NO: 496069 - DNA, 504 bp, Stenotrophomonas maltophilia
atgcgtctgctgcacaactccctggtatcgatgctgatcgtcaccgcgctggcctggtcatcggccgcccatgccgaacgccgcatcgtgatcatccatggcccgggcccgcagggaccgagcctggaaatgtccacgcagatggtggcctcggtccgcgccgccgcggcgaaggaagcccaggatgccgccgatgccggccagccgctggcccgcccgcagcagatcaagctgccgcagatggaggtgagcgcgattgccaccaccgtcgacggccgccgcgaagtgctgctgcgcgatgccaacgacccgcagaacaccgcatcgatgcagtacccgcgcggcatcggcgatcctgccgtgcagttcaccgtgggccagaccgtgaacttcgaaccgaccggcgcggaccagggctggcagttgaaggacaaccagggccgcccgttggaatacctgcccgaggccaccggcccgcgcgacatctttgacacccggcgctga

SEQ ID NO: 496070 - DNA, 516 bp, Stenotrophomonas maltophilia
atgttccgttgcctgcgcgctcccaccactgcattgctgctctcggcgctgctggtgcccaccgtccatgccggcgccgcgccgcagttgaacagcagcgaggccagcgtgatcgtgacctcattcgtggtgctgtcgctgccgatggcggcctcgatgggcctgtccgaactgtccaaggcgccgttcaaggccagcgaacgcaatgccagggcgacccgcaccaaggcggtgccgctgccgccaatggaagtgaagaaggtggagaccacgcccacgggcgaacgccaggtgcagttgcaggtaccggacaaggccgaccacaccgccaccctgcgctggccggtgcagccgccgggcgagaacccgactgcagccttcgtggtcgggcaacgggtgcatttcgaccccaccgaggccggtgccggctggaacgtgaagagcgcgcagggccagaccctggcctatgtgccgacggcctatgccgccggtgatgtgatgagtgaagcgctgtaa

SEQ ID NO: 496071 - DNA, 561 bp, Stenotrophomonas maltophilia
atgtccgtgcgtcctgcccctctgtttgccccgctgaccccgcgcgccctggtgctggcggtactggccatgggtgcagtggtgctgctgtccaacgtgctggtgcagtacccgatcaacgactggctgacctggggcgccttcagctatccggtcgcgttcctggtcagcaacctgatcaaccgccgcttcggcccgggcccggcgcgccgcgtggcgtggatcggtttcgcggtggcggtgctgctgtcgatctgggtggccaccccgcgcatcgccattgcctcgtgctcggcgttcatcgtggcccagctgctggacatcaccgtgttcgaccgcctgcgccgcggcagctggtggcgcgcaccgatggtggccaccacctgcagcgcgacggtggataccacccttttctggtcgatcgcgtttgccggttctaccttgccgtgggtgagctgggccgccggcgacctggcagtgaagctggcgatcggtatttgcctgctagccccgttccgcgcgctgctgtggaagatggcgccgctgcgcgccgccagctga

SEQ ID NO: 496072 - DNA, 2796 bp, Stenotrophomonas maltophilia
atgaccctcgccaccgctgacctgcccgccaccctgcagccccttgtcgaccgcgccctggcgcgcctggcccaggtcctgcccgagcctgttcctgccgagctgctgccgctgctgacccggctggcggtggccagcgacttcgcgctggacaccctggtgcggcaaccggcgctgctggcgcagctggccgcgcccggctgcccgccgatcccggcgccggtgctcgatccgctgcaacccagcgactggccggcacagctgcggcgctggcgcaccgcgatgtccacgcggctgatctggcgcgacctggccgggctggacgacgtggcgcagaccctggccggcgccaccaccctggccgaggattgcctgcggctggcgctggacgccctgcagcaggaattcgcacagcggcacggcgtggtccgcgatggcgcaggcgttccccaacagctggtggtattcggcctgggcaagctcggcggtggcgagctcaacttcagttccgatatcgacctggtctatgcatacccgcagggcggcgaatccgacggtccgcgcgcgctggccgccgaggagtatttcgcccgcctcggccagcgcctggccaagctgctggacgaaaccacggtcgatggcttcagccaccgcgtcgacctgcgcctgcgcccgttcggcagcgccggtcgcgtcgcgctgtcgttcgcggcgatggatcagtacttccagcgcgaaggccgcgactgggagcgctatgcgtggctgaaggcgcgcgcggtggccggcgacatcgacgccggcgaagcgtggttgcagaccctgcgcccattcgtataccgccgctacctggatttcaccgcgctcgacggcctgcgtgagatgaaggcggcgatcaccgccgaagtcgcgcgccgcgagctgcacgaagacatcaagcgcggcgccggtggcatccgcgaaatcgagttcctgtgccaggcgctgcagctgatccgcggtggccgcgagcccgcgctgcgcgagcgccgcctgctggtggcactggacgcgctggtggccgccggacagattgcgcccgacgatggcgctgcgctgcgcgaggcctacctgttcctgcgccggttggagaaccgcctgcagatgctgcgcgacgcgcagacccacgtgctgcccagcgacgcgctggaccgcgcgcgcattgccatcggcctcggctacccggattgggaggtactgcgcgcggccctggccgaacagcagcagcgggtcagcaccgaattcgccgcgctgctggccccgcgcaagggccaggccgcgcccgacgcgctggccaactactggcgcagcctgcccgagggcagcaacgcgccactgctggcggaagccggtttcctcgatgccaatggcgccgaccagtcgctgcgcgatttcgcccagggcaccggcgtgaagtccttgtccgacgccgcgcgtgcacggctggatcgcgtactgccggcgctgctgcatgcggccacgcgttcgccgcagcctgatgccgcgctcaagcgcgtgcttggcctgctgcaggcggtgctgcgccggaccagctatctcgcgctgctggacgaacaaccgagcgcgctggcgcgtctggtcgatgtgctggcgcgcagcgcgctgctggccgagcggctggtcgcgtatccgctgctgctggatgaactgctggatgtgcgcgtgtccgggccgatgcccgatgcggccggcatgctggccgaatgccagcaggtgctggcggtggaagatcccgaatcggcactgcgctggctcaacgagacgcggctggcgctcagtttccgcatggcgatggccacgctggacggccgccagggcgcggtggacagcacgcggcaactggccgaactggcgcaggcggtggtggtcaccgtgctggcgatggccgaggcggacatgcgcgccgcgcacggcgcgattcccggtggacgtttcgcgatcatcggctacggcagcctcggcgggcttgaactgggcttcggttccgacctggacctggtattcctgcacgacaacccggccggcgtggaggccagcgacggcccgcgtccgctggagccggggcgctggtatgcgcggctggcgcagaaggtgatggcgctgctcggtgcggtcaccgccgccggccgcctgtacgacatcgatgtgcgcctgcgcccggatggtggcaagggttcgctggtgtcttcgctggccagttacaccgaataccagcgcgaacgtgcgtggacctgggaacaccaggcgctggtgcgcgcgcgtggcgtggccggcgatgccagcctgctggccgatttcgagcaggtgcgtgcacagacgctggggcgtgagcgcgacatgggtgtgctgtatgccgacgtgctgaagatgcgtgggcgcatgcgcaccgaactggaccgcagcgacgccgcacggctggacctgaagcaaggtgctggcggcgtggtggacctggaattcctgctgcagaccggtgtgcttgcgcgcagtgcgcggcacgtggcgttgctgcagccgcgcgatacgccgtcgttgatcgacgcgttggctggtgctggtttcctgccggatgccactgcgcagacgctgcatggcgcgcacgccacgctgttggacgtgggcctggcctgcacgctggaccgccgcccgcggctggccccgaccacgccggcgattgaagaggcgtgtgcagcgattgcggcggcgtgcagagcggcagagctgccgttcgcctga

SEQ ID NO: 496073 - DNA, 1515 bp, Stenotrophomonas maltophilia
atgtctgttgatcgcatcgccaacgcgcgtcttcgtgaccgcgtggtctccgccgaggccgcagccgcgctgatccagcccggtgaaaccgtggccatgagcggctttaccggctccgggtatcccaaggccgttcccgtggaactggcccgccgcatcgaagcggtgcacgcccagggccagcccttccagatcaagctgatgaccggcgcctccaccgcgccggaactcgatggcgcgctggccaaggccgatggcatcgccatgcgcatgccgttccagagcgatccggatgcgcgcaaccgcatcaacgagggcaagctggattacatcgacatccacctcagccacgtcgcccagcacgtgtggttcggcttctacggcgagatcgataccgccgtgatcgaagtctcggccatccgcgaagatggctcgctggtgccctccacctcggtcggcaacaacaagacctggctggacctggccaagaaggtgatcgtcgaggtcaacgaatggcaaccggccggcgtcgacggcatgcacgacatctactacggcaccgcgctgccaccgcaccgcaagccgattccgctggtgaacgccaacgaccgcatcggcgacaccgcgctgcgctgcgacccggacaagatcgtggccgtggtgcgcaccaacggcccggaccgcaacagcccgttcagtccgatcgatgcgaccagcgaacagatcgcctcgcacctgatcgagttcctcaagcacgaggtgaagaagggccgcctgccgccgaacctgctgccgctgcagtcgggcgtgggcaacatccccaacgccgtgctggccggcctggccaagagtggtttccgcgacctggccgcgttcaccgaagtgatccaggacggcatgctcgacctgctgcgcgatggcgtgctgagctacgcctcgtgtaccggcttcgcgctgagcccgcaggccaacgagacgttcaaggagaacatcgatttctaccgcgagcgcatcatcatgcgcacgcaggagatctccaaccatccggaactggtgcgccgcctgggctgcatcggcatgaacggcatgatcgaggtggacatctacggcaacgtcaactcgacgcacgtgatgggcacgcggatcatgaacggcattggcggttcgggtgacttcgcccgcaacggtttcctgtcggcgttcctgagcccgtccactgccaagaacggcaccatctcggcgatcgtgccgatggccagccatgtcgaccacaccgagcacgacgtgtcggtgatcgtcaccgaacagggcctggccgacctgcgtggcctgaccccacgcaagcgcgcgcaggtgctgatcgacaactgcgcgcacccggatttccgccagcagctgcaggattacttcgaccgtgccagccgcgaaagctacggcaagcacaccccgcacctgttgcccgaagcactgtcgtggcaccagcgctggctggatacgggcacgatgaagggctga

SEQ ID NO: 496074 - DNA, 1365 bp, Stenotrophomonas maltophilia
atgagcgcctctttcgtttcgcctgatgtgatccgccgcctgttcgcgcaggccatgtcccgcatgtaccgcaccgaagtgccgctgtacggcacgctggtggaactggtggagcggatcaacgcgcaggtgcttgcccaggacccggcactggccgcgcagctgcagcgcaacgacgagcgtgcgcgcctggacgaagagcgccatggcgcgatccgcgtcggcaccgcgcaggagctggcgacgctgcgccgcctgttcgcggtgatgggcatgtacccggtcggctactacgacctgtcggtagccggcgtgccggtgcactccaccgcgttccgcccgctgaccggcgccgcgctggcgcagaatccgttccgcgtgttcacctcgctgctgcgcctggagctgatcgaagacgaaaccctgcgtgccgagtcggcgaagatcctggcacgccgccgcattttcaccgacggcgcactggcgctgatcgaccaggccgagcgtgacggtggcctgtcgcaggccgacgccgagcgcttcgtcgacgaagcactggaaaccttccgctggcacggcgatgccacggtcgatctgccgacctaccacgcgctgcacaatgcgcaccgcctggtggccgacgtggtcagtttccgtggcccgcacatcaaccacctgaccccgcgcacgctggacatcgacgcggcgcaggcggcaatgatcgagcacggcatggcggccaaggcggtgatcgaagggccgccgcgccgcgcctgcccgatcctgctgcgccagaccagcttcaaggcgctggaagaggccgtgcatttcccggatgcggacggtggcgatgccggcacccataccgcgcgcttcggcgagatcgaacaacgcggccttgcgctcaccccgaagggccgcgcgctgtacgaccagctgctgtcgcaggcacgcgatgccggtggcgaaggcagtaccggtggcgactacgggcagcgcctgcaggcggtgttcgccagcttcccggatgaccatgacacgctgcgccaggaaggattgggctactaccgctaccagctgaccgacgccggccgcgccgcgccggaacgcgtggccgatctgcctgccgaagtgctggtggccgccggcctggccacggccgatccgatcgtctacgaggatttcctgccggtcagtgccgcgggcatcttccagtcgaacctgggcggtgaagaacagcgcgcgtatgccgcgcacgccaaccgcgaggccttcgagcaggcgctgggcgtggcggtgaatgacgagttcgagatctacgagcggctgcaggctgagtcgctggcggcgctgcgcaccgcgtga

SEQ ID NO: 496075 - DNA, 489 bp, Stenotrophomonas maltophilia
atgaacgttcgactgcgcgcgctgttgttgtccctgctgctggcgccggccaccgtgccggcccagcagaccgccgagcgttcggctgcgtatgaggtggcaaccggcgacagctgggttgatgcccagttgcaggacatcaaccattacgccgaacgctaccccgatgccttcctcgatgaagtgtcgcgctacgccgatgtcccccgcggctacatcaatgcgctgttcaccacccatggctggcaggccggggatatctatttcgcctgcttctgggccaaggccagcggccagacctgccgcgacagcgtgcgcgccttcagccaggacccggagggcggctgggaagcggtggtgaagcgcatgccggccaagccggacaacctgcattaccgcgctgtgcggcatgccatcgtggccagctaccagcactgggaccggccgatcaccctggatgccaccctgaagcgccagttgaagcggtag

SEQ ID NO: 496076 - DNA, 753 bp, Stenotrophomonas maltophilia
atgaacacgtccacgcctgcgccgtcgcgcgccatcggcctggtcggttttgacggtgacgacacgctgtggaagagcgaggactactaccgcaaggccgagcaggattaccttgacctgctgtcgcgctatgtcgacgtgcacgacacccagaccgcgcgccacctgctggaagttcagcagcgccacctgggcaccttcggctacggcgtgaagagcatgaccctgtcgatgatcgaagcggccatcgacatcaccggccagcgcatcgaggccaaggacatccagcgcattctggatatcggccacgataccctgcgccacccggtggaactgatcgacggtgtgcgcgaagccgtggcggccatcgccgagcactacccggtagtgctgatcaccaagggcgatctgttccaccaagaggcgaagatcaaggtcgccaacctggccgagctgttcccgcgcatcgagatcgtttccgagaaggacccggaaacctacgcccgcgtgctggccgaattcgaactgccgatgcagcgcttcgtgatggtcggcaactcgctgcgctcggacatcgagccggtggtgaccctgggtggctggggcgtgcataccccgtacgcagtgacctgggcccatgagacccagcacggcgtggccgacgacgaaccgcgcatggtcaccgccgataccgcccacgactggccggccgcactggcggcgatcgaggccaaggccgctgcggcggcctga

SEQ ID NO: 496077 - DNA, 411 bp, Stenotrophomonas maltophilia
atgactattcgcaaccgcaagcccctgatcgccctgatcgtcgccgctggcagcgtgctggccattccggcgatggcccagtcggccaagcagcaggccgcacatgcgcagaatgaagcggcgcaggcccagcaggcggcagcacaggccgggcaggcggctgaccaggcgaccgatgcggccgcagcggcctcggcgcaggccaacggtggtggccagacctgggccagcatcgataccgatggcaacggcaccatcagcaagaccgaggcgcaggtgaacgccggcctggcccaggtgttcgaccaggccgataccaacaaggacggcgagctgagcgccgacgagtacaaggcctacgtggccgcgcagcaggccggtgcgggtgccggcgcggcgcagggccgctga

SEQ ID NO: 496078 - DNA, 372 bp, Stenotrophomonas maltophilia
atgaaccttcccctgcacttcggcctgctcggcaccctggaagccggcgccatcgcgctgctggtcggcctgctggtgtacttcctgtggtcgcgactgtgccggctgctgcactggtcgatgggccatgccatcggctgggcctgcgtcatctcggtggtggcctccgctggcatcgatgcgtggaagctgttctacatgggcatcgtgcgactggagtcaccgctgtacgcgcgcctgttcctggccaccatccacgatccgaacgagcttggcagtcgcgtggtgctggaaatcgccggcgcgctcgccggtgtcgccttgggatgggtgttgttcagttcgcggtcatcggaaaaaaccgtcgactga

SEQ ID NO: 496079 - DNA, 585 bp, Stenotrophomonas maltophilia
ttgtcgccgcgcatcgacctggacatccgctacgccggtgccaacaacttcaccggggcgcgcgtgcccggctacgaggcgccatcgtgttatctgctggcgccggtggcgaaggcgctggcacaggtggaacaggacctgcgcggcgatggcttcggcctgcggctctacgactgctaccggccggtgcgttcggtgcaggcgttcatggcctgggtgaacgatccgcgcgagcgctcgcgcaaggcacagcagtacccggacctggacaaaccacggttgctggccgacggctacatcgccgagcgctctggccatagtcgtggcgccacggttgatctgggcctgctggattgccgcagcggtgcatgcacgccgctggacatggccaccgacttcgatttcttcggtccacgcgcgcatacgcaggcaagcggattgagcgatgcgcaacaggccaatcgccagcagctggtgcgcgcgatggcgcggcggggcttcgtcaactatccgcaggagtggtggcactacaccctgcagcccgaaccggatcccggcaccgcgtacgacgtcccggtacggtag

SEQ ID NO: 496080 - DNA, 1587 bp, Stenotrophomonas maltophilia
atgggcctactgaagcccgcacggcaggctcgaaactgcgtctgcgcggcggcgctggcggtgttcccggttgcggtggcacagaccaccgcgaccgcctccctcgatgccgatgtcgctgccgtcgtccagcacgagcacctacccgggctggcgatggcggtggtcgacaacgggcaggtggtctatcgccacgccgagggcgcgcgtggcgatggcggccgcatcgacgaggacacgttgttcaagatcgcctccaacagcaaggcgatgactgctgcactgctggcgcggctggtgcagcagggcaggctgcgctgggatgatccggtgcagcggcatctgccgggcttccgcatgcacgatgcgtgggtgggccagcagatgcaggtgcgcgacctgctgatccacaacagcggcctgggcctgggcgccggcgacctgatgctgtggccggaaccgaacgcgtttacccgtgccgacatcatcgccgcattggcgcatctcaagccggtcagcagcttccgcagccactatgcctacgacaacctgatgtacgtggtggccggtgaagtggccgctgcggcgggcggcaagccgtatgaccagctgatgcgcgagcaggtgttcgaaccattgggcatgacgcgctgccaggtgggggcgtggtcggtgaaacgcgtgggcaacgtagcgcagccgcatgcctggcgtggcgaacgcaatgaagtggtgaacgccgatggtgaaaccagcccggacgtgccgtcgatggcggccggcggcatccgttgttcactgcgcgacatgacgcgctggatgcaggtgctgctggatcccgcgctgatgccggactggctgggcagcgagcagcggcgcacgctgtggaccctgcacatgccgatgccgctgggcgagcgccagcggcgctgggacaacgcgcatttctacggctacggctatggctggcgcgtgtctgacatggacggccagtggaaagtggcgcacaccggcacgctgtcaggcatgtactcgtcgctggcgctgctgcctgaacgccgggtgggcgtggtgatgctgatcaacggcgaaggcgaggacgcacgcacggccctgatgcaggccgcgctgaagcgcttcaccgcagcggacgatgcgcgcccggcgatggaatacctggccgaactgaaggctgaccaggcaacgcgggccgcgaccggccattcgcggccatccaccgcggcggcgcaggagacgagccgcacggacctgtcccgctggcagggccgctaccgcgatccgtggctgggcgcggcctcgctttgcccgggcaaggacggcctgcgtttcagcgtggacaagtcgccccggctgcaggccacggtgctgcagctgcaggggcgctggctgctgcgctgggatacgctgggcgacgaggcgcaggcgtggttgcagccaggcgaagccccggcaccgacgctggacctgcgcgccatcgacccggacatcgacttcagctatgacttccaggacctgcatttcactcgtactggcgactgcgctggcggcgaccacccgcgccgctga

SEQ ID NO: 496081 - DNA, 3000 bp, Stenotrophomonas maltophilia
atgaaggcttacagcatcaagcgggcggcgttgtgcgtcgctctcggggcgtgtctgggcgtgatcgcgcccagcgcatttgcacaggatggttcagtggtcggccggctggtcagcgatgccggccaggtaccggccggtgccacggtgaccgtacgcaacccggcaacgggcttcgtgcgctccgtgcaggccgaagccaacggcagctaccgcattccgctgctgcccgtcggcacctatgacatggaggtgagcctgccgggtggaggcgccagccgtgtcggccaggtgacggtcagtctcggcagcgcgaccacggtgaacgtgccgctgggtgcggtcagtaccctgggcacggtcgaagtgcgggcgccgcaggtggtgtcgatggtggatgtgaagtccaccgagtcggccaccaacatcacccgcgaggagctgtcgcgcctgccagtggaccgtgacatcaccgcggtggcgctgctcgcgccgggcgcggtgaagggcaaggggtcgctgggcgggcagggcatttccttcggcggttcgtcggtggccgagaacaccgtctacatcaatggcctgaacgtcaccgacttctacaaccgggtcggcttctcgtcggtgccgttctcgttctaccaggaattccaggtcaagacgggcggctactcggtggagttcgggcgcagcaccggcggcgtcatcaatgcggtgacccgctcgggcagcaacgatttcaaggccggtgccgaactggtgttcgagccgcgcgcgtggcagtcgcaggcacgcgaccgctacgacggcagcggcagccgctacatcaccgccagccgcgacgactacagccgcagcgcgctgaatgtgttcgcttccggtgcgctggtgcaggaccgcctgttcttcttcggcatgtacgaggcgcgcgactaccgtcccacctcgaccaatgatgccggcacgcgcctgagccagggcaaggccgatgatccgttctggggcggcaagatcgattggcagatcaccgacaaccagatgctgtcgctgttcggcttctcggacaagagcaagaccctcaccgacgtctacgcctacgactacgccacggggcagaccgtgggcgagcgcagcaaccagatctacaacacggtgggtggcaagaactggtccggtacctacagctggcaggtcaacaacgacctgaccatgaagctgatgtacggcgagaacaagcgcaaccgtgtgcagagctcgttgatggaccagaactgcaaccgcgtgttcgacaaccgcacggccggccagggcgtgccgccgtcgctgcagggcgaccgcagctgcaccagcagctcgcagctggagtcggcgctggacacgcgcaaggccgcgcgcgcggacttcgaatggacgttgggcaaccacctgctgcggttcggcctggatcgggaagagaacacctccgattacagccgcgcctatccgggcccgggcggcttccgctacgacatctactaccgcactcccggcagctcgctgaacggtggcgtggtgccggccagcggcgtggtcgtgcgcacccgtcgctatgaagtggacggggccttcgagacgatcaactcggcctactacctggaagacaactggcaggtgacgccgaatctgctgctgaacatgggcctgcgcctggaagccttcgacaacaagggcggcgacggcagcagctacatcaagatcgacgacatgctggccccgcgcctgggcttctcctgggacgtgcgcggcgatggcacgaccaaggtgttcggcaacctgggccgatacttcctgccggtggccaacgtcatcaacatcaagcaggccggtggtttcctcgacgagcgcacctggtacgagttcctcggctacaccggcgcagccaacaacatccccaacctgggcgcgcagatcggcccagtggacaactcgcagggcgacggcagcgtgccggacctgcgcgcggaagtgaaccgggacatggacccggtctaccaggatgaagcgatcctgggcttccagcagatgatcaacgaggcctggtcggtgggcgccagcgtgacctaccggcgcctgcacaatgccatcgatgacatgaacatcaccgcgaccggccagtgcggcgccatcgacagcgtgtggatcatgggcaacccggggcgcaccaacaccgtgtggggtgacaccgactgcgacggccgcaacgatggctggatcagcatcgacacctcgaaggaaggttgggcgctgtatgacgacaacggcaattatgtcggccagcgcggctgggtgaagcccaagcgtgactacaaggcgctggaactgcaggtcgaccgcgcctgggacggcaagtggggcttcaacgcctcctacacccttgcatacgggcgcggcaacgcagaaggcccggtcaactccgataccgacttcgccgatgcagggcgcaccgagaacttcgacaacccctgggtcaactacggtggctacggctacctggccaacgaccgccgccaccagttcaagttccgtggcagctacgcgctgaccgagaacctgagcgtggcggctacgctgggcgtgcagtcgggcagcccgattacccgcttcggcgccggtaatccgttcgacgacaccgacttccacagctattacgtgtgcgtgtccaactgccaggcgacggttccgtcccagcgcgtgttcgtgcattcgccacgcggtggcgatggccgcacgccctggacctatgacctggacgtgagcgtctcgtacaaggtgccgattcccaccgatctgcgcctgaagctggcggtgtacaacgtgctcaaccagcagcgcgtggtgaccgtggaccaggactacgagccgcaggacagcatcggcacgccgaacccgctgtaccgctacggcaccggcttccagtcaccgcgctatgcgcagttgaccgtgacatgggcctactga

SEQ ID NO: 496082 - DNA, 1473 bp, Stenotrophomonas maltophilia
gtggatcctgccattcgcaaaccgcgtctgcctgctgctgccggcctgtgtgccgcgctgctgctgtgggtgtcggtcacgcaggcggcagacgggcgcaccagccagcagcgtgcgcgccaggcgcaggtgatcgacctgatcgacggtggccgcttcagcgacgccgatgcgttgctggcgacagggagcgatgctgccgaaggcgcgttccagcgtgagcgcatgcgccgcatccgcctggatctttccctcgacgaaaccgccgccaagtctgccgtgcgccgctggattcccgacctgaccgacgaggaattcgcgcgctgggaccagcttggcctgatcgagcatctcgatatcgatggcgagcgttggtacttcaagcgcgcaccgtcgaacctgttcctgctcagcgacgaagcacgcgcacgccgccgtgcggatgcaccgatgccgcctccaggacccaacgaagtgctcaacgcgcaccacacgcgcgtggtcgccgcggccgaacagagtggccgggcgtcggtgctgccgcagcgtatcgaattcacccaatcgctcacggtgaaggccgatgccgtgccggccggcgaaaccgtgcgtgcctggattccgtacccacgcgagatccccggccagcaggagcaggtgcagtggctgggcagcagcccaggcaaggcgcgggtggcaccggccagcaccttgcaacgcacggcctatctggaggccaaagcggtggccgggcagccgacccgcttcgagatccgctacgcggtcacgatcttcgcccggcacaccgcgatcgacccggccgtggtgcaaccggccccggccgatacggcgttgaagccgtatctggccgagcagctgccgcatgtgcgcttcacccctgcgttgaagctgttctccgaccaggtgctgcagggcgagacgcgcccatatgaagtggtgcgcaagctgtttgctgcggtcgaccgtattccctgggccggtgcgcgcgaatattccacgctcagcaacatcagcgattacgcgctgcgttccggccatgccgattgcgggcagcagaccctgctgctgatcgcgctgctgcgcctgaacggcattcccgcgcgctggcagtcgggcatggtgttctccgacgatggcagtggctacaacaacctgcatgactggggacaggtctacctggcgccgtatggctggctgccgatggacgtgaccactggcgcactggccagcgaggtaccggccctgcgcgacttctacctgggtggcctcgatggctaccgcatcgccttcaacgatgatttcggccagcccctcgtgccggccaagcagcacttccgctcggaaacggtcgactcgcagcgcggcgaggccgagtgggcaggcggcaacctgtacttcgaccaatggagctacgacttccagtggcgggtactgccagccaggcaacgctag

SEQ ID NO: 496083 - DNA, 1440 bp, Stenotrophomonas maltophilia
atgagcctggcttcccgcgaacggcaccggcattggccgcgccgcttgaccctggccctgtgcctgctggccgcaccggcctttgcacaggccgccccggcgcccgatcccggcgcaccgctgccctatgtgatcggcctgcacgaggcctacctgacgccgcagtactgggcggcgcgtctggacaacgccgatgcgccgatcctggatcgcgcgcagatcgaggcacagaacgcacggatgcgggcgcaggacagccacatccaggacatcgcggcgctgccagcccagcttgatgcggcgacggtgcgtgccagcatcaccgcgctgtcgagctggcccacgcccaccctctacagcgacaagggcacgcccatcgcgccggccctgcgcagcgcgatcgaagccaacctcggccttgatgcgattcccgcccaggtggcaccggcctacgggctggtggtgaagcgtgccgcactgcgcaccttccccacccgcgagcgcgtcttcagcaccgtcggtgacaccgacatcgaccgcttccaggaatcggcactgttccccggcgacaaggtcgccgtggtccaccgcagtgccgacggccgctggctgttcgtgcacagcgagcgctacagcgcgtggatcgaagccgacgccatcgccagcggcgacaaggccacggtgctcggctacggcgcgaagggaccctaccggatcatcaccggtgccaccgcgcagaccgcctacaccccggaagaaccgcgtgtctcgcgcctgcagctggacatgggcgtgcgcctgccggtgctggccgactggcccgcgtcagaaccggtgaacggccagcaggcgcacgcatcgtgggtggtgcagctgccggtacgcgaggcagatggtcgcctgaaactggtaccggccctgctgccgcgctcgcaggacaccgccgccgactacctggccctgaccccgcgcctgttgctgcagcaggccttcaagttcctcggcgagcgctacggttggggccacgactacgacacccgcgactgcagcggtttcgtctccgagatctaccgcagcttcggcgtgctgctgccacgcaataccagtgcacaggcggtcagcccggcgctggatcgcctgccgttcaccggcaaggacggcaaggcactgcgcgaccgtgccgtcaccgacctgaaggtcggcgatctggtctacatccccggccacgtgatgatggccatcggccacgtcgacggtcgtacgtgggtgatccacgatacggcgggcggcagctggttcggtgccgacggcacgcgcgtgcaggcccatctcaatggtgtttcggtcacgccgctggagccgatgatggccagcgataccgtccgctacatcgaccgcatcaccaacatccagcgcctgcgggccaagactcctgaatga

SEQ ID NO: 496084 - DNA, 1095 bp, Stenotrophomonas maltophilia
atgaagatcaccgccatcgaactgggcatgctgcgcgtgccgttgaagacaccgttcaagaccgccctgcgcacggtggaaaccgtggaagacgtggtggtgctgatccgcaccgacaccggcaacaccggctatggtgaagccccggccaccgccgtgatcaccggcgatacgcacggctcgatcatcgaagcgatccgccacttcatcgccccgcgcctgatcggccaggacgtggtcaacctcaaccacctgtgcacgctggtgcagaccgcgatggagcgcaacaccagcgccaaggcggcggtggagatcgcgctgtacgacctgtgggcgcagctgcacggcgccccgctgtaccagatgctcggtggtggcgacccggtgatcaccaccgacatcaccatcagcgtggactacatcgacaagatggtggccgactcgctgtcggcgatcgaacgtggcttcgagtcgctgaagatcaaggtcggcaaggacatcggcctggacatcgaacgggtcaaggcgatccatgccgccgtggaaggccgcgccctgctgcgcctggacgccaaccagggctggaccgccaagcaggcggtgcatgcgatgcgtaccctggaagacgccggcgtggtgcttgaactgctggagcagccggtgaaagcggccgacatcagcggcctgaagtacgtcaccgaccgcgtcaacacgccggtgatggccgacgaaagcgtgttcagcccgagccaggtgatggacctgatccagcagcgcgcggccgacatcatcaacatcaagctgatgaagaccggcggcctgtccaacgcgatccgcatcgccgacattgccggcatctacggcgtgccgtgcatgatcggctgcatgatcgaatcgagcatcagcgtggccgccgccgtgcacctggccgtggccaagagcgatgtgatcaccaaggtcgatctggacggcccctcgctgggccagttcgatccggtcagcggcggcgtgcatttcaacgaatcggagatcagcatcagcgacgtgccggggctgggcatcaccgaagtgcgcgggctggagatgctgggttga

SEQ ID NO: 496085 - DNA, 414 bp, Stenotrophomonas maltophilia
atgaaagtgatggtgatcgtgaaggccaacgccgactccgaagccggccgcatgcccagcgaacaggaactgtccgaaatgggcgccttcaacgaacaactggtggccgccggcatcatgctggccggtgaaggcctgcacgccacccagcgcggccgtcgcattcacttcggcggcggggcaccccaggtcgaggccggtccgttcggtcctgccagtgaacagatcgccggcttctggctgtgggaggtccggtcgctggacgaagcggttgaatgggccagccgcgcgccgttcggcagtggcggcacgctcgaactgcgtcccttgatctccgctgaagacttcggtgaagccttcacccccgaattacagcagcaggaacagcgtctgcgtgcacagctggaaggttga

SEQ ID NO: 496086 - DNA, 423 bp, Stenotrophomonas maltophilia
atgagactgattcccttcctcggcttcagcggccaggcccacgaggcgatggcgttctacgccaaggcactcggtggccaggtcacttcggaaatgaaataccgcgacatgccgccctccgatggctcgccgggctgcaacgagatgccgccggaaaccctggaccacgtcgcccacagccagctggagatcggcaacgccatcgtgatggcggccgacggccccggcggcggcgagggtggctcgaccaccatcaatgtcgatgtcgacagcatcgaagaagccgaacgcgtgtttgccgcgctggccgagggggggcaggtgcagatgccgatcgccgaaacgttctgggcgcaccgctggggcatgctggtcgaccgctatggcaagccgtggatggtcaactgcatgaagcagccctga

SEQ ID NO: 496087 - DNA, 411 bp, Stenotrophomonas maltophilia
atgagtgcaccgcaaccgcagatgatcttcgtcaacctgcccgtgcaggatctgaacgcgtccaagacctttttcgcagcgctgggctacaccttcaacccgaccttcaccaatgacgatgccgcctgcatggtgatcagcgagagcatcttcgtgatgctgctgacccagccgttcttcaagcagttcaccaccaagccgatcgccgacgcacgcagccagaccgaggtgatcacctgcctgtcggcggacagccgcaaggcggtggacgtgatggtggacaaggctctggcggccggcgccagtgaaccgcagcccgcgcgcgactacggtttcatgtaccagcgtggcttccaggacctggacggccatctctgggaaatcgcacacatggacggcgagccgggctga

SEQ ID NO: 496088 - DNA, 357 bp, Stenotrophomonas maltophilia
atggcttacgtggacgcttacgtgctgccgtgcccgcaggacaaggtggcggcctaccgtcgccttgcccgcaaggccggtgcggtgtggaaggaccatggcgcgctgcagtacatggaatgcgtggccgacgatgtggagccgggcaagagcacctccttcccgcgcgcggtcaaggcgaaaccgggcgagacggtgatcgtcgccttcgtggtgttccgctcgcgcgcggcacgcgaccgcatcaacgcaaaggtgatggccgacccgcggctggcgtcgctgggcccgaaggacatgccgttcgatacccggcgcatgttctggggtggcttcaagccgattgttgaagcgtga

SEQ ID NO: 496089 - DNA, 1263 bp, Stenotrophomonas maltophilia
atgctcgagcccgcactgacgcagcgtctggaaaccctctggcggatggagtcgccagtgctgattgcgcgcctggcgcggctgctcggtggcgatgtcggccgtgccgaggagctggcccaggacacctggctggccgcgctggagcgttggccggagcagggtatcccggacaaccccggagcctggctgatgaccaccgcgcgcaaccgtgccatcgatgtgctgcgccagcaccagcgggtggcgcagcagcatgcgcagtggggcgaggaactgcatccggcggcactgccggcgccggatgacagccaggcactggaggacgacctgggcgatgacctgctgcggctgatgttcgtggcctgccatcccgtgctgccggccgatgcgcgggtggcactgaccctgcgcctgctcggtggcctgaccaccgtcgagatcgcgcgtgcgttcctgcagccggagccgaccatcgcccagcgcatcgtgcgcgccaagcgcacgctggcgcagaagcaggtgccctatgaagtgccacgcgcggacgcgatgccggagcgcctggcctcggtgctggaagcgatctatctggtgttcaacgaaggctacgccgccagcgccggtgatgactggatgcgcccggcgctgtgcgaggaagcgctgcggctggcccgcatcctggcgcatcggttgccggtgccgccggtactgggcctgctggcgctgatggaactgcaggcttcgcgcgcagcggcacgggtggacgcgcagggcgcgccggtgctgctggaccagcagaaccgcgcgcgctgggactggctgcagatcgaccgcgggcagcaggtgctggcgcgcgcgttggccatcggtggcgaccaggatccctatgtgctgcaggcgcgcatcgcggcctgccatgcggctgcgcggcgcgccgacgcgaccgactggccgcgtatcgccgcgctctatgcacagctgctgcaggtgcaaccttcgccggtggtggcattgaaccgggtggtggcgatcctgcgcagcgaaggcccgttcgccgcgtgggcgcagctgcagcccctgctggtcgacgcgcgcctgcgcgactatgcgccgctgcaggtggtgcgcggcgagctgctgcaggcactggggcgtgagcaggacgcacgtgacgcttttggccaggccgctcggctcagccagaaccaggccgagcgcggactgctgcggcaacgggcgggcctgccccccacggactga

SEQ ID NO: 496090 - DNA, 1197 bp, Stenotrophomonas maltophilia
atgtattcaaggacgaagagcgcatcgcgcgcttttgcgcgcctgcttgcctgtgccctgtgcgtggccgtatggccgatggccgtgcaggctgcggacaaatcacagcaggcctattgggccggttttgcctataccgctgacgccgccgccgtgcaggcgaccaccccgcatgcgcacgcggtgctggaacggcgtgggctggtcccgctgaaccagacgctggcacagtcgctcaagcgccacgcaccggcccacctggagctgatcgaccagccggtggcgatgctcgacggcaccaccagtgccaccgtgctggccgctgcgctggatcgcgagctggtctcggtcgaaccgatcggcgaccagtacaaggtgctggtggaagtggcgctgcaggcgttgttcttcgacttccgcgagcgccaggtgatcgcctcctatccgctcaccctgcagcgcatcgacgtgcaggactaccgtccggacaacgacgatatcgacgcgatcgtcgccgatctgctgtacggcggtgccgataccagcctgtcgcaggtactggcggccagcctggcgcaggcccggttgcccgatgccgccgtgcgtcgcctgcaggtgggcggggtgaccctgtccgacgcggcacgcgccaagctgtccgatccgaagtgggaagcaccgctgcgtgccacgcttgcgcacgaactgtccaagacgctgtcgtccaacactggcgttggcctgctgccgccggcctcgggccaggcgatcggcggtgcgatggccgcccgctttgccgacggcaaggtctaccagttgaagattcccgaacccgactacgtcatccagctgcaggtcgatgcactgaagaacggcgtgatcgaggaaaccccggcgatgaagacgatgctgttcggcgccttcttcaccgccaaggtgagcgagccgttctcgggcaaggtctatttcgaacagccgctgcgcaagggggccaccaaggtggtgccggtcacgcagtggcaggtcgaccagtggtcggccagctacgaaaccctgctggccggcttcgacgccttcgccggcgccgccgccaagcgtgccgattcgcgcgcctggctggacgaacagaagccgggcggccgcccgttgcagcagcagacccaagccctccaggagttgatcaagtcatgtcgttga

SEQ ID NO: 496091 - DNA, 1101 bp, Stenotrophomonas maltophilia
atgtcgttgatgcgtaccatcctgctcatcctcatcgcgctggcggtggcctcgccggtcgctgcgcagaccgcgagttcgcgcggtaccggctcggccagctacggcctgcgcctgagcgccgatacccgtgcccaggccctgaacaaggccaaggtcaatgccctggaggcgtacatcgccgaaaccggtgcggccaagctgcgcctgttcgaggcgcgccgcgccgagttcatcggcgagatcgaccgctacgtgctcagcgccgtgcagctgtcggacaccgaagacaagaaggccaagacctacagcgtcaccgtccgcgccgagatcaacaccaccctgctgcagaccaagctggatgcgggttcggccgtggccgacgccaccgctgcgcagcgctcgctgctgaccttcctgttcatggcgcgctcgcaggacaccgtgcagtcgttccaggacaaggaataccgccgcgtcgacgccagcagcagctacagcgagaacacccgtgaaggcgacagcttccgcggcaactcggtcagcaccaacggcagcatcaaccagaacggttcggtgtcggtcaccagcggcggcagcaccaccgcgcgcgccgacaacatcacctggaaggtggccaacgccgccgaagtcaacaccgcgatgaccggtgccttcagcgccgccggctacgaggtggttgaagccgagtacgtggaaggcgagtcgcgcggcctgctcagcatcgagcgcatccgcaaggacttcagcaccggcaacgacctggccccggccaccctgcgcgacaccgccaatggcatccgtgcggccaacatcccgtacatcgccgtcggcaccctcgacgtcggcatgcgtgaccgcgatccggccagcggcaacacccgcgtgttcgtcactgtcaccggcaaggtgctggacgtgaccggtcgtttcccgcgcaccgtgtcgtcggtcggcccggtgcagttctccggcaccggcccgaatgaaaccgtggcccgtaccaatgccctgcagctggctgccgaaaaggccgcccagcagatgatcaacgaactgaacgtcaaggcggtccgctga

SEQ ID NO: 496092 - DNA, 687 bp, Stenotrophomonas maltophilia
atgatccgcaataccgctcttgccctggccatcgcggccgccaccctgtcgatgccggcccatgccggcctgggcaagctgaaggacctggccggtggctccaccggctcctccagcagcacctccagcgccgctgccccggacgaagccgcgcaggaagcgctggtgcgtcgtttcgtcagctcgcagtcgcactcgctgcaggcccagacctcgttcgcccgtgccttcggcctggccgagcaggtgcagctgctggaagccgagcgccaggcgctgtcgtcgggttcggtcagcgtcgatgcgatgaagaagtcggtgtcggtcagcgaagccgcccaggccgcgatcgacgagcgccaggccgcgcagccggagctgaacgctgaatccaagcagcactacgccgaaggcctggtctcgctgctggcgtcggccgccgaagcgcagaagctgggtggcgaagccagcaacttcaccgccggcatgaagaacctgggcgccacccagatggctaccgtcggccgcaagctggccgctggtgcatgggtggccaaggaatcgccgggcttcatccagggcctgtacggttcgaccaagtcggctgtgaccttcgccaagaagagcaaggtcaaggtgccgtccaacgccgactcgatgctgggccagctggacaagatgaactga

SEQ ID NO: 496093 - DNA, 1650 bp, Stenotrophomonas maltophilia
atgcgtacgacctcccgtttgatcggcctgggcctggctgccgcgctgcttgcagcctgtggcaagcaggacaccccggccgaagcgcccgcacctgccaaggacaaggcaaccagtgcactggccagcaatgcgccagtggaagcagcgcccctgcgtggcacgccggatttcggcggcaccacccaggtcgcgcgcgaggccgacggcatcggcagcaccccggaactggcggtgctggcggcgttgcagtcggcggtggcgcaggtcaacggcgtacgcgtggccagccagatgcagagcctgcgtgcaggcctgcatgtggatgtggatgacgaacacgtcggtgatatccgcgccgacgcgttcacccagcagatgatcgccggctcgcagggcgcggtgctgggctatgaaatcctgtcgcaggacgaagtgcggcagctggatgaagaaaccatcgcgcgcgtgcgcgccagcgacgaaggctggagcttcaagggttcggcctctgccagcgcgtccggcgaggccacggccaagggcggcggagcctcggccagcgtcaaggagagctacgacgagaaggtcagcgtcgatgccaagcgtggcgcaagctcgttcgattcggatgtgacccaccgcagcatgcgcagctactggaaggtgcgcgtgcgtgcacagattgcccagtaccgtgcaccggacgagcagggcaagccgaagatcgtggtcgcgctgccgcgcaccaaggccggcagctatgccgtgggcgatggccgcgtgagtgccgatgaagtggccgacgcgatccgcgcgcgcctgtccgacacgctgacccagacccagcgcttcatcgtgctggatcgcgagttcggcgacgaactgcaggccgagatcgaccatatcaacagcggcaacgtacgcctgcaggacaccacacgcgtcggccagcagctggcgaccgacctgatcctgatcccgaccatcgaacgcttcgagtacccgcgcagcgtgcgcaacctgcgcatgtccgaccgccaggtgacctcgtactccggtggcggccgcatcaccctgcgcctggtcaacgccaccaccggccaggtggtgatgtccgacagcttcgaccaccagctggcctcgaccggcccgagcaccctgccccgcgtggtcaacggccgcaacatggccgcggcgatgatggaatcgctgtcgggccagatcggtaccaccatcgtcaccacgctgttcccggtgtcggtggtttctgtggacggtgaccaggtggtgctgagccagggtggcgaaaccctgcaggccggccagcgctggcaggccgtgcgcctgggcgaggaactgaaggacccgcagaccggccgctcgctgggccgcagtgaacacccgtgctgcaccatccgcatcgaccgcgtggccgcacagacctcgtacggcaccatcgaagacggcgtcgacgcgatgcgcggcggtttccgcccgggccagatcgaactgcgccagaagctgggcagcaagccggccgccgccgcaggtgcgactgcctcggccgctcccgccgccgccgcacgcccggcggccaagccgaagcccaagcccgctgccgccccggccgaagacccgaactggtaa

SEQ ID NO: 496094 - DNA, 1650 bp, Stenotrophomonas maltophilia
atgaaacgagtggtactgggcgtgctggccctgtcggtgtcgagcgcactgatggcggccaccccgaaattcgatggcgcgcggatctccgccgacgtcaaggaactggcctccgacgcctacgaaggccgctcgccggccaccgccggcgaagaaaagaccatcgcctacctcagcaggcagtttgccgacgccggcctgcagccgggcggcgacctcaaggacggcaagcgcctgtggacccaggccgtgccgctgcgcaagggcgacatcgtcggcgcaccgcagctggcgctgcaccagggcggcaagaccctgccgctggagcagggcaagcagatcgccgtgcgcgccgccatgaacggcgccagcagcgtcgacatcagcaaggccccgctggtgtttctcggctacggcgtgaaggcaccggagcgcaactgggacgacttcaagggcgtggacctgaagggcaagatcgccgtggtgctgatcaacgacccggacttcgaaaccggccagggtgatttcgacggcaagggcatgacctattacggccgttggacctacaagtacgaggaaggcgcccgtcagggtgcgctgggcgtgctgatcgtgcacgagaccgcaccggcgtcgtatggctgggccaccgtggccggctccaacaccaacaccatgttcgacgtggtgcgtgacaacccggcagaaagccacccgctgctggaaggctggatccagcgcgaccttgccgtggagctgttccgctcggccgggcaggatttcgaggcactgaagaagaaggcgcagcagcgcgacttcaccccggtgccgctgaccggcgccagcctggacgcgaagtacgcggtgaagaccgaagtgatcacctcgcacaacgtggccgcgcgcctggaaggcagccgccatccggacgagaccatcatctacagcgcgcactgggaccacatcggcgtgggcgagccggacgcgcgcggtgaccgcatcttcaacggcgcgctggacaacgccagcggcaccgcctcgctggtcgagctggcccgtggcttcgccaaggagaagcgcccgcagcgctcgctgctgttcctggcggtcaccgccgaggaaaagggcctgctgggttctgagtactacgccacccatccgctatatccgctggaaaagaccgtggccgtgatcaacatggacggcatggcgccgttcggcccgtcgcgtgacttcggcatctacggtgccgcgcgcttcgagctgctggaccagctgaaggacgtggccaagggctgggatatccgctacacgccggacccgaagccggaagcgggcctgttcttccgctccgaccacttcccgttcgccaagcgtggcgtgccggcgctgtcctggtcggccggccaggactgggtggacggtggcgtggccgcaggcaggaaggcctccgaggactacaccgccaagcgctatcaccagcagggcgacgagtggcagccggactgggtgtttgccggtgccgcgcgcgacctggaagtgctgtacacgctgggcaaccagctggccaattcccgcgattggccgaactggagcaaggacgaggcgttccgcgccgtgcgtgacgccagcgccgaccagcgcaaataa

SEQ ID NO: 496095 - DNA, 1260 bp, Stenotrophomonas maltophilia
gtgttcgccagcctctctctcctgatccgccacctgctggcctgggctgccgcgctggttgtcgccggcatggtctggagcggcatcttcagcggcatgaacgatggcccgggctggatcttcgggctgctggcgatgttcctgatcatttccgcgctgggcagtgccatcacccacatccgccgggtctggctggtggccggtcgcctggatgccaccaccctgtccggccgccagcgccgccagatcgaactgccgatggacgcgggccacgccttctcggtggtggaggcggcgatttccgaactaccgcgcgtcgaagacgtggaaagctcggccggcagcctgcaggtgcgcgcctatgtgcgccgggtcgacctctggaacggccgccagccctcgcgctggaacctgccggcgcggctggccatcaagcgcaacagcgtgctggccacggtcacgccggggcagggcaccagcaccgtcaccctgctgttcgaacccgatgccggctggtgggccgacctgctggcgctggacgaaggcagcaactacgagaacgccgaagcagtcacccgtgcgatcagccgccgcgtcgccgaccagcgccgcgacgaacaggctgcggccgaacagacccaggtggaaaaggagctgtcggtggcacgcttgaacctgttgcatgcgcaggtggaaccgcacttcctctacaacacgctggccaacgcgcaggtactgacccgcaccgatccggcgcgtgccgaacagatgctcggccacctcattcaatacctgcgcagctcgttgccgcaggtggacgaatcggtatccacgctgggcgtggagctggaccgcacccgcgcgtacctggaaatcctgcgcatccgtatgggcgcccgcctggcggtggaaatgcaggtaccgaacgaactgcacggcgtgcacctgccggcgatggcactgcagacgctggtggagaacgcgatcaagcacggcctggaacccaagcccggcggtggcacgatctggatactggcgcgcggcttcgatgaccacgtgaccgtgaccgtggccgacgatgggcttggcttcggccagggcaccagcggtaccggcatcggcctgaagaatctgcgcgagcgcctgcgcctgacctgcggcgagcaggccggcgtggcgatcgttgccaacttccccagcggcgtggccgcgaccatgaccctgccgcagtcgcacaaggagcgcagccatgccgcttga

SEQ ID NO: 496096 - DNA, 771 bp, Stenotrophomonas maltophilia
atgccgcttgaagccctgatcgccgaagacgaagaactgctgcggcagtcactggtggaacagctgggccggctgtggccggagctgaagctggtggccgagtgcgaggacggtgccagcgcgctggagcagctggccgagacgcagccggacatcgcgttcctcgacatccgcatgcccggcatcagcggcatcgaggtcgcgcgctcactgtccgagctgagcccgcgcacccaggtggtattcgtcaccgcctacgaccagtacgccatcgatgcgttcgagcagggcgcgatggactacctgttgaagccggtcagtgacgagcgcctgctggccacccgcgagcgcatcctgtcgcggctgccatcgacgcgccaggacgatgccgtgcttgagcgcctgctgcagcggctgggcccgtcgcagggcgcagcggagcgcccgccactggcctggatcaccgccagcaacggccgcgagacgcagctgatcatgctggaagatgtggcctacttccgtgccgacaacaagtacaccaccgtggtcaccgctgccggcgagagcctgctgcgcacaccgttgcgcgaactgctggaagtgctcgacccgcagcacttccgccagatccaccgctccaccatcgttaacatgaaggcggtggcagcggtgagccgcgacgataccgggcgcggcgtgctgcgcctgcgcgggcgcacggagacgctggtggtcagccaaccgttcatgagcctgttccgcggcatgtag

SEQ ID NO: 496097 - DNA, 345 bp, Stenotrophomonas maltophilia
atgcgttttttcctgcttgtcggcttcgccgcattggcgcttgccggttgccagaagtccactgaaaccgcgatcacccgcaccactgccaatggcgtggacacgctgtacagcaagcgcacggtagtggacggcgtggcgcgtttccagtgcatggccagccgcagcggccagtgccattacctggtgctggacccggcctgtcgtcctgatgccgcctgtgcgaaagcgccgatacggtcgttcgcgttggcggccggcacgacccgggagttcaggggcctgccgaagggcttcgcccagtgcgtcagcgaggatcggaaagaacagtgccaccgtgagtga

SEQ ID NO: 496098 - DNA, 615 bp, Stenotrophomonas maltophilia
atgattgctttgttcaagggtttgggaattctgcttcgcgacaacgagctctacagcagcccgttcgataaacaggtcgcgcattggcgcaatctcagcgaacagcagatccgcgatgaagtcgcggtgctggcccaggccaagtgccaatggctgatcgcctcgatcgtcggctggcaggcagcctcgctgctgattcttggcctgatcgccaactacctctggcgcgacgacttccatatcacgttcacccgcgtggtagtcgtgttcggttcgtgggtctcgatcctgttcgtgatctggttcatggccaacatgttcgatcagcaggccggtttcgagcgctggatgaaggcgttcaacagtcgcgcacgcatcagctccaaggccgacagcgtcgagcacgtggccgaggcactggacctggccgagcattacccggaagtgctcgattacaagcaggcggtcaccgccaagcgcgagctgcgccacgaggacatccgcatcatgaccgagatcgggcgcatgaagcagcactccgaactggtcggccgcctcaaccacgtgggcgagaacgagcaccaccacgacctgacactccagcctgcctactga

SEQ ID NO: 496099 - DNA, 930 bp, Stenotrophomonas maltophilia
atgccggctctgctgcagcgactctcccgccccgtcaccgcgccgatccggcgctgggtgctggaggccttcccccgtggccagagcggcatcgattacgaccagccgctgggtgacccgggttggtttggacccgacagcgtgacctggcgcctgcacgccgagttcccctcgatgctggccggtggcctgtgcgcgctgatgctgcagaccctgcatccgcgcgcgctggccggggtctacgatcactccaatttccgccaggacctggtgggtcgcctgcgtcgcaccaccgcgttcgttgccggtaccagctatgcgcccaccggcgaggtggaggcgctggtggccaaggtgcgccgcatccatgcacggatccgcggccagaccgcacagggcgaaccctacgccgccgatgatccgcagctgctgacctgggtgcatgtgaccgaggcgttcgggttccttcagggcttccgccggtacggacgggaggtgccggcacacatcgccgaccgttactacgatgagtaccgctgcgtggccgaggcactgggtgcggtggacgtgccgcgcagcgaagcggaagtggcggcgtacttctgtgcgcggcagccggagctgcgcgtcgacgagcgctcgcgcgaggtgctggaggtgctgtccggcgtgcgcctgccggtaccggtgccggggctgtcgcgcgaagtgttcctgggtgcaggcgcggcactgctgccggactgggccgaaggcatgcttgaacgcagtggccgtcagcgcgcgcaggccgccgcgtcggcgaagctgatgcagggcatggcgccgctgttccgccgtgcgttgcccgatggcctggccagccgcgcctgtgcgcgcatgggcgtgccggtgtcggtgctgcgcgagtggcccagcgttccccggtag

SEQ ID NO: 496100 - DNA, 588 bp, Stenotrophomonas maltophilia
atggttcgccgcacccgcgcggagatggaagaaacccgcgccaccctcctggccaccgcccgccgggtgttcagccagcatggctatgccgccacctcgatggacgacctgaccgcccaggccgggctgacccgcggcgcgatgtaccaccacttcggcgacaagaagggtctgctggcggctgtcgtcgcccagctcgatgccgagaccgaccagcgcctgcaggcgatcagtgatgccgccgacgatgcctgggagggcttcgtgcagcgttgccgcgcgtacctggagatggcgctggaaccggagatccagcgcatcgtgctgcgcgacgcgcgcgcggtgctcggtggcgcctcaccggaatcgcagcgccactgcgtgcattcgatgcagcacctgatcgaacatctggttgcccagggcgtggtggcaccagtgaatgcgcaggcgctggcgtcgctgatctatggcagcctggccgaggccgcgttctggatcgccgagggcgaggatggcgacgtgcgcctgcggcaggcgacggcggcgctggagatgctgttgcgcgggttgaagtcggcggggtaa

SEQ ID NO: 496101 - DNA, 1215 bp, Stenotrophomonas maltophilia
atggccaccccctatcgcgacctgttcgcgacccccggcaccgccggcctcgccctggccgggctgctggcacgcctgccgctgccgatgaccggtatcggcatcatcaccttgctgtcccagctgcgcggcagctatgcactggccggtgcggtgtcggccaccttcgtgctgacctatgcgttgctgtcgccgcaggtgtcgcgctgggtcgaccggcgcgggcagggcagggtactgccatgggccactgcggccagtgcggccggtctgctgttgctgctcgcgtgcacgctgctggccgcgccggactggacgctgttcgttgcggcgatgctggccggctgcatgcccagcgtgtcggcgatggtgcgagcgcgctggaccgcgacccatcgcggacgaccacagctgcagaccgcgtattcgctggagaccgtgttcgacgaggtgaccttcatcgccgggccaccgttgtccgtcggattgtcggtggcggtatggccacaggccggcgtactggcggccgccctgctgctggtggccggcgtcgccgcactggtgctgcagcggggcaccgagccgccgatacagcactacgaaggtgcaacatcctcgcactcgctgctgcggcaaccggagatccgcctgctggcgttgctgatgctggcgatgggcgtgatcgtcggcaccgtcgacatcaccagcgtggcattggccgagctgcgcggacagccactagctgccagctgggtgctgtcggcctacgcgctgggcagctgcgcggcgggcctgctgtttggtgccctgaagctgccgatgcctctgccgcgcctgttgctggccggagcagcggccaccgcattgaccacgttgccgctgctgtgggtcggcagtctgccggcactggccgctgcggtactgctggccggggtgttcttcgcgccgacgatgatcgtggcgatgtcgctggttgaacaacgcgtgcccgaagcacgcctgaccgaaggcatgacgtggctgctggccggcctcaacatcggcgtggcgctgggcgcggcgctgtccggacagagcgtcgatgcggcgggcgtgcgcagcggttttgtggttgcgctggcggcaggcggtggcgtgctgctgttcgccttgctcgtgcaacgtgcgctgcgcccgtctgccgcgtccacatcccctgaaggaatcatcccgtga

SEQ ID NO: 496102 - DNA, 1173 bp, Stenotrophomonas maltophilia
gtgagcgcttcatcgcctgcgcatgccgcgtctgtgccccgccatccgtggtgggcggtctccgccgtcggcctcgccacgttctcggtggtcaccaccgaaatgctgccggtcggcctgctgactcccatcgccgaagatctcggcgcgtccaccggcaccgccggcctgatgatctcactgcccgccctgctggcggcagtgttcgccccgcttgcggtgatcgcagccggtggcatcgatcgtcgccgcatcctgtgtgcgctgttgggcctgctgctggtcgccaaccttgcgtcggcgctggcacctggcatcggctggctgttggccgcgcgtgtgctggtggggttctgcatgggcggcatctggagcattgccggtgggctggcagcgcgcctggtacctgcgcagcgcatcggtctggccacctcgatcatcttcgggggcgtggccgcagcttcggtgctcggcgttccgttgggcgcgctgatcggggatgcattgggctggcgcagcgcgttcgtggcgatgacgttgttcagtgcggcggtgatgctgctgcatctgcgggtggttcccgcgttgccggtcagcacatcggtgcggccgcgtcagttcgtgcagcagcttggccagcgcaacctgcggcgtggcctgtggctgaccgggctgctggtgtccgggcacttcatcgccttcacgtacgtgcggccgctgctgacgtccgtatcgggcgtggatgcgtcgtggataggtgcactgctgtttgggtacggcctggctggcatcgccggcaacttcatcgccgggccgctggctgcgcgccatccactgggcatgctgctggcgatagcctcgggcctgctgctgacgcctctgctgttcctgtgggtgggaaatatgccctccgcaggtattgcggtgctgctgctgtggggtctggcctatggcggtgtatcggtgggcctgatgagctggatgatgaaggcggtgccgcaggccgtggagatcgccaccgcgttgtatgtggcggtattcaacatcggcatcgcaatgggtgcgtggggtggtggccgcctgctggatggcgtgggcctgcatgcgaatctgtgggctgcggcggtgttggctgggagtgccctgctgatggctgccatcacccgcaggtag

SEQ ID NO: 496103 - DNA, 2112 bp, Stenotrophomonas maltophilia
atgtccaagctgcgccgtcccaccctggcgctggccattgttgccagcctgtccctggccgcctgtgaccgcccggccgacccggccgtcggtgccaccgcgccggccgatgccgcccccgctgcggccaagccgatgctgggcagtttcggcttcgatgccagcggcatggaccgcagcatcgccgccggcgacgacttcttcggcttcgccaacggcacctgggtgaagaacaccgagattccggccgaccgctcgcgcttcggcagcttcaatgtcattgccgagaagaccctggccgacacccgcgccatcctggaaggggccgccggcaacacccaggccagcggcgacgacaagttgatcggcgactactacgccgcctacatggacgaagccggcatcgagcagcacggtctggcgccggtgcagccgcagctgaaggccatcgatgcgatcgccgacaaggccgggctggcccgcgcactcggcggcgacctgcgcgccgacgtcgacctgctcaacgccaccaacttctacaccgaccgcctgttcggcctgtgggtgtcggtggacatgctgcagccggatcgcaccgcgccgtacctggtgcagggcggcctgggcatgcccgaccgcgatttctacctgggcgatggccgcatggccgaactgcgcaagcagtaccaggcctacatcgcacagatgctgcagctggccggcgtcgccgacccggccggcaaggcgcagcgcatcctcgcgctggaaacgaagatcgcgcaggcgcatgccacccaggaagaaaccaacgacgtgaccaagggcgccaacccctggacccaggccgacttcaatgcaaaggcgccgggcctggactggaacgccttcctcgatgcggcggcgctgggcaaccagcaggacttcatcgtgtggcagcccaaggccgtggccggcctgtccaggctggtcgccaccgagccgctggacgcctggaaggactacctggcgttccacgcgctggaccgtgccgccgcctacctgccgaagaagttcgccgatgcccgcttcgccttccatggcaccgcgctgagcggcacgccgcagcagagcgaccgctggaagcgcgcggtggacgatgccaaccatgccgtcggcgaagcgatcggcaagcgctacgtcgaaaagcacttcgacgccaggaccaaggagcgtgcggacgagatggcgaagaacatcatcgccgcttttgccaagcgcatcgacgcgctgtcgtggatgtcgccgcagaccaaggcgcatgccaaggccaaggtcacgggcctgaccgtgggcatgggctatccggagaagtggcgcgactacaccggcctggagatccgccgtgatgacccgctgggcaatgcacagcgcgccgagctgttcgagtaccagcgcaacatcgccaagctgggcaagccggtcgaccacagcgagtgggcgatgctgccgcagaccatcaatgcgatgaacgtgccgctggagaaccgcctggtgttcccggccgcgatcctgcagccgccgttcttcgacggcgctgccgatgacgcggtgaactacggtgcgatcggtgcggtgatcggccacgagatcagccacggcttcgacaacgccggcgcgctgttcgacgagaccggcaagctgcacaactggtggaccgccgaggacctgaagcagttcaacgccgccggtgatgcgctggccgcgcagttcagcagctacgagccgttccccggcgtgcacgtgaacggcaagctgaccctgggcgagaacatcgccgacgtggctggcctgggtaccgcctacgatgcctaccagctgtcgctgcagggcaagccgggccagaccctggaaggcttcagcccggaccagcgcttcttcctcggcttcgcccaggcgtggcgcagcaagagccgcgagcaggcgctgcgcaattcgctgctgaccgatgtgcatgccccgggccagttccgcgcattgaccgtgcgcaacatcgacgcctggtacccggcgttcgaagtgaaggaaggccagaagctgtacctggccccggacaagcgggtcaaggtgtggtga

SEQ ID NO: 496104 - DNA, 3063 bp, Stenotrophomonas maltophilia
atgcaggatggggtcaggcgtcaagaatggcgtccgccggccgttgaggtcggggacgtggaggattcgttcgcgcatgaagccagccgactgcacaaggaacatcaaccgatgcccgcgctgaaacgggcgttggcccggccgctgcgcgccatcacctggggcggtgtgctgctgggcgtactgctggtgaccggtctggccctcatgctggtcaacgaccaccaccgccgcctggaagcggcgcagcggcagagccgcgcgctggcggtgggcagcgagcgcctgctggcgctggagctgcgcaacctggagcgggccatgaccggcatcgccgccgacgccgcggaactgttccgcagcgtgccggcacaggcgccggccttgctggatgcctccatcggcggcgtgctgcgccggcacgccgaactgcacagcatcgtggtgctcgacagctatggccgcgcattgacggccggcaagggcgacctgcagttgccgttgtggaccgatccgcaacggcgcggctcgggcagcgcgctgtacatcggcccaccgcagcgcgccagcgacgggggctgggtggtcccgctggcgctgccgatggccgatgggcgctggctgctggcacggctgcgctgtggcgaactgcagcgcatcgtcggcggcctggatgtcggtcccaacggattggtctcgatcagcgatgcccagggctacatgctggcccgcgtacccgatccgcatggcacggtgggccgccgctatgacctgccgcgccgggacctgctcggcacgcaggcagtggtcgagctgggcagcatgcccggcgttgtcgacggcgtgccgcgcatcctcaccatcagcacgctcgaacgcagcccgctggcggtgcaggtcggcctggccgacgaagatgtactcgcaccgtggtggccgtacctgaaggcgtcggtggcgatcgtactggcctacatcgcggtgttgctggtactgctgtacgccgtgcgccgcagcacccgcagccagcaggcgatggccgaggaactgaagacgggccacgccgagctgcgcctggcgcaccaggtcgggcgtgtctgcacctggtacgtggatgaggacgccgcgctgctgcgctggtcgccgctggcccgcgagatctttggggtacagaccgacgccttgccggtcgcggatttcttcgcgcgcgtgcatcgcgatgatgccgcgcgcctgcagcaggcctttgaccaggccttcgccggcagcgctgtgctcgaccaggtgttccgcgtggtgcttcccgggggcgaggtgcgctgggtcggcgcgcgcgggcagcgggtggaagtggccgacagcgagcggcgcatgatcggtgcgctgaccgacctgagcgaacgctatcaggcgcgcgagcagatgagcgaagtggaacgccgcttccgcctgctgttcgaccgcaatccggcaccgttctgggtgttcgacccggatacgctgcgcttcatcgaggtcaacgacgctgcagtgcgccagtacggctacagccgcgacgagttcctggcgatgagcatcctcgacatccgcccgcgcgaaggctgggacgaagtgcgtggtgccatccagcgggcgcaggtgggcgatccccccgacgcgaccgtgcgcctgcaccggcgcaaggacggcagtgtgttcgaggtgcgcgcacacctgtccaagctcgacttcgacggacagcccgcgtgcctggtgctggccgaggatgtcagcgagcgtctggcctacgagcgcgacctggcctatcaggcacggcacaacccggccaccggcctgctcaatgtgcgcgccctgaccgaacagctggacgagcaggaggagggctacaccatcgccttcgtgcagctgcgcgggctgcagctggtggccgatacgctgggccgcgagatcggcgatgcggtgctgcagtcgatggcgacccggctcgggggcctgggcgcacgctgtggcacgctggcgttccagccggccgaggatttcgtcttcgccatcggtgccgagcacgatacccagcgcgtgctggacgacctgctgcagatcgtgtcggcgccgatgcgcggcaaggactcgctgcaccagttcgagccgcgcatcggcgtggccgtgcacatcgctggtgacgggcacacggccgagcaggtgatcggcatggccgcgcaggccgcgcatgcggcgcgcgccgagggcaacgtggtggtctggttcgacgcggccgtgaccacgcgcctggccgaccgcctgcgcctggccgggcgcatccatgccgccatcgacaacgaattccagctgtatttccagccgatccggcatgccggcgatggcagcccggcagcgctggaggcactgctgcgctggccgcaggccgatggcagcttcatcccgcccaacgagttcatccagctgtgcgaggacaccgggttgatcctggcactgggccgctgggtgatccgcgcggcggcgaaggcgcagcgccgtctggtcgaggccgggtggggtgagttgccgatcgcggtcaacgtgtcggcggttcagttcttcaacagcgacctggtggccgaattcacccgtgcccagcaggatttcggcctggcccgtggcgcgctgcacgtggagctgaccgagagcagcctgatgcgcaagccggcacaggcgatgcagaccatgcagcgcctgcacgagcagggcatccgcgtgtcgctggatgatttcggcaccggctattccagcatgtcctacctgcagcacctgccgctggacatcctgaagatcgaccgcagcttcgtcgccgacgtggaaaccaatccacgcaatgcctcgatctgccgcgcgctgctgtcgctgggccacagcatgggcctgaccatcatcgctgaaggcgtggagacgccggggcagctggactggctggctgcgcatggctgtgaccaggtgcagggctacctgttggggcggccggcgccgctggaacagatcatcgacgcgctggatgaggtccccgcctga

SEQ ID NO: 496105 - DNA, 882 bp, Stenotrophomonas maltophilia
atggacacccttgaggcgatgcgcgtgttcgtggcggtggtcgagcgcaacggcttcagcgccgccgcccaggccctggacatgtccaccgccggcgttacccgccaggtcgccgcactggaaaagcgcctgtccacccgcctgctccatcgcaccacgcggcgggtcagccccaccagcaccggcgccgcctactacgcccaatgcgtgcgcctgctggccgagttcgacgcgctggaggccagcatcggcgcgcaggcgctggagccctccggcatgctgcgcatcaatgcaccggtcagttggggcatcgcccgcctcggcccactgctggccagttaccgcgaacgctttccgcaggtggaactggacctggccctgtccgaccgcctggtggacatggtcgaggaaggctacgacgtggccatccgcatcacccgcgagccgggccccaccctgatcgcccgccgcttgggcgaatcgcgggtgagcctgtgcgccgcgccggcctacctggccgcacgcggcgcccctcagaccccgcaggacctgcaggcgcacgcctgcctgggctacagctactgggccgccggtgaccactggccgctgcaggggccgggcggcgaagtgaaagtagcggtgaacagcctgctgcacgccaacaacggcgacgtgctgcgtgaagcggcgatcgccggcatgggcgtcatcctgcagcccgacttcctgctggaagacgcgctggccgatggccgcctggtgcgcgtactgccggaatgggaggcctcgccgatcggcatcttcgcggtctacaccagccgcagccacctggcaccgaaggtgcgcagtttcatcgaccatctggtggacaccggggtgtag

SEQ ID NO: 496106 - DNA, 411 bp, Stenotrophomonas maltophilia
atgcacgccacgaccgctcctgtttcgccgctggccccgtatggcgccaccctgctgcgcctggccctgggcgtgctgttcctggtccatgcgctgaccaagctgctggtattcaccccggccggcacggcagcattcttcgagtcgctgggcctgcccggcgtgcttggctacctcaccctcggcgtcgagctggtgatcactgtcgcgctcctgctgggcatctatgcgcgctgggtgggcctggtcggcgtgccgctgctgctgggcaccatcgtcaccgtgcacggcgccaacggcttcggtttcgccaatgccggcggcggctgggaatacccggcgttctgggcgctggcgctggtggtgctgttcctggtcggcgatggcaagtggaccctgcgttcgcgctga

SEQ ID NO: 496107 - DNA, 789 bp, Stenotrophomonas maltophilia
atgtcccgcctgccttcgctgtacatctcccatggttcgccgatgaccgccctgcatccgggccaggtcggtgtgcgcctggccgagctggcgcgcgacctgccgccgccgcgcgccatcgtgatggcctcggcgcactggctgggccggcagccgctggtcggcgcacatccgcagccgccgaccatccacgactttggtggcttcccgcgcgggctgttcgaactgcaatatccggcgccgggtgatccggcactggccgaagaagtggctggccgcatcgccgccgcaggcctgccagtggccatcgacccgcagcgtggcctcgaccacggcgcgtgggtaccgctgcggctgttgcgcccgcaggccgacatcccggtggtgccggtgtcgatccagccgctgctcggccccgagcatcagttcgcgctgggccgcgcgctggcaccactgcgcgaacaaggcgtgctgctggtcggctcgggcagcatcacccacaatctgcacgactggggcgactaccaggacggcaaggaagcgccatacgtgcggcccttcatcgagtgggtggagcagcggctggccgctgatgaccgccaggcgctgttcgattaccgccggcaggccccgttcgccgagcgtgcgcacccgaccgacgagcacctgctgccgctgttcttcgcgatgggagcggccggtgagggcggtttcggcgcacgccgcatcgacgctggcatcgatgccggcttcctggccatggatctgtaccggttcgacggggcatga

SEQ ID NO: 496108 - DNA, 1650 bp, Stenotrophomonas maltophilia
atgcataccattgaagtcgtcctggcgatgctggtggccgttgtcgccagcggctacctggttcgcgtcctcccgttctcgctgccgttgccgctggtgcagatcggcctgggcgcggtgatcgccggcgtgttcaaccgcggccatgcgctggagccggaagtgttcttcctgctgttcctgccgccgctgctgttcctggacggctggcgcattcccaagcagggcctgttccgcgacaagggcgcgatcctcgaactggcgttcggcctggtggtgttcaccgtgatcggcgccggcctgctgatccactggatgattccggtgatgccgctggcagtgtgcttcgcgctggcggccatcgtctcgccgaccgacccggtggcggtcggggcgatcgcctccaaggcaccgatcccgaagcgcctgatgcacatcctggaaggcgagtcgctgctcaacgatgcgtccggcctggtctgcttccgtttcgcggtggccgcggtgatgaccggctccttctcgctggccacggcctcgctgaccttcctgtgggtggcggtggccggccttgccgtgggcgtggcggtcaccctcggcgtgtccaccttccagcgctggttgtggcgccgcttcggcgaagagccgggtgcggcgatgctggtcaacctgctgattccgttcgcggcctacctgctcgccgaagaaatccatgcctcgggcatcctcgctgcggtcgccgccggtatcgcgatgagctacgtcgagctgaccggccgtgtctccggcagcatgcgcgtgcagcgcgcgggcgtctggaacatgctgcagttcagcttcaacggcatcatgttcgtgttgctgggcgagcagctgccgggcatcgtcgagcgcgccaccaccaccatgaacgagtccggccaccagagtgcctggtggctgctggtatacgtggtggtgatcaacctggcgctgatcctgctgcgcctgctgtgggtatggctgtcgctgcgctggaacctgctgcgcgcgcgccgccgtggcctggagcggggcgaggcgccgaactggcgcatcgtggtggcgacctcggtggctggtgtgcgcggcgcgatcaccctggccggtgtgttgaccctgccgctgttcctgcccgatggcagtgcgttcccggcgcgcgacctggtgatcttcctggccgcggcggtgatcctgttctcgctgatcggcgccagcgtggcgctgccgcagctgctgaagggcctgcagctgccagccgattcgggcgagcgcaaggaagaggacctggcacgcaagctgtcctcgaaggccgcgctggccggggtcgaacgcatgcgccagcagctggtgatgaaccagaacaccgagaacgtgcagctgtacaacgatgctgcctcgcgggtgagcctgctgtaccagcggcacctggagaaagacaacgacggccccgacgtggacccggagaaggtgcggcgcatggaactgggttaccgccagctgcgcagcgcgggcctgaatgccgagcgcgaggaactgttccggttgacccggcgcggggtgatctccgatgagatctcgcggcgcctgatccgcaacctggacctgctggaatcgcgcaagcgcgaatga

SEQ ID NO: 496109 - DNA, 294 bp, Stenotrophomonas maltophilia
gtgccgctgaagccggccttggtggccgtcactgtgaatgaagcgatgagcgatacccctcccgaccacctggcgatcaacccggccagccccttccatgatgcgcaggcgctggagcgcggcgttggcgtgcgtttcaacgacgtcgagcgcgacaacgtcgaggaatactcggtcagcgaaggctggatccgcgtgcaggccggcaaggcccgcgaccgccgcggcaatccgatgaccatcaaggtcaagggcaaggtcgaggtgtatttcctggaccagaagccggaataa

SEQ ID NO: 496110 - DNA, 543 bp, Stenotrophomonas maltophilia
atgcccgacaacagcgactatttcgacttcgaggaagacatccacgacttcgacgaggagggcttcgaggcgcgggtctggaacctgctggtgctgatcaacccgggcgacgaagagctggccctgcagcagttcaaccgctggcgcgagcacctgtccgaggacgggcagccgctggaagcggacagcgactggctgccggcgctgttcaccgccatcgcctggcagtccggtttcgatgtggagcgcgatgacctggaatcgctgcagtcggcggtgaacgagctgtcggcgcgcttcaacctgcagctggactggggcggcgacctggacgacgaggacttcgccgagggcctggacggcgtgcagctgatgtccaccgccttcgaccgcctgcgcgagcacaactacacgctgtggagcgtggatgccggcagcgacggcttcaccggcgtgatggcgctgacccgcgacgacgacgcgatgctggcgctgtgctcgctgctgaacgtggaaatccggctgggcagcgacccgttctga

SEQ ID NO: 496111 - DNA, 276 bp, Stenotrophomonas maltophilia
gtgacggtctacgtcgatgacgcggtgcatccctggcgcggacagcgctgggcgcacctgatggccgacaccctggccgagctgcacgcgatggcggcgcagctcggcattcccctgcgggccttccagaacaaggccagcggtgcgcactacgacgtcactaccgagctgcgcgcacaggcaatagcgctcggtgcgcgggcgatttcccggcacaccgaccgtgacctggtcaaagcggtgattgccaacgccagggcgcagtaccggccgtag

SEQ ID NO: 496112 - DNA, 489 bp, Stenotrophomonas maltophilia
atgtcccagaactccaaggccaagcgcgacaagcgcaagaagcagcaggccaagcgcccgttcctccgcctgaatgcccagcagcaggtgcagaaccatgccgtgctgaccaacgaagacggccaggtggtcgcggccatcggcctgcagggccgtgagtggctgctggcgatcggcggccagaccatgggcaacgccgagaatccggtaccgatgctggccatgctcaagcacctggccaacgtgcaggagaaggaaggccgcaaggtcaacctggagtactccgaactgctgcagaagctgctggacaccctggctgccgaatccgagcagaccgctgacgaatacctggacaagctggttgccgagttcgaaggcgtcgacgccgctgaaggcgaagaaggcgaagccgtcgaaggcgacgcggccgaagaagccgctgccgaggccgccccggccgctgacagcgacagcaagccgcaggcctga

SEQ ID NO: 496113 - DNA, 951 bp, Stenotrophomonas maltophilia
atggccgagaccaagcccactgtcatcgtccgccgggtcaagaaggccggccacgccgcccatcatggcggttcgtggaaggtggcctatgctgacttcgtgaccgcgatgatggcgttcttcctggtgctgtggctgatggccaccaccaacaagaacgaccgtgcggccatttccgagtacttccgcaaccccagcccgctgagcgggcagaacgccacgccggcgcccggcatggccggtccgggcggcgccagcacctcgatgatcaagctgggtggtgccaccgacatctcgcgcggcagcagcaacgatcccttccagaaccagaaggaagcggtgccacagccggtggaccagcagcagcgcgacaagcagcagctggaagcgctgatgaaggaactgcaggaagcgatcagcaggagccaggcactggagccgttcaaggaccagctgctgctggacctgaccccggaaggcctgcgcatccagatcgtggacaagcagaaccggccgatgttcgacctcggcagcgctacgctgaagccgtacacgcaacagatcctgcacgagctggccaactacctgaaccatgtgccgaaccggatcagcctgaccggccacaccgacatcaccgcctattcggccgcgcgcggctacggcaactgggagctgagcgccgatcgtgccaacgccgcacggcgtgcgctggtggacggtggcctggaggacagcaagatcacccgcgtggtcggcctgtcttcgtcggtgctgttcgacaaggccgacccgcagaacccgatcaaccgccgcatcagcatcgtggtgatgacccaggccgccgaagcggccgccctggccggtgccggcccgcaggtgggactgtcggcgccgaccgcggacccggacgtgcaggccgcgcaaggtgaggccgcgcccgtggcacattga

SEQ ID NO: 496114 - DNA, 855 bp, Stenotrophomonas maltophilia
atgctcatcatcgttggattcctggtcgtcatcatcagcgtgatcgggggctacctcggtgcccacggccgcctgggtgccctctggcagccctacgagctggtcatcatcggcggtgccgcactgggcgcgttcctggtcggcaccccggccaagacggtcaagcagaccctgcaggccatggtcggtgtcttcaagggtccgcgctacaagcagcaggactacatcgatgtcctcagcctgctctatgaactgctcaacaaggcccgccgcgaaggcttcatggccctggaagaccatgtcgagcggccggccgagagcgccctgttcgccaactaccccaaggtgcaggccgaccaccacctgatcgacttcatcaccgactgcctgcgcctgatgatcggcagcaacatcgagccgcacgagctcgagccgctgctggagctggaactggagaagcaccacgccgaggccatggcgccgtcgcaggtgctgaccaaggtcgccgacggactgcccggtttcggcatcgtcgcggcggtgctcggcatcgtcatcaccatgggctcgatcggcggtgacatcgtcgaggtcggtggccacgtggccggcgcgctggtcggtaccttcctcggcatcctgctgggctacggcttcgtcggcccgatggcggcagcaatggaggcccgcgccgagcaggacagccgcatctacgaatcggtcaagaccgccctgctggcctgcctgcgcggctacaacccgaagatcgcgctggaattcgcccgcaagacgctgccgtcgaacgtgcgcccggccttctccgatttcgagcagcacctgaagacggtcaagtaa

SEQ ID NO: 496115 - DNA, 468 bp, Stenotrophomonas maltophilia
atgactgccttcgacctgacgccccccactgccacccagaccgaggcgctgatcgccggcctcagcagcgaagagcgccgcgtgctgctgcagcacggtaccgaagcgccgttctgcggcgtgttcctggacaacaagcgcgagggcgtctactgctgccggctgtgcgcgctgccgctgttccgctccagcaccaagttcgattccggcaccggctggcccagcttcttcgccccgttcgacccggcgcacgtgcgcgagatccgcgataccagccatggcatggtgcgcaccgagatcacctgcgcgcgctgcggcagccacctcggccacgtattcccggatggtccgccgcccacctacgagcgccactgcctgaactccgtctcactttcgttcaccggcaatggcgagccctggcccgacccgttgcagcgtggcggcgcggaaagcggtgtggcgggctga

SEQ ID NO: 496116 - DNA, 375 bp, Stenotrophomonas maltophilia
atgaaaccgacccttcccctgctgctgatggccctgttgcccacgttggcgctggcccaggtgcctgctgccgacccgacggtcacccgcagcgcgaccaccgtggctccggcgccggtggtaccgccgccgcaggccgcacgcccgcagccgcaggtgctgccgtcgccgcagccggcgcagccgatcaggtccacgggtcctgcccggattgcgcccgccccggcgccgaggccggccgacaaggtctatgaccgcaatggccgcatcgtgcctggcgtgcgcccggctggcccgaaccgggtgttcgattcgcgtaccggccgctattacgacagcgtgccggccggcgatgggcagcagatcaagcgctga

SEQ ID NO: 496117 - DNA, 153 bp, Stenotrophomonas maltophilia
atgaaaaaccagcagaaccgtcatcccggcaaggaaccgcagggccgcaacccgcagcatcagcagcaacagcaacagatggaaccgcagcagccgcacaagggtggcaagcagcaggaacagcgctcgcagaagcatccgcagcagcgctga

SEQ ID NO: 496118 - DNA, 480 bp, Stenotrophomonas maltophilia
atggccacccgtacccgcgaactggacaagatcgaccgcaagatcctgcgcatcctgcaggcggagggccgtatttccttcaccgaactgggtgagcgggtcggcctgtcgaccaccccgtgcaccgagcgcgtgcgccggctcgagcgcgaagcggtgatcaccggctaccacgcccacctggacccggcggcggtgaaggccagcctgctggtgttcgtggagatcagcctggcctacaagtccggtgacatcttcgaagagttccggcgcgccgccctgaagctgcccaatgtgctcgagtgccatctggtctcgggcgacttcgattacctgctgaaggcgcggatcagtgagatggcctcctaccgcaagctgctcggcagcaccttgctgacactgccgcatgtgcgtgaatccaaaagctacatcgtgatggaagaagtgaaggaaacgctgagcctgccgattccggattga

SEQ ID NO: 496119 - DNA, 1305 bp, Stenotrophomonas maltophilia
atgcgagtcctagttctcggcagcggcgtgatcggcaccaccagtgcctggtacctgcgacaggccgggtttgaagtcacggtcatcgaccgccaacccggcccggcgctggagaccagcttcgccaatgctggccagctgtcgttcggctacacctcgccgtgggcagccccgggcgtgccgaagaaggcgatcggctggctgttcgagaagcacgcgccgctggcgatcaagccgggcatggacctggcccagtaccgctggctgtggcagatgctgcgcaactgcacccacgagcgctacgcgatcaacaaggcgcgcatggtgcgcatgtccgagtacagccgcgactgcctgaacgagctgcgcgcgcagatcggcatcgagttcgaaggccgcgacctgggcaccacgcagctgttccgcacccagcagcagctggatgcctctgcgcaggacatcgagatcctggcccagtacggcgtgccgtacgaggtgctggaccgcgccggcatcatccaggccgaaccggccctggcccatgtcgacggcctggttggcgcgctgcgcctgccgcgtgaccagaccggcgactgccagctgttcacccggcgcctggcgcagatgtgcgtggacgccggcgtcgaattccgcttcgaccaggacatcaccggcctggagttcgagggcgaccgcatcaccggcgtgcgcatcgacggcaagcgggaaaccgccgaccgcttcgtggtcgcgctgggcagctattcgccggcgctggtcgcaccgctgggcatgcacctgccggtgtacccgctgaagggctattcgctgaccctgccgatcaccgacccggcgatggcgccgacctcgaccatcctcgacgagagctacaaggtggcggtcacccgcttcgacgaccgcatccgcgtcggcggcatggccgaagtggccggtttcgacctgtcgctgtcgcagcgtcgtcgcgagaccctggagctggtggtcagcgacctctacccgaagggcggcgacctgtcgcgcgcacagttctggacaggcctgcgcccggccacgccggacggcacgccggtgatcggcgccacgccgttccgcaacctgtacctcaacaccggccacggcaccctgggctggaccatggcctgcggctcgggccgttacctggccgacctgatgagcgcgcgccagccgcagatcagcaccgaaggcctggatattttccgctacggccagtacggtcacgccccgcaacatgagaaccgcacatgcgtcctgcccgcgcgctga

SEQ ID NO: 496120 - DNA, 1068 bp, Stenotrophomonas maltophilia
atgcgtcctgcccgcgcgctgatcgatctgggcgccctgcgcagcaattaccggcttgcccgtgaactgggcggtggcaaggccctggcgatcatcaaggccgatgcctatggccatggcgcggtgcgctgtgcacaggcgctggaaggcgaggctgatggtttcggcgtggccaccattgaagaggcgctggaactgcgccaggccgggatccgtgcgccgatcctgctgctggaaggcatcttcgaacccagtgacatggcgctggtggccgagcacgatttctggttcgcggtgggctcgccgtggcagctggaagcgctggtcgcattcgacagcccgcgcccgctgaccgtgtggctgaagctggacagcggcatgcatcgcctcggcctggacgtggacagcttccgcgccgcgcatgcacgcctgtcggcgctgccgcaggtcgagcgcatcgtgctgatgacccacctggcgcgtgccgacgagctggacagcgaacgcacccatgaacaggcggcgaccttcgcgcgcgccatcgacggcctggacggcgagaccagcgtgtgcaattcgccggcactgctgggctggccggatgtacgcagcgactgggtgcgcccgggcctgatgctgtacggcgccaatccgctgccggacaacaccgcgctgaccgagcgcctgcgcccggtgatgacgatgcagtcgaaggtgattgccgagcgctggatcgaggccggtgagccggtgggctatggcgcacgcttcgtggccaaggcgcgcacccgcgtgggcgtggtcgcgcttggctatgccgacggttatccgcagttcgcccccaacggcacgccggtactgatcgatggccagcccggcgtactgatcgggcgcgtgtcgatggacatgctgacggtggacctgaccgcgcatgcgcaggccggcatcggcagtgtggtggaactgtggggttctgcgccgacgctgtcggaactggcgccgcgctgcggcgtgagtgcctaccagctgccgtgcgcggtcaagcgcgtggcgaaagtctacgtgtag

SEQ ID NO: 496121 - DNA, 567 bp, Stenotrophomonas maltophilia
atgaaccgctcgttggccactgccctgctgctggcaggcgccctcatggcgggcagcgcgaacgccgcgccgcgcgccgtcaccgatccggatgcgccccgcgcgctgcaggccaatggcccggtcagcgtgaagtgggacgatccagccggattcaccgaaatccgccagagcaccaaccgcttcgaggccgaacgcggcaactgggtgcagcagctggccagctacgtgcagaccacggcggccaagccgctgcagcccgggcagaccctggacgtgaccctggtcgacatcaagcgcgccggcgactacgagccctggcacggcccgcgcggcagcgacatccggatcatgcgcgacatctatccgccgcggatcaccctgcagtacacgctgaaggacgccagtggtcgcatcgtcgatgagggcgaagccaagctcagcgacaccggctacctgcacaacctggggctgaagagcgacagcgatccgctgcgctacgagaagcgcctgatcgacgactgggtgaagcgcgagctgagcacgcgggctactgctgcacgatga

SEQ ID NO: 496122 - DNA, 1989 bp, Stenotrophomonas maltophilia
atgatggtgcaggcgcccgaacccgacctgcatcatggcgtgcttgagcgcatcaacgctggtttctgcgtgatccaagtgctgttcgagggcgatcgtgcggtcgactatcgtttcctcgaggtcaacgatgccttcgagcgccacaccgggctgaaggatgcgcgtggacagcgcatgaccgagctggaacccaaccatgagcaggactggttccgcatctacggcgaggtcgcacgcagcggccgtcccgcccagttcgagatggaagcgcgtgcgctgggtcgttcgttcgcggtcgacgcggtgcgcgtgggccggccaggcgaggacaaggtcggcatcctgttcttcgacatcaccgcgcgcaagcagatggaagtggagctgggcgagagcgaagcgcgcttcagcgcactggccgacggcctgccgatgccggtgtgggtgctcgatgagcgcggccatgcccgtttcgtcaacagcgccttcagcgagttcttcggtggcgacgagacgcgtgtgccggaagatgtctggcgcggcctggtgcatccggacgatgcgtcggtattcgaatacgaactgcaggaagcgctgaaggcgcagcgttcgatgcacgcgctggtgcgtgcgcggcgcgccgatggccagtggcgttggctggagatgaacgcacgcccgcgtttctcgcggatgggccgcttcatcggcctggccggcagcagcccggacgtgaccgaacgccgcgagatcgaactggcccgcgaggaactgctgcagtccgaacgcgccgcgcgcagcgctgcggagaacatggcgcggctgaaggacgagttcctggccacgctgtcgcatgaactgcgtacgccgctgaccaccatcctcgggtggagtgagctgctgctgcagcgtgtggacaacaccagccctctgtacaagggcctgaacgtgatcgccaacagcgccggcgcgcagaagcggctgatctcggacatgctggacctcagcagcatgctgctgggcaaagtgcagctggaggtggaagtgctggacctgcgcacggtgctgggcgaggccatcggcgcgcaggaactggtggccgaaggcaaggcactggacgtgcacctgcagctgcccgaacagccgagcctggtgctgggcgatgccacgcgcctgcagcaggtgttctggaacctgctctcgaacgcgatcaagttcaccccggctgaaggccgcatcgacctgcagctgcgggccgacggcaaccactgggagatcaccgtgcgcgacaccggtgatggcatcgcacccgaattcctcaatcacctgttcagccgcttccgccaggccgatggcaccaccacccggcgccatggtggactgggactgggcctggcgatcgtgcagcagctggtcgaactgcatggcggcacggtcgctgcggccagcgaggggcacggccatggcgctacgttcaccgtgcgcctgccgcagcaccttcccgatgccgagcggcgcccgctgcgcgaagtgatcagcgggccgatcctggaaccggtgatcgtcgagccgtatccgctgcgcggcatgcacgtgctggcggtggaagaccagccggaagtgctggagtacctgcggcgcatgctggaagagcagggcgccagcgtgtcggcggccagttcggccggtgaggcgctggcgttgctggccgacaccggccatctgcagtaccacgtgatgctgaccgacatcggcatgccgggcatgaatggttatggcctggtgcgcacgctgcgcgaggacatgggcgtggatgccacgaccctgcccgcggtcgccgtcaccgcgctggcgcgtgccgatgaccgccgccgtgcgctggcgtcgggtttccaggaacacgtggccaagccgtactcggtggcgcagctggtggctgcggtacgcaaggtgcaggtaccccgcgccgacagcgcgctgcactga

SEQ ID NO: 496123 - DNA, 294 bp, Stenotrophomonas maltophilia
atgtcccgcatagctccccgtatccataccgatccggcgcagatcgcgcgcctggaagccctgctgccgcagctggaaggtgaaacgcaggtggaactgattctgcacgatggccgtcgcctgctcggcacggtggccgtgaggccaaccgtgcagcagtaccgcaacgtcgctggtgatgaaggcagcaacggccagctgcgcctggatgactacgacacgccggtgcagcagcaccatgtgtggctggacgagattgccagcatcaaccgcctgccacccaaggcgccttga

SEQ ID NO: 496124 - DNA, 264 bp, Stenotrophomonas maltophilia
atgcgagccttgttcgtcggtggcgtggtcgacaacagtgaaatggacctggaaggcagccatccgcccgtgcactaccccgaggacaccggcggcgggcactcgcgctaccggctgcaccaggtcggccatggcgccgatggcagcgtggcctatgcggtatatggcgcaccggacctggccgatgacgaggtggcccgggtggcggaagaacgcgcctacgcgcgccggttcgaagcgacgccgaccttgttcgagcattga

SEQ ID NO: 496125 - DNA, 1065 bp, Stenotrophomonas maltophilia
atggcctccagcgacgacgcccccctgcagaccctgctcctgccgttctcccaaggcgccctgcgctggccggagggcccggtggctttcctgcgtgcccgcgatggctggccgctgcgcgaagcggccggcaaccgcgagctgcactgcgaacagagctttgccccgttcgcgcagccgctgcggctggccgccggctggaccgtcagcggccagctggacgatgtggccggcaagggccgttacccgctggtgctggtgctgccaccgcgccagcgtgaagaagcccgtgcgctgttcgcccgcgcgttggcgctggtcgccgagggcggccgcatcgttgcctgccaggccaacaacgaaggcgcgcgctccggtgaaggcgacctcaagcagctggccggtctcggcggctgcctgaccaagaaccactgccgcgtgtactggaccgccccgctgcagggccagcacgacgccgacctggccaagcgctggtcggcgctggatgcggtgcgcccgatcatgggcggacgcttcctcagccgcccgggcgtgttcgcctgggaccgcatcgatccggcatcggcgctgctggccgagcacctgccggccgacctggccggccgcgccgccgaccttggcgccggctacggctatctctcgcgcgagctgctggaacgctgcccgaagatcaccgcgctggacctgtacgaggccgagcagcgtgcgctggccctggccgaactgaacctggcgccgccgccgcgcgcgctgccgctgcgcttcctgtggcgcgacgtcaccgccggcatcgagccgggctacgacgtcatcatcagcaacccgccgttccacacgccgtcgcgtgccgaccgcccggacatcggccagcgcttcatcgccgtggccgcgcaggcgctgcgcccgggcgggcgcctgtacgtggtggccaaccgccatctgccgtacgagcacaccctcaacgacagcttcggtgcggtgcgcgtggtcgccgagcgcgacggtttcaagctggttgaagcagtgaaggggaagggcaagtga

SEQ ID NO: 496126 - DNA, 702 bp, Stenotrophomonas maltophilia
gtgaagctggtcaagctgatcgccaacctgggctatggcagccgcaagcaggtgcagtggatgttccgcgaaggccgcgtcaccgacgccgacggtgaggtgctgtacgccgatgaccaggtgccgcacgaggcgatccgcgtcgatggcgagccgctggacccgccggtggggctgtcgatcgcgctgcacaagcccgccggctacacctgttcgaccaaggacaccggccgcctgatctacgacctgctgccgccgcgcttccgcgaccgtgatccggtgctgtccacggtgggccgcctcgaccgcgagaccagtggcctgctgctgctgaccgacgatggcggcctgctgcaccggatcatctcgccgaagtcgaagctgccgaaggtctacgaagtcgagttgagcgaggacctgcgcggcgacgaagtggcgttgttcgccagcggcacgctgatgctggagtccgagaagacgcccctgctgccggctgaactcgaagtgctggaggcgcgtcgcgcacgcctggtactgcatgaaggccgctaccatcaggtacgccgcatgttcgccgccaccggcaaccacgtgcaggccctgcaccgcagccgcgtcggcgggctggacctgcaggggctggacgaagggcaatggcggcagctcacttccaccgacctggatacgttgttcgctccatga

SEQ ID NO: 496127 - DNA, 684 bp, Stenotrophomonas maltophilia
atgacccccttcgctgcgctgccgttcctgcccgacgccgtcatcttcgacatggacggcctgatgatcgacagcgagcgggtctcgctggcctgctggagcgaggccgccgacgaattcgggctgggcctggaggaagcggtgttcctgcgcatggtcggcctcggcgaccacgatacgcatgcgttgctgcgcgcgcagggcatcgaggacagcgtgatcgacgcggtggcggcacgttgccatgaactgtacgaagcacgcacgcagaccgggctgccgctgcggccgggcatcctggagctgctggagctgctgaaggcgcacgcggtaccgcgtgcggtggcgaccaccacgcggcagccgcgcgccaaccgcaagttggcggccgcaggcctgctgccgtacttcgatgccgtgatcaccagtggtgatgtagcgcggccgaagcccgcgccggatatctacctgctggccgcgcagcggctgggccaggcgcccgaacgttgcctggcgctggaagattcaccggccggcacgcgggccgcactggccgccggcatgaccgtgatccaggtgccggacctggtgcatccggatgaagagctgcgcgcactgggccaccgcatcgtcggctcgctggtggacgcgcacgccctgctgctgccgctgctgccgaagtag

SEQ ID NO: 496128 - DNA, 1209 bp, Stenotrophomonas maltophilia
atgcgtcgcgtcgtcatcaccggcatgggcatcacgtcctgcctcggcaatgatctggataccgtttcggccgcgctgcgcgaagggcgctcgggcatcaccgccttggccgaccatgccgaagcgggcctgcgcagccaggtcggcggtcgcgtcgacctcgatctggaggcgctgatcgaccgcaagcagaagcgcttcatgagcgatgcggcggccttcgcttacctgtccatgcgcgatgccatcgccgatgccgggctcagccccgagcaggtcagcaacctgcgcaccggcctgatcgccggttccggcggcggctccagcgaatggcagatcggcgcggtcgacctgctgcgcgaacgtggcgtgcgcaaggtcggcccgtacatggtgccgcgcacgatgtgctcgacggtctcggcctgcctggccacggcctaccagatcaagggcgtcagctactcgctgtcggccgcctgcgcgacctcggcgcactgcatcggcgctgccgcggacatgatccgccacggtgcgcaggacatcatgttcgccggtggcggtgaagacctgcactggtcgatgagcgtgatgttcgatgcgatgggcgcgctgtcgaccagcttcaacgagaccccggccagcgcctcgcgtccgtacgacaaggaccgcgacggcttcgtcatcgccggtggcggcggcatgctggtgctggaggactacgaccacgccgttgcgcgtggcgcgcgcatccatgccgagctgatcggctacggcgtgacctccgatggcgccgacatggtcgcgccgtccggcgagggcgcggtgcgctgcatgaagatggcactgcagggcgtcgatcgcccgctggactacctcaacacccacggcacctcgaccccgctgggcgatgtcaccgagctcaacgcgatccgtgaagtgttcggcgatgcggtaccaccgctgtcctcgaccaaggcgctgtccggccattcgctgggcgcggccagcgtgcacgaggcgatctactgcctgctgatgatgcgcgatggcttcgtcgccggttcggccaacatcggcgagctggacccgaaggtggagagcttcccgatcctgcgcgagagccgcgagcagaagctggacacggtgatgtccaacagcttcggcttcggtggcaccaacgctgcgctggtgttcgggcgggtgtga

SEQ ID NO: 496129 - DNA, 516 bp, Stenotrophomonas maltophilia
atgacccgtctccacgcgttcaaccgcgaacagctgctggccagcgcacgcggtgaactgttcggcaccgccgccggccgtttgcccaacgatccgatgctgatgttcgaccgcatcaccgacatccacgaggacggcggaccgcacggcaagggcatggtacgcgccgagctggatatccgcccggacctgtggttcttcggctgccacttcatcggcgacccggtgatgcccggctgcctgggcctggacgccatgtggcagctgaccggcttcttcctgacctggctgggtgcccccggcaagggccgcgcactcggctgcggcgaggtgaagttcaccggccaggtactgccggacgccaagctcgtgcgctacgagatcgacatcagccgtgtcatcaaccgcaagctggtgatggcccagtcggacgcccgcatgtacgtggatgaccgcgaaatctacagcgcgcgcgacctgcgtgtcggcctgttcactgaaaccgggagcttctga

SEQ ID NO: 496130 - DNA, 1095 bp, Stenotrophomonas maltophilia
atgacccgactgcgcaagatcatccacgtcgacatggacgcgttctacgcgtcggtggagcagcgcgacgatccgtcactgcgcggcaagccggtggttgtggcatggcgcggcgcgcgctcggtggtgtgtgcggcgtcctacgaggcacgcgtgttcggcgtgcgttcggcgatgccggcgctgcgcgccgaacgcctgtgtccggacgcgatcttcgtgccgccggactttgcacgttacaaggcggtgtcacgccaggtacgcgagatattcctgcgccacaccgacctggtcgagccgttgtcgctggacgaggcctacctggacgtgaccgagccgaagagcggcatcgaactggccaccgacatcgcccgcaccatccgtgcgcagatccgcgaggagacgaacctgaccgcttcagccgggatcgcgccgaacaagttcctggccaagatcgcttcggactggcgcaagcccgatggccagttcgtgattccaccgcagcgggtggacgccttcctgctgccgctgccggtgaaccgggtgccaggcgtcggcaaggtgatggaaggcaaacttgccgcgcgtggcatcgtcacctgcggcgacctgcggcagtggtccctggtcgacctggaagaggcgttcggcagtttcggccgcagcctgtacaaccgtgcacgcggcatcgacgagcggccggtggaaccggaccagcaggtgcagtcgatctcctcggaggacacctttgccgaggacctgttgctggaagacctgggcgaggcgatcgtgcagctggcggagaagacctggaatgccacgcgcaagaccgaacgcgtcggccacaccgtggtgctgaagctgaagaccgcgcagttccgcatcctcacccgcagtttcaccccggagcgcccgccggaatcgatggaagaactgcgcgacatcgcactggccctgcgcgcccgcgtcgacctgccggcggagacgcgttaccgcctggtcggcgtcgggctgggtgggttccgcgaaaaggaggccatggtgcagggggaattgttcgagcacggaccgagcgattccacatccctctga

SEQ ID NO: 496131 - DNA, 912 bp, Stenotrophomonas maltophilia
atgcgtaccgctgccctgctgcttcccctcgccctggccgccagcttcaccagtgcgccgctgctggccgcaccggccaccacggcgccggcggcggcgacgaaatcccagctgcacctgcagaccttccatcccggcccgcaggcaatgttctcggtgtcctcggtgctgatcgaaggccgccacgacgcgatcctggtcaatgcgcagtttggtgccagcgatgcgcgcaagctggtcgagctgatccgcgccagcggcaagcagctgacaacgatctacatcagccacggtgatccggactactacttcggcctggctaccctgcaggacgcgttcccgcaggcgcgcatcgtcgccaccgcgcagaccgtcgcccatatccagcagacccaggccggcaagctggcctactggggaccgaagatgggtgccgacgtgcccgcgcgcatcgtgctgccgcaggtgctggatggcgatgccctggagctggaaggccagcgcctgccgctgatcggcctggatggcccgaccccggaccgcacggtgctgtgggtgccgtcgctgcgcgcgatcgtcggtggcattccggtggtggccggcgagcacgtgtggatggccgacacgcagacgccgaagtcgcacaccgactggctgcagaccctgcagcggttgcaggcactgaagccgaaggtggtggtgccggggcattacgcgccgggtgcggcgctggatgccagtgcgttgcgcttcaccgcggactacatccgcgcgttcgatgccgagacggcaaaggccagggacagtgcggcgctggtgaaagcaatgcagtcgcgctacccgaagctggatggcgtggcatcgctggagctgagtgcgaaagtggccaagggcgagatgcagtggccttga

SEQ ID NO: 496132 - DNA, 639 bp, Stenotrophomonas maltophilia
atgaagatcgccctcgttggttccaccggcaacatcggccgccagatcgcccgccacgcgctggcccgcggccacgaactcaccgtcatcgtgcgcagcgcgcaggacctcccggccgagctggccggtgcccatccggtgatcgcctcgctggatgaccaggacgcgctggttgccgccatcgccggccacgacgtgctcgccagtgcctacggcccgcgcccgggcgatgacatcggccgcgtcggcgaggtcgccgcgcagctggcggctgccgcgcgcaaggccggcgtgccgcgcctggtggtggttggcggtgccggcagcctggaagtcgcacccggcgtgcagctggtcgacacccccaccttcccggaggcctacaagccgtacgcgctggcccaccgcgaggcgttcaaccgcctgcaggcagtggacgacctggactggaccttcttctcgccggccgccgaaatcggcccgggtgaagagcgcggccagtaccgcgtgcagcccaaggcgttcctggccgataccagcggccacagccgcatcagctacgccgactatggcgcggcgttcgtcgccgaactggaagcgcacgcgtatccgaagcagatcatcaccgcagcgtattga

SEQ ID NO: 496133 - DNA, 930 bp, Stenotrophomonas maltophilia
atggaccgattgaccgccatgaccgtgttcgtcgaggtggccgagcgcggcagcctgaccgcggcggcagaggtgctggacatgtcgcgggcgatggtcagccgctacctggctgaggtcgagggctggctgggcgcacgcctgctgcaccggaccacgcgccgggtcagcctgaccggcccgggcgaggcggcgctggcgcgcttccggcagatgctggcgatcggcgaggaactgcagggcgagctggccagcgatgatccggagccgcatggcacgctgcgggtgactgccagcgtgtcgttcgggcagagccacctggcgcgggcggtggccggctttgttgcgcgccatccggcggcacgcatcgagctgctgctggtcgaccgcacggtgaacctggtggaggagcgggtggacctggccgtgcgcatcgcgcgccagatcgatcccagcctgatcgcgcggcggctggccacctgccgctcggtgctgtgcgcgacgccgtcctacctgcaggcacgcggcacgccgactgctcccgagcatctggccgcgcacaactgcctgacccaccactacgtcggcaagagcctgtggcagctgcaccgggacggccgttcgctgtcggtggcggtaggcggcaacatcagcgccaacgaggcctcgctgctgctggaggcggtgcgggccggtgccggtatcgccatgctgccgacctaccaggtggcgccgctgctgcgtaccggcgagctgatcgaactgctgcccgaattcagcctggacgaactcggcattcatgccgtgtacgcgtcacgacgacagcagcccgctatcatgcggcgattcctggactacctggccgagtgtttcgccagcccggccttccaggatctggattggcgcccaccgggcaaggagaacacatga

SEQ ID NO: 496134 - DNA, 792 bp, Stenotrophomonas maltophilia
atgaaccatggacaggccttgatcgaccacaaccgtgctgcctgggaccgccaggccagcgaagtgcgcgaatggtcgcgcccggtggaaagttcaaccattgccgccgcgcgcgaaggccgctggcaggtgcatctgaccccacgcgcgctgccattggactggctgggcgatgtgcgtggccgccgcatcctgtgcctggcctcgggcgggggccagcaggcaccggtgctggccgctgcgggcgccgacgtcaccgtgttcgatctctccgacgggcagctggaacaggaccgcagcgtggcggcgcgcgatggactgcagctgcgcacggtgcagggcgacatgcgcgacctgcacgtattcgccaacgacagcttcgacgtggtgttccatccgatctccaacctgtacgtacccgacgtgcgcccggtgtggaccgaatgccgccgcgtgctggcgcgcgacggcatgttgatggccagcttctacaacccggtgctgttcgtcggcgcgcgcgatccgcagctcgatgcgcagggcctgatccggccgcagtacgccattccctattcggacctggaagacctgcccgccgcagaacgtgaggcgaaactcggccgcggcgatgcgctgacctttggccacagcctgaccgaactgatcggcgggcagctggatgcggggttcgtcatcgatcgcttcatggaagactggcagccgcagccgcgcttcctgatcgaccgctacctgccaacgttcctggccacccgcgcacgccggatcggttga

SEQ ID NO: 496135 - DNA, 657 bp, Stenotrophomonas maltophilia
ttgtcgtatccctatccgctggtcgtgttcgaccttgatggcacgctggtcgacagcgcagctgatatcgccgaagcactgaaccgcacgctggaagacatcggcatggcacgcgtgccggaagccacggttctgggctggatcggcgacggtgtgcgccgcctggtcgagcaggccgtgcatgccgcgggtcgtgaggtcgacctggccgaagtgatgccggtgttcatggtgcactaccgtgagtgcctgctgcgcagcccgcgcctgttcgatggcgtggccgaagcgctgatgcagctgcgtgcacgcggtgttccgctggcgatctgcaccaacaagcccgaagcgctggtgccgccactgctgcagcacctgggcattggtgatgcgttcgcgctggtactgggcggcgattcgctgccgcagcgcaagcccagcggtgagccgctgcggcacatcgctgcgcacttcgggctggcggtggatgcctgcctgatggtgggtgattcgttgaccgactaccgcgccgctgaagaggcgggtatgccgatcgcactggtgcgttacggttatccgcgtggcctggacctggccaccgcacaggcggtggcggtgattgacgacctgcgtgagttgccggggttgcagggctga

SEQ ID NO: 496136 - DNA, 1842 bp, Stenotrophomonas maltophilia
atgaagctgcagtcccgaatgctgtccctggccgtgctggccgccctgcccgcgctggcccaggccgccgatgacaccaccgcgctcgaccagatcctggtcaccgccacccgcaccccgatcgccctgcaggacagcatcgcaccagcccaggtgatcgaccgcgcgcagatcgaatccagtcaggccacctcgttgcaggaactgctgcgcggccgcgccggcatcaacctgaccaatgccggcgggctcggcaagcagagctcgctgttcctgcgcggcaccaactcgggccacaccgtggtgctggtcgatggcgtgcgcatcaacagtgccgacctcggcctggccatgtaccaggacctgccgctggcgcagatcgaacgcgtggaaatcgtgcgcggcccgcagtccagcctgtacggcgccgacaccatcggtggcgtgatccagatcttcacccgccgcaaccagggcgattttgctccgcacttccagctcggtggtggcagcaacggcctgcgcgaagccagcggcggcatcggaggtggcaccgaacgcggctggttcggcgccgacatcgcctaccagcattccgatggcgtcgatgcctgccgtggctcggcgacgctgttcaccggctgcttcgccgacgaacccgaccgcgacggctaccgcaacctgtccaagagcctgcgtggcggctacaccttcaacgaccagtggaatgtggaaggcagtgcgctgcgcgccgacggcaggaaccactacgacggctattacaactactcggaaatccgccagcaggtgctggccggcaaggtgcgctacaccccgtccgggcgcctggccttcaccgccaacgtcggccgcagcgacaacgagtcggacaacttcggcgacttcggcgcacgcggcagcgcgcagacccaccgcgacagcgcctcgctgcagggtgacttcaccttgaccggaagccagctgctgagcaccggcgtggactggagcgaagacaacctggatggcagcagcgcgggctaccttgtcgacagccgccgcaacaccggtgtattcgtgcagtaccagggccgcttcggccgccaccagctgcaggccagcgcgcgcaacgacgacaaccagcagttcggcaaccacgccaccggcagtctcggctgggcaatgcagctggaccacggcctgcgcgtcaatgccagctacggcaccgccttcaaggcaccgaccttcagcgacctgtacgacccgtggagcggcgtgccgacgttgaagccggagaagtccaagagcgccaacctcggtgtttcgcagcagggccagggctggcattggggcctggacgtgtacgagacccgcatcgatgacctgatcacctacgatgcgtccacgatgaaaatgcagcaggtggagaaggcgcgcatccgtggcgccgaactgaccggtggcgtgctgctggccggcttcgacctcaacgcgcagctgagctacaccgacccgcgcaaccgcacccatggcagcacccagttcgacaactggctgccgcgccgtgcacagcagaccgcgcgcctggacgtcgaccgccgcttcggcgatttccgcgccggcctgaccgtgcagggtgcgggcaagcgctatgacgatgccgccaacgcggtgaaggtcggtggctacggcacgctggacctgcgcgccgagtacgcgctgacgccggcgtggtcgctgctggcacgtgccgccaacgtgttcgaccgccgctacgagacggtggcgtggttcaaccaacccggccgcgaataccagctgagcgtgcgttaccagccgaaatga

SEQ ID NO: 496137 - DNA, 579 bp, Stenotrophomonas maltophilia
atgatcctcgacctggtccgccatgccggcaacggtcgcgatgagttcctcgatggccgcagcgatccaccgcagctggcccgcctgccgcaggaactggtcgacgcctacgctgcgcagccctgggaacgggtgatcagttcgccgcggctgcgctcgctgcacacggcgatggccctggccaccccgcgcgggctggacgtggaagcggaggaggaatgggaagagctggatttcggcgattgggacgggcagtcgctgttcgacctgccggaggatgcactggcggccttccatgccgatccgcatgcattcccaccgcccaacggtgaaagctggggccacttcgagcggcgtatcgcgcgcgcgctggatcgactgctcgatgatgacgacccggtgccgacgctggtggtcagccatggcggcccgctgcgcatggtgctgtcgcaggtctgcggcctgccgatgtcgctgtgctgggcactgcgcatcgaccacggcacgcgcctgcgggtacggctggaacgtggcgaagccgggctggcaggcgagctgctggaactgcagcagccgtaa

SEQ ID NO: 496138 - DNA, 363 bp, Stenotrophomonas maltophilia
atgagcgcgccgaagctgcgcaacatcggccccaagagtgcagcgtggctgcgccaggtcggcctgcgcagccgcgaggacctggttgcgaccggcgcagtcggcgccttcgtcaaggtcaagcgcgccggcttcaagcccagcctgaacctgctgtactcgctggaaggcgcgctgctggactgccactggcaggaactgagcgagccgcagcgtgaggcgctggtgcaggattacgaagcacgcatcgccgcgcatccgctgaaggcggccggcccggcgtcgggtccggtgcatgagcagcgcttcgatgccgacgatgacgcggaagacagcgtgaccgaggatgcggacgaggattga

SEQ ID NO: 496139 - DNA, 483 bp, Stenotrophomonas maltophilia
atgttcgccaatgcctcgcttaccggcagcaagccggaacaatacgcccagctgctggaacaggcccgtggcctggtctacgccgagtccgaccgcatcgccaacgcggccaacctctccgcactggtctaccacgccctgcccgacctgaactgggtgggcttctacctgtacgacggcaaggaactggtggtcggcccgttccagggcctgccggcctgcgtgcgcatcccgctggacaagggcgtgtgcggtgccgccgccagccagcgcgtgacccagcgcgtggacgacgtcgatgccttccccggccatatcgcctgcgattcggcctcgcgttcggaactggtggtgccgctgctgcgcggcgatgaactgatcggcgtgttcgacatcgacagccccaagatcggccgcttcgatgccgatgaccaggccggcctggaagccatcgcccgcgtgttcgtcgaggcgctgggatga

SEQ ID NO: 496140 - DNA, 684 bp, Stenotrophomonas maltophilia
atgccgttgcccgctacgctgccgcccgccctgttcattaccggcaccgatacggagatcggcaagaccgcggccagcaccgcgctgctgcatgcgctgcgccggcgcggcctgcgcgcggtgggcatgaaaccggtggccagcggcagcgaagacctggggcagggcctgcgcaacgaagacgcgctggcgctgcaggcagccagctggccggtgccggactatgccgatctgaacccgtatgcgctgcggcagccgctggcaccggagctggccgctgccgaggacggcgtgcaggtggaactggcgccgatcgtggctgcgttcgcgcgactgcgcgcacaggccgacatcgtggtggtggaaggcgtcggtgggtggctggcgccggtctcggccacgctggaccagctggacctggtgcgagcactgcagttgccggtgctgctggtggtgggcatgcggctgggctgcgtcaaccatgcgcggctgactgcgcagtcgctgcaggccagcggcgtgcagtgcctgggctggatcggcaaccacatcgaccctgcgatgcagcgccaggatgagaacatcgccacgttgcagcagcgcctgccgatgccgtgttggggacggctgccgcatctgccgggagcggatggcgaagcgctgagcgcgcacctgctcgagtga

SEQ ID NO: 496141 - DNA, 1449 bp, Stenotrophomonas maltophilia
atggatacagatgaccagagcgcgatgatcccaccccgctaccaacggctgtccgacgagctggccgaggccatccacggcggacgccttccggttggcagccgcctgccttcgctgcggcagatggccctgcagcgcaggctcagcctgaacacggtgattgccgcctatcgccagctggaggacgccggcctggtcattccgcggccaaaagccggcttcgaggtggcgccgcggttgtcggtgccagagcgttcgctgcgtgataccccgtccgcacccaccgcaccactgcagcaggtgctgatggcccgtgtgctggaagcacagcgccgccccggtgtgatcgacctggcctttgccggtccgcgcgggcgccagttctatccgggcgcgcagctggcccggcataccgcacaggtgctgcgccacggccagcagacggtggagacctacgcgcgccccaacggctcgccacggctgctggcgcagatcgtgcggcgtggcccgcgcatggggctgcacaccgacagcgaacgcctgctgctgacccatggtgcgatggagggcctgcagctggcgctgcgcgcggtcacccagcccggtgatgcggtcggcatcgaggcaccgtcctacttcaacctgtatccgttgctggccaacctcggcctgcaggccatcgagctgcccacccatccgcagcacggactggatgtggatgcgctggacgcgctgctgcagcacacaccgctggccgcactggtggtgatgccgaccgtgcacaacccgctcggctgcaccatgccgaccgccgccaagcagcgcctggccgagctggtcaacgcacggcagctgccgctgatcgaggacgcggtgtacgccgagctgcagttctgcgaaccgccggcgcccctgctgaaggccttcgatcgcgacggctgggtgatggtggtcggaggtttctccaagacactggcgccggattaccgcatcggctggctggatggcggccgcttcgccgagcgcatcgcgctgctgaaattccagtccaccggcggcgagccgcagctgctcggtgacgcggtcgcggcttatctggaagcgggcagctacgagcaccacctgcatcgcatgcgccggctgtaccgcgaacaggtgggacggctgcgccagctggtggccgagcacttcccagccggcacccgcgccaccgaaccgcagggcggattcctgctgtggctggaactgccgggcgtggatacgcgcgagctgttcgagcgagcgctgcaggaggacatcgtgttcatgcccggccaggtctattcacgtggcgcgcgataccgccactgcctgcggctgtcgtgctgccagaccctggatgcgcgcttcatcggcgcggtggaacgactgggcgcgatcgcgcgggagctggcggccgcagcacggtag

SEQ ID NO: 496142 - DNA, 738 bp, Stenotrophomonas maltophilia
atgaaactctcctttgaacagggcatcgccgccggtgtggccggcctggtggccacggccttgattgccggtgtgctgctggttgaccacggcgcgattgcggcgccggtcgaggccagcgcgcagatccaggcactgccggcccccaccggcgatgcggcgttccgcgatgacgccagccacgccagcgtggtgttcgccggtggttgcttctggggtgtgcagggcgtgttccagcacgtcaagggcgtgagcaatgccgtgtccggctacatcggtggcagtgcggccaatgcgcgttatgagcgcgtcagcggtggccagaccgggcatgccgaagcagtgaagatcgactacgacccgcgccaggtcagctacgggcagctgatgcaggtgttcttctcggtggtgcacgacccgacccagctcaatcggcaggggccggaccacggcagccagtatcgctcggcgatcttcagcgacgacgcacgccagcaggctgccagccgcgcctacatcgcccagctcggccaggccggcagctaccgcgcgccgatcgtcacccagctggtcagcggccagcgcttctacccggccgagagctaccaccagaactacatgaccaactacccgcaggcggcctacatccgctactacgacgcaccgaagctggccgcgctgggcaggcagttcccggcgctgtaccggcgcgaggcggtgctggtgccgatgcggtag

SEQ ID NO: 496143 - DNA, 1770 bp, Stenotrophomonas maltophilia
atgctgctgttgctgcttgcctatctggggggcgcgctgaccctgctcagcccctgcatcctgccggtgctgccgttcgtgttcgcgcgtgccgatcgcccgttcctgcgcagcacgctgccgctgctgctgggcatggcgcttacctttaccgtggtcgccagcctggccgcggtgggcagccaatgggtggcacaggccaaccaggtcggacgctgggtcgccctgctgctgatggcgttgttcgcggtcgccctgctctggccacgactggccgaccacctgctggcgccgttccagcgcatgggtgcccgcctgagtgcgcgcgccgatgcggcggatgccgcggggcacggcggcgcgtggacctcgctgctgatcggcatcgccactggcctgctgtgggcaccgtgtgccgggccgatcctcggtctggtgctgaccggcgccgccctgcatggcgccagcgtcggtaccactgcgctgctgctggcctacgcactgggtgcgatcaccgcattggcgctggcggtgtggatcggcggccgggtgttccgcgcgatgcaggcgcggctcggcctcggcgatgtacttcgcaaggggctgggtgtagccgcgctgctggccgtcgtggcgatcagcctcggctgggataccggcctgctgacccgcttgtccacggtcagcaccgcgcgtatcgagcaacgcctgctggatgcagtgcccggcgcgcagccggcggcaccgccgatgatgatgatggccggcgccaatgccggtgccgatgcagcgctgccggtggaaggcacgctgcccgcgctggacggtgccactggctggctcaacagcccgcccctgagtgcacagcagctgcgcggcaaggtggttctggtcgatttttggacctattcctgcatcaactgcctgcgcgcgatgccgttcgtgcacgaatgggagcgacgctaccgcgaccacggcctggtggtggtcggcgtgcacacgccggaattcgccttcgagcgtgacccacgcaacgtgatgaaagcggtgcagcagctgaaggtcgagtacccggtggcgctggacaaccagtacacgatctggcgcgccttcaacaaccgctactggccggcgcagtacttcgtcgacgcgcagggcaacatccgcggccaccagttcggcgagggcaactatgcgcgctcggaacagatgatccgtcgcctgctggccgaagccgggcagaccaatctgccgccaccggccgatcccgctgccgccggcctgaagggcgtggccgtgcaggccgacatgggcaacctgcgttcgccggaaacctacctgggccacgcccgcgccgagcagttcgcctcgcccggcgggcagcgcagcgacgccgcgttcgactacacgctgccggccaccctggcgttgaaccagtgggggctgtccgggcgctggaccgtcaccgatgaggccgcacagctgcagcaggccggcggccgcatcgccttccagttccatgcgcgcgacctgcacctggtgctggcaccgagcgaggacggcaggccagtgcgtttccgcgtctggctggacggcaaaccgctgcccgccgccgatgccggcagtgatgttggtgccgatggcagtggcgtagtcgacgagcaccgcctgtaccagctggtgcgccagcgcggcgcagtcggcccgcatcgcttcgagatcgagttcctcgatgcgggcgtgcaggcctatgccttcaccttcggttga

SEQ ID NO: 496144 - DNA, 573 bp, Stenotrophomonas maltophilia
atgtccctctcccgccgccatctgctgggcctgggcggtgtcgccaccgccgccggcctgttcggcctgggggcctgcagccgcgccgccccggccgccgccgaagcgcgcccgtcgcgacagttcgaggtcatgcacagcgatgccgagtggcgccagcgactgacgccggcgcagtacgcggtgctgcgccagcaggccaccgagcgcccctggagcagcccgctcaacaaggaacaccggcagggcaccttcgcctgcgccgggtgcgcactgccgctgttctcctcgtccaccaagttcgagagcggtaccggctggcccagcttctgggcgccgctgcacaacgccatcggcgaagaccgcgacgtcaccttcgggatgctgcgggtggaggtgcattgccgccgctgcggcggccatctcggccatgtgttcaacgatgggccacgccccaccgggctgcgctactgcatgaacggtgcggcgatggtgttcgctcccggcgccacggatggcactgccgacggctggcgggtgccggtcggttcttcccctgcttccggagcctga

SEQ ID NO: 496145 - DNA, 720 bp, Stenotrophomonas maltophilia
atgtcgaccaaacgcgtgctgatcgttgaagacgatgcccacatcgccgacctgctgcgcatgcacctgggtgatgagggctacgacgtcgcccatgccgccagcggcgatgccggcctgcgcctgctcgagcaggacggcccgtgggatgcgctggtgctggacgtgatgctgcccggcgtggacgggctgcaggtgtgccagcgcgcacgcgcgatggcgcggtatgtcccgatcatcatcatcagcgcgcgcggcagtgaaacgcagcgcatcgtcggcctggaactgggcgcggacgattacctggcaaaacccttttcgatgccggaactggtggcacgggtacgtgcgctgctgcgccgcgccgaggcgatggcgcagagcgcgcgcatcgatgccggcgcgatcgagctgggtgggctgcagctcgatccggtcgcgcgcaccgcttcggtggatggcaacacgctggaactgacgccgcgcgagttcgacctgctgctgttcttcgcccgtcatccggaccaggtgttcgcgcgcatggaactgctcaaccaggtctggggctaccagcacgatggctacgagcacacggtcaacacccacatcaaccgcctgcgcagcaagatcgaacccgacccggccaacccacggcggttgctgacggtgtggggccgcggctacaagctggtcgacccggccggggcggcggcatga

SEQ ID NO: 496146 - DNA, 1470 bp, Stenotrophomonas maltophilia
atgatcaagccgaacctgtggcagaagctggcggtggtgaccgccgcgctgatgctgatgtgctgcatggcgctgctggcactgcagatgcgtgccaacacccgccacgagcaggaagtcgtgcagcggctgtcgctgggcctggccgaacacatcgcccagcgcagcgagctgatggacaccagcggcatgcgcgatgccgcggtgcgcgcgctgttcggccagctgatggcggtcaaccccagcgtcgaggtctacctgctggacgaccagggccgcatcctcggtcacgatgcacccagtggacatctggtgcgcaaccgggtggacgtggcgccgttgcgtcgcctgctggccggtgcaccgctgccgatcctcggcgatgacccgcgcagcgccgatggccgcaaggtgttcagcgctgcaccattgatcgtgcagggccggccggccggctatgtgtacgtggtgctggtcggcgagcaccggcagatgctcgccgacgatcttgccgccggcagccagtggaacaccacgctgtggtcggtggtgctggtcggcagcctcggcctgttggccgggctggtcgcattctactgggtgacgcgtccgttgcggcggctgacccggcggatccaggcctttgacatcgatgcgccgacgccgctgccgccgccggagccgctgcgcgctggtgagcgcgacgaactggtgatcctggaacatgcgcacgcgcagatggcgcagcggctgggcgagcagtggcagcaactgcgccagcaggatctgcagcgccgtgaactggtcgccaacatctcgcacgacctgcgcacgccgttgtcgtcgctgcacggctacctggaaacgctggcgttgaaggacgccacgctgtcaccggatgagcgccgccgctatctcggcattgcgctggcacagagcgccaaggtcggccggctggcgcgcgcgctgttcgaactggcgcggctggagcacggcgaagtgcggctggagtgggaagtgtttgcgctgccggagctgctgcaggacgtgctgcagaagttcgaactggcggcacaggcgcgtggccagcagctgcacgcggcgtttccgcctggcctgccgctggtccgtgcggacctgggcctggtcgagcgggtgctgaccaacctgctcgacaacgcgctgcgccatgcacccgagggtggccagatcgaggtgcgcctgcgcgcgaccgccgacagcgtggaggtctgcgtcgccgatgatggccccggggtagccccggcgctgcgtacccagctgttccaggcaccggccgcgctcggcgcgcggcgtggcgacaacggcggattgggcctgttgatcgtgcagcgcatcgtgcagttgcatggccgccgcatcgaactgcgcgacagcgaacgaggcgcgctgttcgtgtttgccttgccgcgcgcggaaacggcggtctag

SEQ ID NO: 496147 - DNA, 1347 bp, Stenotrophomonas maltophilia
atgaaacgcacaccgtcggcgatgcgcggccacgccttccacttcctgcgctacggcatcggtttcctggtcgcccacctgttgttgatcgtgctgggcctgtgggcctgggacgccctgctggaagaccgcaccgaagccggcctgcaggccgagatgcgcggcacgcacgcgctgctgcagcatcgcttcgccgaaaccccgcgcgagcagtggccggcactggcgcgcgaactcgacgccgatttcgcctacgcgctgcgcatggtgccgctggccgaggcggtgaaggcgctgccggccagccagcgcccgccgttcaacaacggccgcgtacagatcgacctggagcacatgcgcagcctgcagcggatcggcgacagcgactacgccgtgatgctgggcccgttggacgaggcgctgccggacgaaggctggcaggacagcgaagtatccggtgtggcgatcctgctgctgatcctgatggtggcggtggcactgccgatgtacgtgatggtgtaccggctgtggcgcgacgtctcgcagttggcccaggcggcccgccgcatgcgcgacggccagctggacacgcgtgcgccgcgcgccggcaccgcgctggtgcggccgctggccaacgccttcaaccacatggccgagcagctgcagcagctgctggaaagccagcgcgtgctggcccaggcggtcgcgcacgaggtgcgcacgccgttggcacggatgcgtttcggcctggccgacctggaggacactgcgctcgacgatgtgcagcgcgatgcgctgggcgggctgcgcaccgacgtcgatcggctgcagcacctcaccgatgccggcgtcgaatacgccgcactgggccgctgccatcagctgacccgccagcgcctgcagctggcggcgctggtgcgcggcgtggtggcccagttcgcaccgttgccgatcccggtgcagcaggcgttgtcgccggtgggcctggtcaacgtcaaccggcacatgctggaactggcgctgcgcaacctgctcggcaatgcgctgcgttacgcgcgtcggcagatccgcatcgccagcacggtcaatgacggctggctgtgcctgcaggtggaggacgacggccccggcatcgcaccggaactgcgcggccaggtgctgcaaccctatgtgcggctggacccgggcagccccggcttcggcctcgggctggcgctggtgcaggtggtggccgacaagcatggcggccaggtcgaggtgaccgattcggcgctgggcggcgcctgcatccgcctgcacctgccgctggaaaccggcggtgtcgtggaggccgaggcagcctgctag

SEQ ID NO: 496148 - DNA, 690 bp, Stenotrophomonas maltophilia
atgctggatatcgtactggtcgaagacgatgcccgcctgggaacgatggtcagcgactacctgcaacggcatggctaccaggtggcccacgagcgcagcggcgagcgcgccgtggcccggatcctggcggagaagccggccctggtgctgctcgatgtgggcctgcccgaccaggatggtttcgaagtgtgtcggcagatccggccccactatgacggcatcatctgcgtgctgaccgcccgtaccgacaacatcgaccaggtgctgggcctggaactgggggccgacgattacatcggcaaacccatcgaaccgcgggtgctgctggcccgcctgcgcgcccacctgcgccgccaccgccgggtcgaaccgcgtgacggcagcctgcgcttcggcgagctgagcatcgacccgtccacccgcaacgtgcacctgcagggcagcctgctggagctgaccaccgccgagttcgacctgctgttcctgctggccagcaatgccggccagatcctggaccgcgacgcgctgctgcgcggcctgcgtggcatcgccttcgatggcctggaccgctcaatcgatgcccgcatctcgcgcctgcgccgcaagctgggcgacaacccggagcagccggaacggatcaagaccgtccgtggccgcggctacctgttcagccgctcggcatggggatga

SEQ ID NO: 496149 - DNA, 1902 bp, Stenotrophomonas maltophilia
atgagcggcgtggtcggggcctggctgccgcccgccgaggatgagcagctgctgcagcagctggcgccgatgctgcgcgcgctgcagcagcgtgggcgtggccgcatcggctactggaccgacgccgaggccggcctcgcgctgggccattgccgggcgccgaccgatacgccgttgcagccgctgagctcggactgcggtcgctacgtgctgtgcctggacggccgcctgtacaaccgcggcgacctgcaggcgcagctgcgcgatctgccccgcagttgcagcgatgcgcggctgctgctgcaggcgatcgtcgaatggggcgtgcagcgggcgctgtcgcgcatcgaaggcgccttcggtttcagcgtctgggaccgggagtcgcgcgtgctgtggctggcccgtgatccggtgggcgagcggccgctgtattacggctggtatcagggccagttcctgttcgcctcggagttgaaggcgctgcaggccttcgccggcttcgcgccgagcatcgaccaggatgccctgagcctgctgctgcgccacgactatgtgccggcgccgcacaccatctaccgtggcatccacaaactggtggcgggcgcgatgctgcgtatcgatctcagcgaccatgccgcgggttgctccagccaggccgcgcaggggggcgcgcgttactggtgcgcacgcgacgcgatgcagagtgcactgcaggagccgctgcagccggcgccgagcctggaacaggccaccgaccagcttgaagcggtactgcagaaggccatcgcctcacgcatgcactcgcccctggcgtgcggcgcgttcctgtccggcggtaccgactcctcgctggtgacggcgatgatgcaggcacaatcgaccctgccgatcgaagcgtggacggtcggcttcgacgatccggggcatgacgagagcgactgggcgtcgcaggtcgcgcgccatctgggcgtgcagcaccacctgcatcgcatggacgcgcgccagggcctggacctgctgcagcgcctgccgcaggtctggtgcgaaccctttgccgacgcctcacagctgccgacgttgctggccagtgaactgctgggggcgcgcaagccggtggcactgaccggtgacggtggcgatgaactgttcttcgggcatcccagctatggccgcgcgctgcgcaatgcgcgcctgtgtggtggcctgccggactgggtacgcgacctggcgcggcgcagcggcaaccgcatgaacgtcgagcgcggccgcctcggtggttggcgcgccctggtggccgaggtggctgccaatgatgtggaaggccactacctgcagcgcgtgacccgctggcggcagccggcgcaggtggtgctgggcgcgcgcgaaccggtgacgatcttccagcagcaggacacggcgctgccggccgaggcgcgcatccagctgctggatttccgcatggacctggccgagggcatcctggccaaggttgatcgcgcgggcatggcggcgggtgttgaaacccgtgcgccgctgctggacatggaggtggtgcgcctggcctggcggctgccgcagcacctgaagtaccacgatggcgagcacaagctgatcctcaagcacctgctggcgcgctacctgccggaaccgctggtgtaccgccccaagcgcggcttcggcccgccgatggcgcgctggctggctggtccgttgcgcgactgggcggaggcgctgctggatccgcagctgctgcgcaatcagggctgcttcgatgtggcgcgcgtgcgtggtgtctgggaggcgttcctgcggggcgagcgcaagtggcacacacacctgtggaacgtgctgatgttccaggcgtggcacccgcactggcacggtggtcgcgggcgctga

SEQ ID NO: 496150 - DNA, 2100 bp, Stenotrophomonas maltophilia
atgtacgacccgattgtgcgcagtgccgaacgttcgacccgaagctgtcgtccccgccacctggcctggctgcttgccctggccgccggtaccgccgccctgcccggcctggcgcaggctgccagctgtgccggcgtggcccagtgggaccaggccaggatctaccgggccggcgataccctgcagaaaggaggcgtcctctatcgggcgaaccaggacatctggaacgcgccgccggaccatccggccggtgcgccctactacaccaaccttggtgcctgcgatggcagcggcagcaaccagccgccggtggtcagcctgacctcgccggccaacggcgccaccttcagcgccggcagcacggtcaacgtgaccgctaccgccagtgacccggacggcagcgtcgccaaggtcgagttcttccgcgacggcagctcgctgggcgtggccaccggtgcgccgtatgcggccagctgggccaatgccagcgccggcagccacaccctgcgtgcggtcgcgaccgacaacaacaacgccaccaccagcaccccgaccatcaccatcaccgtcaacgccgccggtggcgacaccaccgcaccgagcgtgccgggcgggctggcggtcggcacccgtaccgccaacagcatcgcgctcagctggagcccgtccaccgacaacaccggcggcagtggcctggctggctatgacgtgtaccgcaacggcagcctggtcggttcgccgtccagcgccagctatgtggatggcgggctgaccgcatcgaccacctaccgttaccgcgtgcgggcgcgcgacaacgccggcaacacgtcggcgcagggcaccgaaatcagcgccaccacgctggccggtgacggcggcaccaccggcaagcgggtcatcggttacttcacccagtggggcatctacggccgcaactaccgggtcaagaacatcgacagcagcggctcggccgcacgcctgacccacatcaactacgcgttcggcaacgtgcgcaacaaccgatgcgaagtcggcatcacccagccgtcggatccgaacagcggtgccggtggcgatgctttcgccgactacaccaaggccttcagtgccgccgagagtgtcagcggcagcgctgatacctgggaccagccgctgcgcggcaactggaaccagctcaagcagctcaaggccaaatacccgggcatgaaggtgctgatctcgctgggtggctggacctggtcgcgcggcttctccagcgcagcgcgcccggaaaaccgccaggccttcgtcgcctcgtgcatcgacgcctacatcaagggcaacctgccggtgaccgacggtgccggcggtgccggtgccgcgctgggcgtgttcgacggcatcgacatcgactgggaatacccggtggcctgtggcatcgaatgcggcaagccggaagacaacgccaacttcaccgcgctgatggccgagttccgccgccaactcgatgcggtgcgtccgggcctgttgctgacggtggcggtgggtgccggcatcgacaagatccgtgtcaccgatccggccgcataccacccgtacctggactacatcaacgtgatgacctacgacttccacggcgcgtgggatgcgaagaccaatcaccagtcggcgctgttcgattcgccgaatgatccgtccaccggcgaccagaagctgtacaacagcaacgacgccatcgaggccttcatcagccgcggcgtgcccgccgccaagctcaacctgggcattggctactacgggcgtggctggacgggtgtggccaacgccaacaacggcctgtaccagaccgcgaccggcgccgccccgggtacgtatgaagccggcatcgaggactggaaggtgctgaagaacctggcgtggccgggctacaccgacaacaccgccggtgccacctggatctacaacggcagcacactgtggagcttcgacaccccggccaacatcaaccgcaagatgggttacgtgaagacccagggcctgggcggcgcgttcgtctgggagttcagcggtgacgatgcgcagggcacgctgaccaaggcggtcagtgatggcctgaagtaa

SEQ ID NO: 496151 - DNA, 786 bp, Stenotrophomonas maltophilia
atgctccgatttgccatcgccgccgtgttcggtgcgctcagcctgaccgcctgcgcccagccggctccgccggccgccaaggcgcctgctgccgctgcggccaaggccagcccggccgccaacgcgccggccgaccaggcggtacgtgccgcgttgaccgcgctcaatccgggtttccaggtcgattacatcggtgccgcgccgttccccggcttccgcgaggtcgtcgtttccggccagctgctgtacgtgtccgatgacggccgctacctgttccagtcgcagccttacgacacccgcgccaagggcccggccaacagcgagggcctgcttggttaccgccgcggcctgctggccaaggccaaccacggcgatcgcatcgtgttcgccgcgccgaacgccaagtacaccatcagcgtgttcaccgacatcgagtgtggttactgccgcaagctgcaccaggacatcgccgaactcaaccgcaacggcatcaccgtcgagtacctggcgtttccgcgcatgggcctgggcagcaaggactacaccgacatgatctcggtctggtgtgcagcggatcgtcgccaggccctgaccaacgccaagcgcggtggcagcgtgccggccaggaactgcaccaacccggtggcgatgcagtacgcgctgggccagcagctgggcgtgaatggaacgccggcgatcttcgcgccggatggcacccagctgggcggctacctgccgccggcgcagctgcgtgccgcgctggagaagctgtcggccaagcgctga

SEQ ID NO: 496152 - DNA, 978 bp, Stenotrophomonas maltophilia
atggcccttgtttccacccccgccgaacgccgccagctggtccagcagctgcccgagctgcgcgccgacgacagtgtgcgcatccagcgcttcctcgatgcgatctgggccgagaacggcctggcccgcgccaccctggacagctaccggcgcgacctggaagggctggcgcgctggatggatggacgcgacggtggcctggccggcatcgaacgtcccgggctgttcgactacctggcctggcgcacccgccacggctggtcgccgcgcagcaacgcgcgcctgctgtcagcgctgcgggcgttcttcgccgatggcgtgcgccgtggcgaacgcagcgaagaccccagtgcgctgctcgaccccccgaagctgccgcggctgttgcccaaggcgctggccgagagccagatcgatgcgctgctggcggcaccggacatcgacagcccgctgggcctgcgcgaccgcgccatgctggaactgatgtatgccgccggcctgcgcgtgagcgagctggtgctgctgccggccacggcggtcaacctgcgccagggcgtgttgcgggtcaccggcaagggcagcaaggaacggctggtgccgctgggcgaggaatcgcagcactggctggagcgttacctgcagcagtcgcgcccgctgctggtcggcaagggcaaggtgcatgccctggcggatggtcagaccccgttgttcatcgagccgacgttgcatgcgctgacccggcaggcgttctggcacctggtcaagcgccacgcgcaggtggccggcatcgacgcggcgcggatcagcccgcatggcttgcgccacagcttcgccacccatctgctcaaccgcggtgccgacctgcgcgcgctgcagatgctgctcggccacagttccttgtcgaccacccagatctacaccctggtagcgcgcgagcatctgcagaagctgcacgcccgccaccatccgcgcggctga

SEQ ID NO: 496153 - DNA, 546 bp, Stenotrophomonas maltophilia
atgcaggatacgagggccactgcgggcacggccagctttgcgtatgctcggcgcatgtcccgccctgccaccgacacggcccctgcggccgctactgaaacgccccgtccgcgcgcgctgctgccctggcgcatgctggcgatggtctacgacgcgctgccggtgctggcgctgtggatgctggccggcacgctgttcaccctcgcctacaccttcagcggccacgcgcagcgcgagaacatcgcaccgttcagcgcttggcagtggctgctgtgggcggtgtgctgggcgatcacggggtggtatgccacggccagctggcgccgcggcgggcagacgctgggcatgcggccgtggcggctgaaactgcagtcgcgcgatggcacgccgttgcggcgcggccagctgtggctgcgcttcgcggtggggacgctgtcgctgctgctgggcggtctgggattctggtgggcctgggtcgaccgccaacgcctgacctggcacgaccgcgccagcggcacccgcctggtgcgcatgcccaagcggtga

SEQ ID NO: 496154 - DNA, 222 bp, Stenotrophomonas maltophilia
atgctcggctggcaggcggtgcgcaaaaagcagccgagcatgggctcggctctacagaatccagcacgctgggccgggatgctggtggtcgtggcacggatgccgaagcggtggattgccccggtagcgccgggcatggccccgcgctaccagaatcagcccgacttgcgccggaacaacagtccggacacggcaagcatcacgatcggcggcagcgcatag

SEQ ID NO: 496155 - DNA, 1107 bp, Stenotrophomonas maltophilia
atgaggctgcgcccgatgcgtttcgatctgtacctgggccagtcggtgttcaccacggtgctgctgacctgggcggtgctggtcggcctggacgtggtgatggcgttctccggcgagttcaaggacatcggcaagaacggctacaccctgggccatgccgccgcctgggtgctgtacacggtgccgcgccgcgcctacacgatgttcccgaccgccgcggtgatcggcgcgctgatgggtctgggccagctggccgcgacctcggagctgaccgccctgcgtgcgctgggcctgtcgcgcaagcgcctgagcgtgtcggtggcgatcgcgttgtcgctgctgaccgcagtgatggtgctcagcgccgagacgctgggcccgtgggggcaggaccgtgccgatgcattgaaggccagtgccaagtgggggcgggacatctccaccacccgctactccggcctatgggcacgcgaaggcgacaccttcctcaacgcccagagcggcgaggaacagctggtgggcgacaagggcacgcggctgatcctgcgtgacgtgcgcctgtaccggatcgccgaagacggcaatatcgcctcgttgacccatgccgccaccgccgagcacgacaaggacggttgggtgctgaccggggtgcgtcgcgacaccttcggcgagcgctcggccacccgccaggaagtggcgcgtgagccgtggaactcgaagctggatccggcggcgctggccaccggcatcgccaagccgcgaaacctcagcgtggccgagctgagtaccagcattgcctatcgccagcgcaacgggctggatgcgcgcgatttcgaggatgtgtactggagccgctggttctacccggtgaacgtgctggcgctgtgcctggccgcggtgccgttcgcgttcgggtcgctgcgtagcggcggcatgggcaagcgcctgttcctgggcatcctgtttgcactgggcttctggctgctgcagctgttcttcggccgcatggccggtgcgctgaagttcgattaccgcattgcctatgcgctgccgccgatcgtgatgcttgccgtgtccggactgttgttccggcgcaagtcgggctga

SEQ ID NO: 496156 - DNA, 1083 bp, Stenotrophomonas maltophilia
atgctgaagctcgaccgatacctgctgggcgatttcgtccagagtttcctggctaccctgatcgtcctgctggtggtcagcgtgggcggcgtgctggtggacatcctcggcaacatcgccgacggacgcctgccggccaagctgctgttctcccagctgggcctgcagttcatcgcctacctgccgctgatcctgccgctggcgctgatgctgggcctgctgctggccgtggcccggctctaccgcgactcggagatggcggtcatcaccgccattggcgtggggcccaagcggctgctgcggccactgctgatgctggtggtgccggtggtgctgctggtcggcgcctgctcgctgtggctgggcccgtgggccggccggatggccgagcagatgatcatcgaggccaaccgcagcgtgctgatggccggcctggagccgggccgcttcaccccgctgcccaatggcggcgtggtgtacctgtcctcgatctcgcccgatggcacccagctgggcaaggtgttcctgcagcgccagaaggatgaccgcctggaagtggtgtccgccaatggtggccgcatgttcttcgagggcacccgccagcgcttcctggagctggatgacggccaccaggtggaaggcccggtggccggcgcgctggattaccggctggcgacctttgcccgcaacgacgtggccctgcccgacggtgcacagacccgcaccgaggacgacccggaactgatgccgaccctgcagctgatcggcgatgagcgcccgcaggcgcaggcgcagttgcaccgccgcctggcaccgccgctgatcgcgctggccttcgccctgctgaccgtgccgctgggccgcagctcgccgcgccagcagcgctacggccgcatgatgctggccctgatggcctacatggtgggcaccaacctgatgttcatcggcagtggctggatcgccaacggcaagattccggccgtgctcggcctgtggtggttgaccgtgccgctgctggcgctggcaatctggatgtatgcacgtgatggccgtctgggccgctcgaagggagcccgcgcatga

SEQ ID NO: 496157 - DNA, 1479 bp, Stenotrophomonas maltophilia
atggccctcgaattcaccctgaaccacgttgctccggccgccgccaccgttgattgcctggtggtcggcgcgtatgccgaccataccctgaccccggccgcgcaggccctggacgccgccagcggtggccgcctggccgccctggcccagcgtggcgacctgtccggcaagaccggcgcgaccaccctgctgcacgacctgccgggcgtgaccgcgccgcgcgtgctggtggtcggcctcggcgacgccgcccgcttcggcgtgccgcagtacctgaaggccgtgggcgacgcggtgcgcgcgctgaaggccggcgccgcccgcagcgcgctgttcaccctgtccgaagtggccatcaaggaccgcgacgcggcctgggcgatccgccaggcagtgatcgccgccgatcacgccgcctaccgctacaccgccaccctgggcaagaagaaggccgacgatgccggcctggcccagctggccgtggccggtgacgacgcccaggccctggcccagggccaggccatcgccgccggtgtcgagttcgcccgcgagctgggcaacctgccgccgaactattgcaccccggcctatctggccgacgtgggcgtgaagttcgccggcgagcacgagggtgccgaagccgagatcctcgacgagcaccagatggaagcgctgggcatgggctcgctgctggccgtggcccgcggttcggccaaccgcccgcgcctggtcgtgctgaagtggaacaatggcggcgacgccaagccctacgtgctggtcggcaagggcatcaccttcgataccggtggcgtcaacctgaagacccagggcggcatcgaagagatgaagtacgacatgtgcggcggcgccaacgtcatcggcaccttcgtcgcggcggtcaaggccaagctgccgctgaacctggtggtggtggtgccggcggtggaaaacgccatcgacggcaacgcctaccgtccttccgacgtgatcacctcgatgtcgggcaagaccatcgaagtcggcaacaccgacgccgaaggccgcctgatcctgtgcgacgcgctgacctacgcacagcgcttcgagccggccgcgctggtcgacgtcgccaccctgaccggtgcctgcatggtcgccctgggccaccagaccgccggcctgatgagcaagcacgacgacctggccaacgagctgctggccgccggcgagcacgtgttcgaccgcgcctggcgcctgccgctgtgggacgagtaccagccgatgctggattcgaccttcgccgacgtctacaacatcggcggccgctgggccggcgcgatcaccgccggctgcttcctgtcgcgcttcaccgaaggccagcgctgggcccacctggacatcgccggcgtcgccagcgatgaaggcaagcgtggcatggccaccggccgcccggtcggcctgctgagccagtggctgctggaccaggtcgcccgcgcctga

SEQ ID NO: 496158 - DNA, 426 bp, Stenotrophomonas maltophilia
atgccccgcgccgacttctacctgatcgccaagccccgcttcctgaccgagccgttgcgcctggtctgcgaactggcgcgcaaggccaacgacgccgggctgttcaccctggtgctggcccgtgaccaggcccaggccgaggaactggacgagctgctgtgggcgttcgacaacgatgcctacatcccgcaccagattgccggcgaagacatggacgaggaagaggccctggtgctgatcgccgtacccggcaccgacgcgccggcacgcccgctggtgatcaacctgcgcgatgagccctggctgggccagtgcgagcgtgtgctggaagtggttccggccgatccggaagcgcgcgaaccgctgcgcgagcgctggcgccagtacaaggccgccggttacgacctcaacaagcacgacatgtga

SEQ ID NO: 496159 - DNA, 192 bp, Stenotrophomonas maltophilia
atgcgcctgctgatcgccctgattcttccctggctgtccttcttcaccatcggccggccgctggccgggatcgtctgcctgatcctgcagatcaccctgatcggctggctgcccgccgccatctgggccgcctacgcggtcagccagtaccacaccgaccagaagatccgccgcgccctcgggtcgcgctga

SEQ ID NO: 496160 - DNA, 2829 bp, Stenotrophomonas maltophilia
atgacccaactcgcctccagctacgacccgacgtccttcgagaccgacctctacgaggcctgggagaaggccggccacttcaagccgtccggcacgggcgagccgtacaccatcctgctgccaccgccgaacgtgaccggcaccctgcacatgggccatgccttccagcagaccctgatggatgcgctggtgcgctaccaccgcatgcgcggctacgacacgctgtggcaggtcggtaccgaccatgccggcatcgccaccgaaatggtggtcagccgcaacctggcgctggaaggcaagggcgagacccgcgattcgctgggccgcgaaggcttcatcggcaaggtctgggagtggaagcagcagtccggcgacaccatcgaacgccagatgcgccgcctcggcacctccgccgactggtcgcgcagcactttcaccatggacccgcagccatcggcggcggtcaacgaggccttcgtgcgctggtacgagcagggcctgatctaccgcggccagcgcctggtgaactgggacccggtgctgaagaccgccatttccgacctggaagtggagagcgccgaggaagacggcttcctgtggtcgatcgcctacacgctggatgacggcctgagctacgaacacgtcgagcgcgatgccgacggcgtggaaaccctgcgcgaaacccgcgactacctggtcgttgccaccacccgcccggaaaccctgctgggcgataccgcggtgatggtgcacccggaagacgagcgttacgcgcacctgatcggcaggaacgtggtgctgccgttgaccggccggcgcgtgccggtgatcgccgacgactacgtggaccgcgcgttcggcaccggcgtggtcaaggtcaccccggcgcacgacttcaacgactatgaagtgggcgtgcgccacagcctgccgatgatcaacctgttcaccccggtggcggcgctgaacgagaacgcgccggaacgcttccggggcctggaccgctatgaagcacgcaaggccgtgctggccgagctggaagacctgggcatcctggtcgagaccaaggcgcacaagctgcaggtgccgcgtggcgaccgaaccggccaggtgatcgagccgtacctgaccgaccagtggttcgtgaagatggacgacctggccaagcgtggcctggacctggtcgaggacggaagcattgccttcgtgccgccgaactggatcaacacctaccgccactggatgaacaacatccaggactggtgcatcagccgccagctgtggtggggccaccgcatcccggcgtggttcgatgccgccaccggcagctgctacgtcggtcgcagcgaagaggaagtgcgggccaagcacaacctgggcagcgaggtggtgctgaaccaggaaagcgacgtgctggagacctggttctcctcgcagctgtggccgttctccaccctgggctggccgaaccaacaggccatggccgagcgcggcttcgaccgttacctgccgtcgtcggtgctgatcaccggcttcgacatcatcttcttctgggtggcgcgcatgatcatggccaccgacaacctggtcgggaagatcccgttcaaggacgtgtacttcaccggcctgatccgcgacggccagggccagaagatgtccaagagcaagggcaacgtgctcgacccgctggacatcatcgacggcatcaccatcgacgacctggtcgccaagcgcaccggcggcctgatgcagccgaagatggtggagaagatcgagaaggccacccgcaaggaattcccggacggcattgctgcccacggtgctgatgcgctgcgcttcaccatcgccgcgctggccacccacggccgcgacatcaagttcgacatgaaccgcgccgagggctacaagaacttctgcaacaagctgtggaacgccagccgcttcgcgctgatgaacaccgaaggtgcggcgttcaccggcgtgccgaccccgcgcaccgatgccgagcgctggatcctttcgcgcctggccgccaccaccgccgaagcgcagggccatttcgccgcgtaccgcttcgacctgctggcgcagtgcctgtacgagttcgcctggaacgcgttctgcgactggttcctggagctgagcaagccggcactgaacggtgccgacgcggctgatgccgaaagcacccggcacaccctgctgtacgtgctggaagcgctgctgcgcctgctgcacccgctcaccccgttcatcaccgaacagctgtggcagcagctggccccgcgcctgggcctggccgaaaccacgctgtcgctgcgcccgtacccgaccgccgccgaattcgccggtgatttcgcccaggccgaggccgacgtggaatggctgaaggcggtgatcagtgcggtgcgtcgcgtgcgcagcgaattgaacgtcgcgccgtccaggcaggtgccgctgcgcctgcaggccggcctggagcaggaccgcgtgcgcatcgaacgcttcagcgcctcgctgtcgttcctgctgaagctggacagcatccagtggctggccgagggcgaaagcgcaccgccggcggccgccgcgatcgtgggcgagctgaagctgctggtgccgctggaaggcctggtcgatctcgatgccgagcgcgcgcgcctggacaaggagatcaagcgcgtggaaggcgagcaggaaaagagcgaaaccaagctggccaggttcaccgacaaggtgccaccggcggtggtcgaccaggagcgcgtgcgcctggtcgactggaacacccagctggccggcctgcgcgagcagcgcgcgaagctgtaa

SEQ ID NO: 496161 - DNA, 822 bp, Stenotrophomonas maltophilia
atgccgctttccatcttcctgctcgtcctcgctgccgcggcgctgcatgccagctggaatgcgatcgtcaagcgcggcccggacaagttcctcggtaccgtgctggtgaccggcagtgccgcgttgctgtcggccgccgccctgcccttcctgcccttcccggccgcgcacagctggccctggctggctgcgtcggtgctgctgcaggtgacctactacgggctggtcgcgcgttgttaccagcaggtcgacatgagcctggcctacccgctgatgcgtggcagcgcgccgatcctggtcgcactggccggcaccctgctcggtgagccattgcccgccgcagcgtggctgggcgtggtgctggtgagcaccggcatcctgtgcatggcactgggtgcgcgtggcggccaactgcgcctgccgctgctgaccgcagcgatgatcgccacctacacgctggtcgatgcgcagggtgcgcgccagtccggcagcgcgctcagctacacgttgtggttgttcctgctgtcgggcatcccgctgccgctgtgggcgttgtatacgcgcggcggcgcggtactggactatgcgcggcagcattggccgctgggactggccggtggcgtcggcaccaccgcctcctatgcgatggcgttgtgggccatgacccaggcgccggtggcaatgatctcggcgctgcgcgaatcctcgatcctgttcgcgctgctgatctcggtgttcctgctgcgcgagcgggtgccgcgcacgcgctggctggcagcgtcgctcatcgtgggcggcgtgctggcgttgcggctggcgtga

SEQ ID NO: 496162 - DNA, 498 bp, Stenotrophomonas maltophilia
atgagcgcggtcacccggcccggcccggtcagcctgcgtgcgttgcgcgagagcgacctcaatgcggtaatggcgatcgaactgcgcggctacccttttccctggacccgcggcatcttcatcgactgcctgcgtgccggctatcccggcctggcgatggagcgcgatggcctgctggtcggctatggcgtgctcagcatcgccgccgatgaagcgcacgtgctgaacatctgcatcgatccgctggcacagtcgcgcgggctgggccgccagctgctgcgcgcgctggtgcagctggccgccgaccgtggcgcacagcgcgtcttcctggaagtgcgtccgtccaatacgccggcgctggcgctgtatcacagcgaaggattcaatgagatcggccgccgcccgcgctactacccggctgcacagggccgcgaggacgcggtcgtgatggcgatcgaactggtcgacggcgatctgcaggaaatgccgccgctgtaa

SEQ ID NO: 496163 - DNA, 504 bp, Stenotrophomonas maltophilia
gtgagccaggacctgcccgtgctgtggtcaccggcccagcaggcctggctgcaggccatgggctacgccgtctatcacgatggccagctggctgccgagctggatgccgcgctgcagttgagcgtggccgaagccgaggccagcgtcgccccgccggaaccggtgcgggcccccgtgccgtcgcgcgaacagcatgccggggtggcgcccgcagcccgcccggaacggccggcaccgccgcgccgcgaaacgccggtcagtgccccggataccgtgccggcggctgagcgcccgatgcccagcggcaacgcgcgccagccggtggtccgcctgccggatcgcctgcagatcgcgctgctgcgtgcgtccggctgcaacccgaacgacccggctacgcagcggttgatggacagctggccgctggaccagctgcgccacgacccggccgccaagcgtgcgctgtggccgcagctgcgtgccctgcgcaagcggggcacgccatga

SEQ ID NO: 496164 - DNA, 777 bp, Stenotrophomonas maltophilia
atggacccgatcacaccgccgccgcgctcgcgcacgatttacctgctgcccaacctgttcaccaccgccggcctgttcgccggtttctacgcgatcatcgccgcggccaacggggatttcgtcaatgccagcatcgccgtgttcgtggcggcggtgatggatggcctggacgggcgcgtggcgcgcctgaccggtaccagcagcgaattcggcgtgcagtacgactcgctggccgacctggtcagcttcggcatggccccggcgctggtgatgtaccactggtcgctgtcgtggctgaagttcgacgatccgctgctcggccgcgtcggctgggccgtggccttcctgtatgcggcctgcgcggcgctgcgcctggcccgcttcaatacccaggtggcggtggtcgacaagcgctggttcgtcggcctggccagcccggcagcagcgggcctgatgatgtccttcgtctgggcgttcgccgatggcaacctgggctgggacggcaaccagctgcggtacgtggcgctggcggtgacgatcatcgctgcgctgctgatggtcagccgcatccgcttctggagcttcaagggtggcgctgccaagggcacccgttcggaccgcgtgccgttcctggtgctggcactggtgccggtggcgatcgcgattgcggtcatcgacctgccgcgcgtgctgttcgcggtcggcatcctgtacgccttgtccggcccggtgatgtgggccgtgcagcgcctgcgcaagaagcccgaggccgcgtga

SEQ ID NO: 496165 - DNA, 378 bp, Stenotrophomonas maltophilia
atgcgtgccctgtcctgccttggatgcctgctgctgttggccagtgccaacgccttggccggccccgtctacaaatggaaggacgcccatggcgtaacccagtattcggagaccccgccggcgggcaagcagttcgagacccgcgagcaggcccgcaccccgcaggccgcagccagcaccgagaccccggccgcgccggtccccgggcagtgcagcacggcccgggccaacctggccctgctggacggtggtggccaggtgatgcaggacaccgatggtgatggcaaggccgataccccgttgactccggagcagcacaccgcgcagaggggattggcgcaggccgccatcaaggcgtactgcccaccggccggttaa

SEQ ID NO: 496166 - DNA, 1704 bp, Stenotrophomonas maltophilia
atgcgcctctcccagttccacctgcacaccaccaaggaaacccccagcgacgccgagctgaccagccatcggctgatgctgcgcgcgggcatgatccgcaagctggcatcgggcctgtacacctggtcgccgctgggcctgcgcgtactgcgcaaggtcgagcgcatcgtgcgcgaggaaatggaccgggccggtgccgtggaattccagatcccgaccatccagccgaaggaactgtgggagcagaccggccgctggcagaagttcggcccgcagctgctgaagatcaaggaccgcaaggaccaggtgttctgctacagcccgaccgccgaagaagccgcctgcgacttcgcgcgcagcgagctgtccagctacaagcagctgccggtgaacttctaccaggtgcagaccaagttccgcgacgagatccgcccgcgcttcggcgtgatgcgttcgcgcgagttcctgatgaaggacgcctattcgttccacctgcacgatgagtgcctggtgcgcgaatacgagaacatgaagtcggcctacagccgcatcttcacccgcctcggcctggatttccgcatggtgcaggcggactccggtgccatcggcggtgatgcgtcgcaggaattccacgtcatcgccgattccggcgaggacgcgctggtgttctccaccggctcggactacgcagccaacatggaagcggcgattgccgccgatccggcgccgcgtgcggccgccaccgaaacgatgcgcaaggtggatacccccacccagaagacctgcgaggacgtcgcggcgctgctcggcatcgacctgcagcgcacggtgaagtcggtggcgctgatcgccggcgaaggcaaggcacagcagttcgtgctggcgctggtgcgtggcgaccatgaggtcaacgagatcaagctggccaaggtcgccggcctggacgagcagcgcttcgccagcgaggcggaaatcgccgagcacctgggcagcgtgccgggcttccttggcccggtcgcgccggccaaggccatccgcgtggtcgccgatcgcgaagtggcggcgatggccgacttcgtcgtcggcgccaacgaagccggtttccacctggccggcgtcaactggggccgcgacctgccggaaccggaagtggccgacatccgcaacgtgcgggccggcgaccgtgccgtggacggcggtgaactgaagatcgcacgtggcatcgaagtcggccatgtgttccagctcggccgcaagtacgccgaagcgctggatgccaccgtgctggacgagaacggcaaggccgcggtgatggcgatggggtgctacggcatcggcatctcgcgcgtggtggctgccgcgatcgaacagaaccatgacgatgccggcatcatctggccggacgcgatggcgccgtggcaggtggtggtgtgtgtgatcaacccgaagggcgatgcggccgtggccgacgccgctgccaacctgctgcaggagctgcgcgacgcgggcctggacgctgcactcgacgaccgcggcctgcgcccgggcgcgatgttcgccgacatggagctgatcggtattccgcatcgcgtggtggtcagcgaacgcggcctggccgctggcacctacgagtaccgctcgcgccgcgccagcgacgcggagaacctggacaaggcctccctgctgcagcgtctgcagggctga

SEQ ID NO: 496167 - DNA, 384 bp, Stenotrophomonas maltophilia
atgagcattgacctgaccggcctgtcagcacgcgagctgggcgccctgatccgtaccgccaagaagcagcagaccatcgtcgccaagcgccggccgatcaccaaggtccgggcccagctgaccaagctggccaagaccgagggttacaccatcgaagaactgttcggcagcgccccggccacgcgtgcccgcaaggccgccccggccgccaaggccccgtcgaagaccgccggccgcaagctgggcaaggttgcaccgaagtaccgcaacccggccaatccgaaggaaacctggaccggccgtggcaagcagccgcgctggatggctgaactgaccgccaagggcaacaagaagccggaagatttcctgatcaagaaggcctga

SEQ ID NO: 496168 - DNA, 1260 bp, Stenotrophomonas maltophilia
atgtccgcagacgctcacacgatccccacgccccaggccacctacgcacagcgcgtggcctttgtttccgagatcgccggacgcctgcacagctatggcaccacggcccagcgcctggaaacggcggtggtggcactggcccgccagctcgatctggattgtgaaccgtggtcgaatcccaccggtatcatcctcagcttcagcgatccggcgcaggcgatcggctccagcgacatcacccgcgtgatccgcctggcgcccggtgagaacgacctgcacaagctcagcgtcgccgaccatatcgccgaagaagtgtccaacgggcggatgagcatcgcccaaggccataccgcgctgcgccagctggacaaggatccgggccggcgcggcaagctgcgcaccatcctgtcattcaccctcggcgcggccggcgtggccggcatgtggaagctgccgtggctggacatcgccaccgccggtgtcatcggcctgatgatcggcctgctcggcatggtcaccgaccgccgcccggccacccgcgaagcggccgaggcgctggcggcgctgctggccggcatggtcgccaccctggtggcgtccttcattggcgcgctcaacctcaatacggtgatcatcgcctcgctggtggtgctgctgcccggcatgtcactgaccaatgcggtcaatgagctggccagccagcactgggtgtcgggcaccgcgcgctttgccggcgcgctgaccaccatcatgaagctcagcgtcggcgcgatgatcgcggtaaccctggccgacgtgctcgggctggatccggtgatccgcgccgcgcggccgcaggggccgtgggtggagtggggttcgctgctgaccgcggcctttgcgttcgcgatgctgttcaaggccaaccggcgcgattacccgtgggtgatcgccgcctcggtggccggttatgcgatctccaagttcggcggccatgcctggggcgcgccggccggcatcttcctgtcggcgatgctgctgaccgcgggcggcaatctgttcggtcgcctgatcgggcgtccaggcgcgatcatccgcctgcccggcatcatcatgatggtgcccggcagcaccagcctgcgcggtgttctgaccctggtccaacaacaggatgtcggcgccggccagagcgtgttcctcaccgtgctcaacgtggtgatggcgctggtcgccggcctgctgttcggcaacctgctgatgcccgctcgcaagaccctgtga

SEQ ID NO: 496169 - DNA, 1122 bp, Stenotrophomonas maltophilia
atggcccacgtcaccccgaacctcgccccccagctcgaacaggatgcccatgacccgggcctgatccacctgtccggcacctggaccttgaagaccgcgctggccgcggccgaggtcctgcacggcgttcccgacaagctgaccggcatcgatgccaccggcatcgagcagctggattcggccggcgtgctgcaggtgctgcgcgtggcccaccgtgccgatctgcacgaggacgcactgcagttccgcgcggaccaccaggcgctggtgtgtaccatcgaggaagtggccgacgaccgccccaagcccaagcgcgatttcggcgtgctggccgcgctggaacggctgggtgtcagcgtccacgccactggccacaacatcaaggcgctgtgcagtttcctcggcgagaacctggtcaaggcggcccggctggtcaaggaaccccgccgcttccggctgaccgccaccgtgcaccagatggagcaggtggggctggatgcggtaccgctggtggcgctgctgtcctacctggtgggtgcggtgatcgcattcctcggctcgaccatcctgcgcgacttcggcgccgagatctacgtggtcgagctggtcaacatcgccttcctgcgcgagttcgcggtactgctgaccgcgatcgtgctggccggccgcaccgccagtgcgttcaccgcgcagattggtgcgatgaaggcacgcgaggagatcgatgcaatgcgcacgctgggcctggacccggtcgacctgctggtgctgccgcgactgctggcgctgctggtcaccctgcccttgctgaccttcatcgcgatgatcgcgggcctggccggcggcatcaccgtcggcgcgttcgacctcgacatcccgccgcagatgtacatcgcgcgcatgcacgagacgatggaagtgcggcacctgctggtcggcctgtccaaggcacccgtgttcgcgctggtgatcggcctgatcggctgcctggaaggactgaaggtcgagggcaccgcgcagtcggtcggcgagcgcaccacctccagcgtggtgcagacgatctcgctggtgatcatcatcgacgccttcgcggcgttgtggttcatgcacatggactggtga

SEQ ID NO: 496170 - DNA, 828 bp, Stenotrophomonas maltophilia
atgagcacatccgccctccccgactccatcgacatgcgcgacgaccagggccacgaactggccatccgcgtgcgtggcctggtcaaccgcttcggcagccagaccgtgcacgaagacctggatctggatgtgcgccgcggcgaaatcctgggcgtggtcggcggctccggtaccggcaaatcggtgctgatgcgctcgatcctcggcctgcgcgtgcccgatgccgggcagatcgaagtactcggccgcgacgcgcgtgccgacgacgccgagagccggctgcacatcgagcgcaacaccggcgtgttgttccaggacggcgccctgttctcctcgctgaccgtgggcgagaacgtgcaggtgccgctgaaggaacaccatcgcgagctgcccgagcgctggcactacgaactggcgctgctgaaagtgaaactggccggcctgcccgccgatgcgatcaacaagctgccctcgcagctgtccggcggcatgcgcaagcgcgccggcctggcccgtgcgctggcgctggatccaccgctgctgttcctggacgaacccaccgccgggctcgacccgatcggcgcggccgcgttcgaccgcctgatcaagaccttgcaggaagcgctggggctgaccgtgttcctgatcacccacgacctggacacgctgtacgcgatctgcgaccgggtcgcggtgatcgccgaccgcagggtggtggccaacgcacccttgcctgacatcgagaaactggatcatccgtggatccaggaatacttccacggaccccgcgcgcgcgccgcgcgtggcgaacagatcgagagtgcctga

SEQ ID NO: 496171 - DNA, 927 bp, Stenotrophomonas maltophilia
atggaaaccaaagccaactacgtgctgatcggcgcgttcaccctgatcaccggcctggccctgctggccttcggcctgtgggccgccaaatattcctccgaccgtacctggcaagagtaccgcgtggtgttccgcgaagcggtgaccggcctgtcggtgggcagcccggtgcagtacaacggcatcgcggtgggctcgatcaccgaactgaacctggtgccggacgacccgcgccaggtagtcgcgcgcatccgcctgaactccaacacgccggtcaagaccgatacccgcgccaagctggcgatcaccagcctgaccggcccgtcgatcatccagctcagcggcggcacgccgcagtcgccggcgctgaccacggtcaacaaggacccggcaccgatcatcccgaccacgccctctgcgctgcagaacatcaccgacgtcgccaaccgcatcgtcgagcgcatggaccagatcctcagcgaccgcaacgtggcctcgatcaacgcgacgctggccaacctggagacgatcagcggcggcctggccgaccgtgaccagggcacgcaggcgctgctgctcagcgcgcgcgatgccgcccgcagcctggacaccacgctgaagaccaccaacggcaccatcgagcgcctggacaggaacctggtgcagcagctgcccggcatcatcgacaagctcgacgcgaccctggccaagctcgactcggccgccggcaacgccgattcgatccttggcgagaaccgcgccgcgatcaacagcttcgccaacgatggcctcggccagctgggcccgacgctgaccgaactgcgcggcctgatccgcgacctgcgccgggtcagcgaccgcctcgagaacaaccccgcgcgctacctgctgggccgcgacgcaccgaaggagttcgaacccaaatga

SEQ ID NO: 496172 - DNA, 642 bp, Stenotrophomonas maltophilia
atgagcccgaccacccttccacgcctgttgctggccgcttcgatggtcaccctgctggggggctgctccatcctcggcagcagcgagaaatccgcggtgacgctgtactcgccatccgtgcaggtcaaggcagacccggcgtggccgcaggccagctggcagctggtactggccaagcccagcgccgcgcgcatggtcgacagcccgcgcatcaatgtgcggccgacaccgtcgcagcttgagatctacaagggtgccagctgggcgcagccggccaccgacatgatcgaggacacgctgctgcgtggcttcgaggattccggccgcatccgcggcgtggcccgcagcaccgccggcatccgcgccgactacaagctgtccaccgatgtgcgccgcttcgaatcggattaccagggccaggccacgcccaccgtggtgatcgaggtcaacgccaagctgatccatgtcgccgaccagcgtgtggtcgctgaccgcaccttccgccaggcgcagccggtcggcagcaccgacgtaccggcggtgaccgccgcgttcgagcgtggcctgcagcagctggcgcaggacgtggtgggctggacgctgcagagcgggcaggccgaccagccgaccgttgcgcgctga

SEQ ID NO: 496173 - DNA, 588 bp, Stenotrophomonas maltophilia
atgctgttcccccacgacctgcccgatgccgatgtcctgcacctgccgggatggctggctgcggccgaggccgaccagctgctgtattcgctgcaggccgaagtgccctgggaaacccatcgcatccgcatgttcggcaactgggtggactcgccgcggctgagctgctggatcggcgacccgcaggcccgctatcgctattccggtgccgagttcgtgccgcgcccctggccgccggtgttgcaggccatgcgcgggcgcctggaagccgaaggccacggccgcttcaacagcgtgctgctgaaccgctaccgcggtggcggtgactacatgggctggcacagcgatgacgagccggagctgggcccggccccggtgatcgcttcgctgagcctgggcgcggcgcgccgattcctgctgcgacgccgcgacgacccggcacgcaaggctgaattcgtgctgggccacggcgacctgctgctgatggccggacagacccagcgcttctaccagcacgcgctgccgaagatggcgcgggtgcacggcgagcggatcaacctgacgttccgttggatttcgccgcgttga

SEQ ID NO: 496174 - DNA, 633 bp, Stenotrophomonas maltophilia
atggcgtggacccgtgacgagatggcggcacgcgccgcccaggagctgaccgatggcgcctacgtgaacctgggcatcggcctgccgacgctggttgccaatcacattcccgaaggcgtggacgtgtggctgcagtcggagaacggcctgctcggcatcggcccgttcccgaccgacgctgaagtcgacgcggacctgatcaatgccggcaagcagacggttacggcgcgtgccggtgccagctacttcggcagccacgacagcttcgcgatgatccgcggtggccatgtgaacctggccatccttggcgccatgcaggtcaccgacaagggtgacctggccaactggatggtgcccggcaagatggtcaagggcatgggcggggcaatggacctggtcgccggcgtgcagcgggttgtggtgctgatggagcacactgccaagaacggcgagcacaagatcctggccgaatgcacgctgccgttgaccggcgtgggcgtggtcgaccgcatcatcaccgatctggcggtgttcgacgtgactgaaaagggcctgttgctggtggaggccgcgccgggtgtcagcgatgaagagctgaaggaaaagaccggcgtcgcgttccagcgcggctga

SEQ ID NO: 496175 - DNA, 735 bp, Stenotrophomonas maltophilia
atgagcaatccggcaacgaccggcgcaaagcgcggcaagcgcttcgccagtgcgacggaggccctgcagggggtggtcgccgatggacagaccctggccgtgggcggctttggcctgtgtggcatccccgaggcgctgatcgctgcgctgcgcgacagtggcgtcaagggcctgaccgtgatctccaacaatgccggtgtcgatggcttcggactgggccagctgctggaaacccggcagatcagcaagatgatttcgtcctacgtgggcgagaacaaggaattcgaacggcagtttctggctggtgagctggagctggagttcaacccgcagggcactctggccgagcgcctgcgtgccggtggtgcgggtattccggcgttcttcactgccaccggctatggcacggtggttgccgagggcaaggaaacccgcgagttcgacggcaagcactacgtgatggagacggcgctgcgcgccgatgtggcgctggtcaaggcctggaaggccgacgaggccggcaacctggtgttccgcaagaccgcacgcaacttcaacccggcctgtgcgatggccggcaaggtctgcatcgtggaagtggaggaggtggtgccggtcggtgccatcgacccggaccaggtgcacctgccaggcatctatgtgcaccgcatcgtgcacaacgcgcatcctgagaagcgaatcgaacagcgcaccatccgcgcggagggcaactga

SEQ ID NO: 496176 - DNA, 1347 bp, Stenotrophomonas maltophilia
atgcccctgcccgccttcaaggcctatgacatccgcggccgcgtgccggaagaactgaacgaagatctggcccgccgcatcggcgttgccctggcggcgcagcttgcgccgggcccggtggtgctgggccatgacgtgcgcctgaccagccccgcgctgcaggatgcactggccgcaggtctgcgcggtaccgggcgcgaggtgatcgacatcggcctgtgtggcacggaagaggtctatttccagaccgaccacctgggcgcggccggcggtgtgatggtcaccgccagccataatccgatggactacaacggcatgaagctggtcaaggaaaacgcacgaccgatcagctccgatactggcctgttcgcgatttccgatgcggttgccgccgatacgtccgcggcacagccgccgcgtgccgcgcagagcgcgcagcacgacaagagcgcgtacatccagcacctgctgagctatgtcgacgctggcaagctgcgaccgctgaagctggtggtcaacgccggcaacggcggtgccggggccatcgtcgacctgctgtcgccgcacctgccgttcgagttcatccgcatctgccacgagccggacggcagcttccccaacggcattcccaacccgctgctgccggagaaccgcgccgccaccgccgacgccgtgcgcgaacacggtgccgatttcggcattgcctgggacggtgacttcgaccgttgcttcttcttcgaccataccggccgcttcatcgagggctactacctggtcggcctgctggccaaggcaatcctggcgcgcaatcccggcggcaaggtcgtgcacgacccgcgcctggtctggaacaccgtggacatggtcgaacaggccggcggcgtaccggtgcagtgcaagagcggccacgctttcatcaaggaaaagatgcgcgccgaagacgcggtgtacggtggcgagatgagcgcccaccactatttccgcgagttcgcctatgccgactcgggcatgattccgtggctgctgatcgcccagctggtttccgaaagcgggcgctcgctggccgactgggtcgaagaccgcatggctgcctacccgtgcagcggcgaaatcaatttcaaggtcagcgatgccaaggccgccgtcgcacgcgtgatggagcacttcgcagcgcagtcgcccacgctggaccacaccgatggcatcagcgccgacttcggcgactggcgcttcaacctgcgcagctccaacaccgagccgctgctgcgcctgaatgttgaagcccggggcgatgccgcacttatgcaggcacgtaccgacgacatctcccgcctcatccagcagtaa

SEQ ID NO: 496177 - DNA, 1404 bp, Stenotrophomonas maltophilia
atgagcagcatccagcccgtcatcctgtccggtggatccggtacccgcctgtggccgctgtcgcgcgaggcgtacccaaagcagttcctgtcgttggcgggcgaactgacgatgctgcaggccacctggaagcgcgtggcgccgatcgccgcgcgtggaccgctggtgatcgccaacgaagagcatcgcttcgtagccgcggagcagctgcagcaggttggcgccgagccagccgcgatcatccttgagccggtcggccgcaacacggcaccggcgatcgcggtggccgcgctggaagccacccgcgacggcggcgacgcgctgctgctggtgctgccctccgatcatgtgatcaacaacgagactgcattccgcagcgccgtccaggccgccgccgctgccgccgaagccggaaagctggtgaccttcggcatcgtgccgaccggcccggaaaccggctacggctatatcaaggccgccgatggccagggcctgcgcgcggtcgagcgcttcgtcgagaagcccgacctgggcaccgccacccgctacgtcagcagcggccagtactactggaacagcggcatgttcctgttcaaggcctcgcgctacctgcaggagctggaacgcttccagcccgccatgctcgccggcagccgccaggcctggcagcaggcgcgtcgcgatgccgatttcacgcgcctggacaaggaggccttcactgccgttccgtccgattcgatcgactatgcggtgatggagaagaccgccgatgccgtggtgattccactggatgccggctggaacgatgtcggctcgtggaccgcgctgcgcgatgtctcgcagcaggacggcgatggcaacgcccaccagggcgacgtgatcgccatcgactgccgcaacacctatgcctacgcacagcgcctggtggcgctggtcgggctggatgacgtggtggtggtggaaaccgacgacgcggtgctggtcggcaaggccgaccgcatgcaggacgtcaagacagtggttgcgcagctgaaggccgagggccgcagcgaggccacctggcaccgcaaggtctatcgcccgtggggtgcctacgattcgatcgacaacggcgagcgcttccaggtcaagcggatcacggtcaagcccggcggcacgctgagcctgcagatgcatcaccatcgcgccgaacactggatcgtggtcagcggcaccgctgaagtgacccgtggtgacgaggtgatcctgctcagcgagaaccagagcacctatattccgctgggcgtgacccaccgcctgcgcaacccgggcaagctgccgctggaactgatcgaagtgcagtccggcagctacctgggcgaggatgacatcgtgcgcttcgaggatacctacgggcgccgctga

SEQ ID NO: 496178 - DNA, 894 bp, Stenotrophomonas maltophilia
atgaccgtgctggtgttcggtggcaacgggcaggtgggccaggagttgctgcgcgcgctggcgccgctggggaaggtgattgcaaccacgcgcagcggccaactgcccgacggaagtacctgcgaaacggccgacttcggccagcccgacagcctgccggcattgctggaccgcgtgcagccgtcgctggtggtcaatgcggccgcctataccgcagttgatcgtgcggagcaggaggtcgaagcggccttcgctgccaatgcgcaggcgccgggcgtgatcgcgcgctggtgtgcggcgcatggcgtgccgttcgtgcattactccaccgactacgtgttcgacggccagggcagcgcgccctaccgcgaggacgagccgaccgcaccgctgggcgtgtatggcaccagcaagcgcgatggcgaggacgcggtgcgcgcggccggtggccgccatctgattttccgcacggcgtgggtgtatgcctcgcacggcgcgaacttcctgcgcacgatgttgcgtgtgggtgcagagcgtgacgtattgcgtgtggtggctgaccagatcggtacgccgacgccggcggcgctgatcgccgatgtcaccgcgcaggcactgcagcatcctggacagttgtcgggtacctggcacctgaccgccagcggccagaccagctggcatggctttgccgaggccatatttgccgaggcgttggccagcggcgtgttggccaaggtgccgacggtcgaggcgattcccagttccgaatatccgaccccggccaagcgcccggcctggtcggtgctggacaaccgcaagctgcagcaggatttcggcgtcgtgctgccgagctggcaggatggcctgaagcgggtgatggcggagctggcctga

SEQ ID NO: 496179 - DNA, 558 bp, Stenotrophomonas maltophilia
gtgaaagtgattgaaaccaagttgcccggctgcgtggtgatcgagccggcggtgttcggcgatgcccgcggttatttcttcgaaacctggaacgccgagcgcttcgccgcgctgggcctgccggaccgtttcgtgcagagcaacgtgtcgacctctgcgcagggcgtgctgcgcggcctgcattaccaatggccgcggccgcagggcaagctggtcagcgtgctggaaggtgaggtctatgacgtggccgtggatatccgccgcggttcgccgaccttcggccagtgggaagcggtggtgctgagcgcggagaacaagaagcagttctggattccggagggctttgcccatggctttgctgtgttgtccgagcgtgcggtgttcagctacctgtgcaccgaggtttatctgaaggacttcgatgccggcgtgcgctggaatgacgcaggcattgccgtggactggccggtcagcgcaccgaccctgtcagccaaggacgagaacgcaccgttcctgaaggacattgctgaagatcgcctgccggtctacgtgccatga

SEQ ID NO: 496180 - DNA, 888 bp, Stenotrophomonas maltophilia
atgacccagcgtaaaggcatcatcctcgccggtggctccggcacccggctgtatccgatcaccaagggcgtcagcaagcagctgctgccggtgtacgacaagccgatgatctattacccgctcagcgtgctgatgctggcgggcatccgcgaagtgctgatcatcaacaccccgcacgagcaggcgctgttccagcagctgctgggcgacggctcgcagtggggaatggacatccagtacgcggtgcagccgagtccggatggtctggcccaggcctacctgatcggccgcgacttcgtcgccggcaagccgagctgcctggtgctgggcgacaacatcttccacggccacggtctgcgagaagtgctgcgcaacgccgaccagcgcgagcagggcgcgaccgtattcggctactgggtcaacgacccggagcgctacggcgtggccgagttcgacaaggacggcaaggtcatcgatcttgtcgagaagccggagaatccgcggtcgaactatgcggttaccggcctgtatttctatgacggcaatgccagcgactatgcggccgagctcaagccgtcgccgcgtggcgagctggagatcaccgatctgaaccagcgctacctgcgcgagggccatctgcatcttgaggcgctcggccgtggttacgcctggctcgataccggcacccatcagtcgctgcttgaggcgtccaacttcatcgagaccatccagacccgtcagggcctgcaggtgtgctgcccggaagaaatcgcgttcggcaagggctggatcaacgccgagcagctggaagcactggctgcgccgttgatcaagaatggctacggccagtacctgcacaagctcgccctgcgtggagtcgttccgtga

SEQ ID NO: 496181 - DNA, 1056 bp, Stenotrophomonas maltophilia
gtgcccacatggcttgtcaccggcggtgccggctttatcggcggaaatttcgtcctcgaggcagttgcccgtggcatcaaggtcatcaacctcgacgccctgacctacgccggcaacctgaagaccctgtccagcctggacggcaacccgaaccacgtgttcgtgcagggtgacatcggcgacggtgctctggtgacccgtttgttggccgagcaccagcccgatgcggtgctgaacttcgccgccgagagccacgtcgaccgttccatcgatggcccgggtgcgttcattcagaccaacgtagtgggcaccctggggctgctggaagcggtgcgcgactactggaaggcgctgccagccgagcagggcgccgccttccgcttcctgcacgtgtccactgacgaggtgtacggcaccctgggtgagaccggcaagttcagcgaaaccacgccgtatgctccgaattccccctattcggcgtcgaaggccgcttcggaccacttggtccgcgccttccaccacacctacgggctgccggtgctgaccaccaactgctccaacaactacggtccgtaccacttccccgagaagctgatcccgctggtgatcgccaaggcgctggctggcgaaccgctgccggtgtacggcgatggcaagcaggtgcgcgactggctgttcgtgtccgaccactgcgaagcgatccgcaccgtgttggccaagggccaggtgggcgagacctataacgtcggcggcaattcggaaaagcagaacattgaagtggtgcaggcgatctgcgcactgctggaccagcgccgtccgcgcgaagacggccagccgcgcagcagccagattacctacgtcaccgaccgccccggtcatgaccgccgctatgcgatcgatgcctcgaagctgaagaacgatctgggctgggaaccggcctacaccttcgaacagggcatcaccttcaccgttgactggtacctggacaaccaggaatgggtcaacggcgtgctggacggcagctaccgtctgcagcgcatcggcaccgcagcctga

SEQ ID NO: 496182 - DNA, 747 bp, Stenotrophomonas maltophilia
atgaaaatcctcgtcgcgtacaagcgcgtggtggactacaacgtccgcattcaggtcaagccggacggttccggcgtggtcaccgacggcgtcaagctgtcccccaaccccttcgatgaaatcgccctggaagaggccctgcgcctgcgcgacaagggcatcgccagcgaggtcgtggtcgccaccatcgccccggccgatgcccaggcgcacctgcgcaacggcctggccatgggcgccaaccgcgccgtccatgtggtcaccgaccaggccatccagccgctgaccgccgcgcgcaccctgctcaagctgatcgagaaggaacagccggacctggtgatcctgggcaagcaggcgatcgacgacgacgccaaccagaccggccagatgctggccacgctgtgggggcgcccgcaggcgaccttcgccagcaagctggacattgccgacggcaaggccacggtgacccgcgaagtcgacgccggcctggaaacgctggaagtcgatctgccggccgtggtcaccaccgacctgcgcctgaacgagccgcgcttcatcaagctgccggacatcatgaaggccaaggccaagccgctggagaccctgcagctggccgacctcggcgttgaagccgccgacaccttcaagaccacccagtacgccgcgccgtccaagcgcagcaagggtgtgatggtcaaggacgcggccgaactggttgccgcactcaagcagaaggggttgctgtaa

SEQ ID NO: 496183 - DNA, 939 bp, Stenotrophomonas maltophilia
atgagctggattctcgtcatcgccgagcaccacgacggcaagctcaacgccgccaccgccaagaccgtcagcgctgctgccgccatcagcggcgccagcatcgacgtgctggtgctggccgccgatccggctgccgtggctgccgaggccgcgaagatcgctggcgtcgccaaggtcctgaccgtggccaacgctgccaacgcgcaggccatcgcccaggtgctggcaccgcagatcgcgcagctggccaagggttacacccacgtgttcggcccgtcgaccaccttcggcaaggacctgatgccgtgcgtggccgccctgctgggcgtcaaccaggtttccgacctgatgagcgttgaaggcagccacaccttcaagcgcccgatctacgccggcaacgcgatcatcaccgtggaagccccggccgaccagatcgtggtcgccaccgtgcgtgccgcctcgtggccggaagccgcccagggcggcagcgccaccatcgaagcggccagcgtcgatgctgccctgccgacccacacccgcttcgtcggcctcgccgctggtgccagcgaccgcccggacctgcagagcgccaagcgcgtggtctccggtggccgtggtgtcggttcggaagagaacttcaaggtcatcttccagctggccgacaagctcggtgccgccgtcggtgcctcgcgcgctgcggttgatgccggctacgtgcccagcgacctgcaggtcggccagaccggcaagatcatcgcgccggaactttacgtggccgtcggcatcagtggcgccatccagcacctgaccggcatcaaggatgccggcacgatcgtcgcgatcaacaaggatccggactcgccgatcttcgagattgccgatatcggtctggtgggcgatctgtttgcgatcctgccggagctggaaaaggcgctctga

SEQ ID NO: 496184 - DNA, 957 bp, Stenotrophomonas maltophilia
atggacttcttcgtccgcgtgttcttcgtgcagagcgcgtttgctatcggtcatgcctactattcacgcatgagcagtaccgaagcgatcaaggtcttctaccagaaaagattcttccgaatcgctccgctgttttacttcatgatcctcacaggcgtggcttttcggctggccatggatcaaccgatgccacctctgctcgacttcatgctgtcaggaagcttcctgtttacgcttgtaccaggcaagcagagcggcctcgtcggcggcggttggtccatcggtatcgaatggcttttctacttcatgttcccgctgctgctttcgaccatcaggacagtcaagtcggcagcactcgcgtgggtagtgctatgcccgattgcagtactttcaaagcgctacctgcaggacagctttgatggccaactgaacgagttcgcatcactcaacgtactggtccacagccaatatttcgttctcggcctccttatcctacatctcagccgtgccggcatgccgacagcacgcaatgcaatgcagcgccaagccgtaggtgttgctttcctggcgctgctggcatgcaccatctattccttgcacgcaccgttcggcctgccagaagaagttctgctttcgattgcagcgcccttgatggtcggcatgtcgatagcgggtttcccgcgatggctcgacaacaaggtaacccgctggcttggccttgtaagctacagcacctatctggtgcagttcccgctgatccaactcctgcagatgcatggcatctacgcgcaaatagatgcgcacatcggacacggtggactcgcatttgccactgcagctttggtcacgctcgcctgcgtgttagtgacggcagctttcacatattacttcgtggaagtacctggccaacgtctgtacgacaagctgcgcgggggcaggctcacgcgaacctcataa

SEQ ID NO: 496185 - DNA, 936 bp, Stenotrophomonas maltophilia
ttgaaaatcagtcttgtcataccggtcttcaatgaacaagaggccatccccatcttttaccgggcggtgcagatgctgcctggacttgaggggcatgatctcgagcttgtttttgtaaatgacggcagctccgatggaaccgagtcggtcatcactgcgttggcggcggcggatcccaaagtcacgctgatcaatttctcgcgtaatttcggtaaagaaccagcattgctggctggcatacacgcagcgcgtggcgatgtcgtcatcccgatggatgtcgatctccaggatccactggagttgcttcccgccatggtcgaaaagttcaaggcaggtgccgatgttgtactcgcacggcgcgttgatcgcggtagcgatggcttcctcaagcgaaacagtgccaactggttctacaaattgatcaatgcgatttcagaaagtcctgtagaggcaaacgttggtgacttccgcctgatgtccaggcctgtcgttgaagcgatcaagcaactgcccgagaaccggctgttcatgaagggcttgttgagttgggttggcttttcaaccgactttgtcgactactcacgacccgagcgctctgccggtgtctcgaagttcaatggttggaagctgtggaattttgcgcttgagggaatcacctcgttcagtagcgcgccgttgcgcgtgtggacgtacgtcggcagcacgattggatttttctcgattgcctacggggtctggattgtgatcgacaagctgctgcatgggaacgcagtgcagggttactcctctttgattgcagccattctctttctcggtgccgtccagttgattggaattggcgtcctcggtgagtacatcgggcgtatctattccgaggtgaagcgtcgtccccgctacatcgtccgcagcacagtgcagcatgagaagaaggactga

SEQ ID NO: 496186 - DNA, 372 bp, Stenotrophomonas maltophilia
atgagcagtcgccgatggatgccattcctgcgatatgcggtcactggtggcctgaatactgccgtgcactggatgatatttgtgcttctggtatggctgggtaacccacagtccatctccaacctctgcgcgttcctggtggcggtcacattgtctttcttcctgaatgctcagtggacattcaagacccggaccagcatcaagcggtatgtggtgatggttctgacaatggggacgctcagcttcgttctgggtgccgtcgcagatgcgctctcactgcatccgatcgttacaatggtcgggttttctgccgtaagcttggtgattggttaccttattgcaaagttcattgttttccgggaggtcccttga

SEQ ID NO: 496187 - DNA, 1215 bp, Stenotrophomonas maltophilia
atgatttcacctctcaacggcgaggatttcgcattgacgcgggatatggccggcgttgcgccgatggatcgtttcggctggatcattgaacgttcgtcggcacagattacgcagtggaacgcacgtcttggagagcagctcgcaatcctctggctgagcgtacctcggatctacttcgtcctggcgacgacagcctcgctgctgttcttctgtgccgtggttgccgtgtatgggcgcaggcaaacggatcgcgattcgttcctgcatggctcaatctacgcgctggcgatgctctggttgttctggccgggttacgaagtttttttctggacgacggcccaagcggcctacttccagccgatgattctcacccttctgttgatgtccttttactttaccgccgaggcgacgcagaagcttggtgaatcgaacctccgctgtcttgttgcggtcgtactggcgtgccttgttggcctttcgttcgagaacgtaccgcctgcgctgggtgcgggaatggggctggtacttctgctgagcggaagggctcgctggcgaatacgcgcaattgttcccatcatcgcactcgccgctgcgtggggagtgttgatgctggcgccctccacagcaatccgtcgtgccgcatacgcagccatgtatccagccaacctcggtgttggtcacgtgcttgagcggtcccatagtgtttttggcacgttggtgagtacaggctggctgctcgtgttggcagggacggcggctagcgtttacctgtggcgcgtgcacggatggcggcagcaggtggtgctggcgtggacggtgtcctctctcactgtgctcagtgtcattgccgcgccctacacggagcctcgtgcctttattgttccgtgggcaatctggtacatgctcgttgtcgccgctgtcattcgactggtgtcgatcagttggttccgctcgggtgcagcgattgtagccgttgccagtctttaccttccgctgcaggcgaatctctcatatgttgagtttgcgcgcagcctggaagagcgagattcctacatacgaatcatgtctaggaccgagcgctgccagcaaggcattgatgtcgggcatgctactaaagcatattcttataagtatctgaacagtcgcgaagcctggttcgtcgcaaatcctgcttacgtaagcgcctactacggttgcaaggtgctgccgcaatga

SEQ ID NO: 496188 - DNA, 921 bp, Stenotrophomonas maltophilia
atgagcgcgttggtcatcggtggcaatggtttcatcggttcacgactcgtcgccgcgctgcgtacgcgtggtgaagagacggcggtgctggatcgcttccctgcccgcacggacatggactgggctggtgtgcgctactttcagggcgatttccacgacgctgatgtactggagcaggcgctgcaggatgtcgattccgtgtaccacctcgccagctgcactgtgccgagcactgctgatgctgatccgatcgctgatatcgaaggcaatctaatcggtacccaccgtttgctggaggcaatgcgcgtacggggcgtgcgtaggctctgctacttttcctctggaggaacggtgtatggcaaccccgacacccttcccgttcccgaaacgcacgcgctgcgaccgatttcctcctacggcatcgtaaaggtcgccatcgagcactatctgacgatgttccaacgtcagggttggctggatccggtgatcatccgtccctcaaatccctacgggccagggcagtccacgcgagggatccagggcgcagtggctgtattcctgggacgcgcgctggcaggattgcctgtcgagatatggggtgacggggaaaccgtccgagactacgtgttcatcgacgacctcatcgatcttgcgctgttggcaacggagtccggaaggacaggagtattcaacgcggcgtctggtaatggcatcagtctgaatgagctctgcgcggcaattcgggtagcttcgggcagggcattgcctgtgcagtacaagcctggtcgcacgtttgatgtgcgatccattgttctcgacgtccagcgcgccaagcagttgctgggctggacaccaaagatcgcgctggcggaggggttgatcctcgcctggcgaagcatgcaggacgcgacgggcagctag

SEQ ID NO: 496189 - DNA, 3369 bp, Stenotrophomonas maltophilia
atgcatcagggtcagaaaatgggaaaactgggggcagttgcacgccgcatgtacatggcggtgccgggctggaatgcgcggcttgcactgaaggatttcctgttccggaacttcagcttcgcctttgccaatacaaatgcctaccgccgatggaaaaccttcggcgcagggcaggaatttgctgttgtcacggcgggcgcgcagcagccgccagccgctgccgctccgatcgttgccgaaggcgtgaaggtgtcctccgtggcgcgtatctacgcagacgccttcgacgtcgctgcaggcgtgcgcgggtctgagtacgtggagctggcgcctgcgctacagccaccgaccagcctccgcttcaagacgatcgcgttctacctgccgcagtttcaccccttcgccgaaaacgacgcatggtggggcaggggcttcaccgagtggaccaatgtgagcaaggccgtgccacagttccaggggcatcgccagccgcacctgcccggtgaactgggtttctatgacctgcgcttgatcgatgtgctcaagcgccaggccgagcttgccaagctgtacggcgttcacggcttctgcttccaccattactggttctccggtcatcgactgatggagcggccggtggaccagctgctcgcgcatccggagattgacctgccgttctgcatctgctgggccaacgagaattggacccggcgctgggatgggcatgaaaacgatgtgctgattggtcagaactacacggctgacaacgacatcgcgttcattcgtgatgcgatgccgtacctgtctgatccgcggtatatccgcatcgatggtcggccgttgctcatcatctaccggccatcgctgcttcccgatgcccgcaagtcgctggatgtctggcgcggctatgcgcgtgagcagggccttggcgagctgttcatcgccatggtccagttcgacgtcgatgatccgcgcacgtacggcttcgatgcagccctcgagttcccgccgcacaaggtggcgcgtggcctgtccagcatcaaccacacgctgcacatcgccaacccgcgttatgaaggctacgtggtcgactaccgcgagatggccgaacgttccaggaactggccggaagaagactatccgctgttcaagggggttacgccacgctgggacaatgaagcgcgaaagccggggcgcggctacacgttcgcccattcctcgccgagcgagtaccagcgctggctggaatcggcgggcgagttcgcactggccaaacctgtgcgtggcgagagcgtggtcttcatcaacgcctggaacgagtgggccgaaggcgcccatctggaaccggaccgttactacggttatgccttcctgcaggcgacgcgcaatgtcaccgccagcacggcgaagccgcgtgtcgcactgatttcccatgatgcgcacccgcatggcgcgcagtacctcgcgctcaacatggcacgcaagatgacggccggcctgggactggacgtgcatgtcgtgctgctcgaagacggccgcctgcacagccagttcgccgagtgctccacggtccacctgctgggcgaccgggatccagcggtgctggccaatgaactacgccagctgggcgtgcgctcggtgcttgccaatacggcggtcagcggccgcatcgtgcaggcgttgggtgatgcaggtcttaccgtggtgtcgatgatccacgagctgccgggtgtcatccagagctacggcctgcagcctgcactggcggacatttcccgtgtggccaagcgcatcgtcgtcgcctcggacgcagtacgcgaaggtttgcagcccttcctcgacccggcagggcaggccaaggtaaccaagctgccgcaggggctgtttgcagccaaccgccatcgcgggaagcgcaatcgagacgctgcgcgcgcagcgctgcggcagcgcttgggtctcaaatccacggacaggatcgtgttgtcggtgggctacgccgatgcgcgtaagggtgtcgacctgctggccgaggcgttcaccagcgcattcgcccagcgacctgatgtccacgtcgtttgggtcggtcaccgtgaagaggctgcgtgtgaggccgcggaaaaggtgctccgcagccatggcatgctggagcggtttcacttcgccggtctcgactttgacaccgatgactactacgcaggcgctgacatctacgcgctcgcgtcgcgggaagatcctttcccatccgtcgtgctggaggccttgtctgtcgagctgccggtcgtcgcattcgcaggcacggggggcggtgcggacctcgtggcccagcaccaggcgggcgtggtcgtgccggcactggacgccgtcgcctatggcggcgccttggcgcgtctgctcgatgaggattcggtgcgagcaacggcaggcgaagccggacgacgccttgtcaatgccgacttctccttccgcagctacctgctggacttgctggatctggccgggcatcgcattccgcgtgtctcggtggtagtgccgaactacaactacgcccactacctggaagagcgtctggcgtcggtgtacgggcaggacttccccctgtatgaggtcatcatcctggatgacgcctcatcggatgggagcctggcagaactcgaacgcctctggccaacatttgatccggagccgcgccttgaggcgtcgtcggacaacagcgggtcggtcttccgccagtggatgaagggcgtgagcctggcgcgcggcgagtacgtctggatcgccgaggccgacgatctttccaagccagcattcctgcgctcgctggtggacctgctcgagtccaacccccgctcggtgatggcgttctcgcagtcggaacagatcgacgagttcggcgaggtgatggctggcgactatctggaatacaccaatgatctctcgcgtgatcgctggcgcagcagctattcggcgatgggttccgaagaagttgaagccggtctggctgttaagaacaccctgcccaacgtcagcgccgtgctgttccgtcgcgaggcgctgctgcgcgtgatgcaggagcacatcgaagagatcactcagtatcggatcgcgggcgactggctggtctacctgctattgctgcgcgatggcggcctcagcttcaatgcggaatcgctcaaccagcaccgccgccatggcaacagcgtgaccatcggctccaaagcgcagggtcacctggatgaaatccgcagcctgcatgcccacgcccagcggcttttcccgttgagcgcagccacgcggagcgcggccgcggcatacgaagacaagctgcgcacccacttcgggttgcggaaccattcagctgggacggagtga

SEQ ID NO: 496190 - DNA, 1491 bp, Stenotrophomonas maltophilia
atggcaacccagcttgacgagcacgtagaagatctcgcattcaccggcgaacggttcatgcccgaagtggccggtcagatcgccttcgaacatctccatcgctatcacttcgccgccaggttctgtgccggcaagcaggtggtggacgtggcctgtggcgaaggttatggcagccagatcctgtctggcgttgcggactcggtgaccggcatagatatctcggccgaggccgtcgcccatgcggctggccgctacgggtccgatcgcttgcgcttcgtcgaggcgtctgctgccttgctgccattggaggacgactccgttgacgtggtggtgagtttcgagaccatcgagcaccacgaccagcatgaggaaatgctgtcggagatccggcgcgttctacgtccgggtgggatgctgatcatgtccagtccgaacaagcagcactattcgatcgacccgggctacgaaaacccctatcacgtgaaggagttgttccgtcacgagttgatcgaactcatccagcgctacttcccgcagcagcaggtgtattcgcagcgcgtcgtctacggttccctgttggtcgctgacggtccggcggccttcgattcaatcctgggcaccggccctgaaaccagtgaatgggccgaaggcctcagccgcccgctctacgacctggtggttgcgacggatggggtgctgcctgtgcagtcgtcctcgttcttcgaactgaaggttcatggaatggatgccggcgccttctacggggtgcacttgcctgagcgcgtccagaacgcggatatcgaagtcctgcagcttcgcgccaaggtcgaggaactcgaggcccaggcccagtcccatctttcccatcgggaagccgcttccctggaggcggcggaggaactgcggcggacgcgcgaagcgcatctggccgagatcgagcggcttcgtgacagccgcaacgaggtgctgtcctcgatctccgtgctgggttcgctggtcgatgatgttcgccgcgaaggcggtcatgatcggctggcccaggaacgcaggctggaaagcctgcagaatgcgctggatcagaatcgagcgctggttgctgaagcagccagcagccagtcgatcgacaacggtcaattcaaggctcagctggccgaactccgccagcagttgattcaggccgttgccaccgaggaaagggtccgctccctcgagcgcatgctttccgagtcccaggagatggtgttggggcatatcaatgccaacggcagcctgcgcgaagaaatgtccgctctgcgtgcggaaatcgaccggaccatggccgaacgggatgaggcaaggcagtccgtgcagcagctgcagttggccgtaaccgagcagcgcgtcatcagcgagcaccgcgaacgggatgtggaactgcttaaggcgtcacggagttggcgttacactgcatggctcaggaaactgtcaggaagtgccaggaggcacctgtaa

SEQ ID NO: 496191 - DNA, 1422 bp, Stenotrophomonas maltophilia
atgtcatctgatccggtcgttctcaagatcgacggcgtttccaagcactatcaggtctacggctcgccccaggaccggttgaaggacgcccttttttcgcgcgctgcgcgtgtcgtgggaagccgaggcaaatcctatggccgccagttcagtgcgctgaaggatgtttcattcgagattcgcaagggtgaaacggtcggcatcatcggacgcaacgggtcgggcaagtccacgctgctgcagctgctgagcggtacgctggcgccatcggaaggccagatcctggtcgacggaagggttgcggcactgctggagcttggggcgggcttcaatcctgatttcaccggccgcgagaacgtgttcttcaacggtgccctgctgggactttcggacgagcagctgcgcagcaagtacgactccattgtcgaattcgccgatatcggcgagttcatcgaccagccggtgaagacatactccagcggcatgttcgtgcggctggccttcgccgtgatcgcgcacgtggaagctgacattctggtcatcgacgaggcactgagtgtcggcgacgcgttcttcgtgcagaagtgcatgcgattcctccgttccttcatgcagaacggcacggtggtctttgtatcccatgacaccgccgccgtcatcaatctctgcgaccgagtggtctggttgtcgcacgggaagatcgttgcagatggcgcccccaaggaagtcaccgccaagtatctggaagatctctacgcggtggagatggccgctgctggtcctgctgcggtggccgttgacgctcccgaaagtgacgcgcaaccggcagctgctggtgcgaccgccatcgaaccggaccacgcaggcatggcgccccgtgatttccgccaggatctgatcaacgccagtgagcatcggcaggaaatccgggtctttgagttcaatgcaaacaaggggttcggacaaggcggggcgcaggtcgagttggctgcctttgttgacgtggatggcaacccgctgtcctgggtggtgggtggagagccggtccggctgcagatccgctgccgtgtgaaccaggtgttgagctcgcccatcatcggttttgaggtgtacgaccgcctggggcagaccctgttcgcggacaacacgtatgtcgcctccatcgatccccctcccggcgctcaagcggggcaggtactggtggcttcctttgatttccggatgcctgtcctgcgcgagggtgactacaccatgagtgcagccatcgcagacggcaatcagcatcaccatgtccagcaccattggctgcatgacgcgcttgccttccatgttcatgcacgtggcatctgccttggattgttcggcgcacccatgcagcgcgtgcgccttgtagtcgagcaacaagatctggtatccgggtga

SEQ ID NO: 496192 - DNA, 861 bp, Stenotrophomonas maltophilia
gtgagcagtcgcttggaaaagagatcttccgggctgacgccctatgcaactgcccggcggcggccattggcgggcttcctgcgttcgcccttggagcaccgtcaactcatcttccgtctgatccagcgtgagatcgtgggccgctatcgcggttccttcgccggcctggcctggtcgttcatcacgccattgatcatgctggtcctgtacacgttcgtgttctccatcgtgttcaaggcaaagtggaaggactttgataccagcggtggctttgccttgatcctcttttccggactgatcgtgcacggcgtggtagccgaatgcatcaatcgctccccggcattgatcacgagcaatgccaactacgtgaagaaggttgtgtttccgctggaagtctacgcgtgggtgacgctcggttcggcggttttccatgcgttcgtcagttggatcgtgctgaccattgcccagttgtgcatgggcgttgcgctgccctggaccgtgatcctgttccccgtggtgatgctgccgctgttgctcggttgccttggcgtttcctggttccttgccgcgatcggcgtctacttccgagacgtggcacagattaccggcacgcttgcgacgctgctgctgttcctttctcccgtgttctacgcgcttgattcgattcctgaacgctatcgtcccctgatccaggccaatcccctgacgggtgtcctggaggcggcacgcaaggtattgatgttcggtgacatcccgtctcctgcgtacttcgggatcggcctgctggtgggcctgctcatggccatggctggttacgctttcttccagaaatctagagatggatttgccgatgtcatctga

SEQ ID NO: 496193 - DNA, 1173 bp, Stenotrophomonas maltophilia
atgtccaacgcttcttccccggaccgcgcgctggccctggccacgctggccatccacggcggccagtcgcccgaccccagcaccggcgcggtgatgccgccgatctacgccacttcgacctatgcccagtccagcccgggcgagcatcagggcttcgagtactcgcgtacccacaacccgacccggttcgcctatgagcgctgcgtggcctcgctggaaggcggtacccgcggctttgccttcgcttcgggcatggcggccagctcgaccgtgatcgagctgctcgacgctggcagccacgtggtggcgatggacgacatctacggcggcagcttccgcctgttcgagcgcgtgcgtcgccgcaccgccgggctggacttcagcttcgtcgacctgaccgatctggcggcattcgaagcctccatcacgtcgaagacgaagatggtctggatcgagaccccgaccaacccgatgctgaagatcgtcgacatcgccgcggtcgccgccatcgccaagcgccatggcctgatcgtagtggtcgacaacaccttcgcctcgccgatgctgcagcgtccgctggaactgggtgcggacctggtcctgcattcggccaccaagtatctcaatggccactcggacatggtcggtggcatggtcgtggtcggcgacaacgccgaactggccgagcagatggccttcctgcagaactcggtggggggcgtgcagggccccttcgacagcttcctggccctgcgcggcctgaagaccctgccgctgcgcatgaaggcacactgcgccaacgcgctggcgctggcccaatggctggaaaagcacccggcggtggagaaggtgatctacccgggcctggcctcgcacccgcagcatgaactggccggcaagcagatggccggctacggcggcatcgtctcgatcgtgctcaagggcgggttcgaggcggccaagcgcttctgcgagaagaccgaactgttcaccctggccgagtcgctgggcggtgttgaaagcctggtcaaccatccggcggtgatgacccatgcctcgattccggtcgcgcgccgcgaacagctgggcatcagcgatgcgctcgtgcggctgagcgtgggcgtggaggagctgggggatctgcaggtggatctggagagggcgctggcgtga

SEQ ID NO: 496194 - DNA, 1371 bp, Stenotrophomonas maltophilia
atgcccatccattcttccgtcctcgaactcatcggccagaccccgatcgtcaaggcccagcgcctggacaccggcgtctgcgagctctacctgaagctggagagcgccaacccgggcggatcgatcaaggatcgcatcggcctgtcgatgatcgaggcggcggagcagcgtggtgacctgaagccgggggcgaccctggttgaaggtaccgccggcaacaccggcctgggcctggcgctggtggcacagcagaagggctacaagctgatcctcgtcgttcccgacaagatgagccgcgagaaaatcttcaacctgaaggcgatgggcgctgaagtgcgcctgacccgttcagacgtcgccaagggccatccggagtactaccaggacctggccaagaccatcgccgagcagaccccgggcgcctacttcatcaaccagttcggcaacccggacaacccggccgcgcatgagttcggcaccggcccggaaatcctcgagcagatgggcggtgacctcgacgccatcgtgttcggctgcggcagctccggcaccatgaccggcctgtcgcgcgcgttcgccaagctgtcgccgaagaccgagctggtgctggccgatccggtcggctcgatcctggccgaatacatcaacgacggcgtgctcaacgacaagtcgggcagctggctggtggaaggcatcggcgaggacttcctgccctcgatctccgacttcagccgcgtcaagaaggcttatgcgatcagcgatgccgagagcttccacaccgcgcgcgagctgctgggcaaggaaggcatcctgggcggttcgtccaccggcaccctgctggcggcggcgctgaagtactgcaaggagcagaccacgccgaagagggtgctggtgctggtctgcgataccggcaacaagtacctgtcgaagatgtacaacgactactggatgctggacaacggcttcctgcagcgcccgcagcacggcgacctgcgcgacctgatcctgcgcccgtacggccagcgcgacaccgtggtgatcggcccgaacgacctgctgaccaccgcctaccagcgcatgaagctgtacgacgtctcgcagctgccggtgatggacggcgagaagctggtcggcatcgtcgacgaaagcgacgtgctgctgcatgtctatggcgacgaggcgcgcttccgcgacaccgtggccaccgcgatggtcagcaagctggaccggctggacgtgaagtcgccgatcgaggccctgctgccggtgttcgaccgcggccaggtggcgatcgtgatggacggcgacgccttcctcggcctgatcacccgcatcgacctgctgaattacctgcgtcggcgcgttcagtaa

SEQ ID NO: 496195 - DNA, 237 bp, Stenotrophomonas maltophilia
atgtttgaagatcagccccagagcgagatcgacgcccgtcgcgcgcgtgatccggagttcagggcactccatgaccagcaccgcaaattgaacaagaagtgcatggacgcggagttgggtgtactcccgatcgatgatgtcaccctgggtcgcatgaagcgtgagaagctgctggccaagcaacgccttctgcgaatgtacgaaacaccgctcccaacgacgtcccccacgctttga

SEQ ID NO: 496196 - DNA, 165 bp, Stenotrophomonas maltophilia
atgcaagcagggcgcgaaccgcagcagatcgacgtgcgcaggccagtgccgcaggtcgttgcaggcgtccaggtggccatcggccggcgctcctccatgaacaacgccccgtgccttgtggccggggcgttcgtgtatctgtcgaaggaggtccatcatgtttga

SEQ ID NO: 496197 - DNA, 885 bp, Stenotrophomonas maltophilia
gtgaagccgatgaccgccgcaaccctggccgcgctgctggcgctgccgaccctggccgtggccgccgacaacccgatggtggcgcagctgagccagcgcctgatggccatccaggccaacccggacaccgctgagctgggcgccttcgagcgcatgcaggcccagcaggccatcgcgaccctggacaaggccaagcgccgtgaccaggagctggccacctacctggccgagcgccgggtggagattgccgagacggccgtgcgcacggcgatggccgcgcgcgaggtcgaccgcctggagcgcacccgcagcgacctgctgatcgaggccagccgccgcgacgctgcccgcgcccgccaggaagccgagcagctgcgcatgcaggcgcagatgcaggccgaggaggccgaacgcctgcgccaggccgccgaggccgaaaccctggcccgccaggacgccgaaaacgccctgaccagcgtggccggcaagcagcagcagcggctcagcgctgcccagcagaacgccgccaagctggcccgtgaggaggccgagctggtctccgggcagaaactgccgggttcgaagttcgacgggcgaggcgaagtcttcaccttcaatggcgacgcgttcgctgcaggtgcctccagcctgtccggtggggcccgcaaccaggccaaggcgctggccgagtacctgaacatcggcaagaagggccgcctgcgcatcgaggcctacgacaatgccaacggcgtgggtcagaagcgggccgaagcgctgcgcgacgccctggtcgcggctggtgtcgccagcaaccggatccaggtcagcggcaagaaggcagcctccacccgggcccgttcggccgaggtcatcatcgccccgtaa

SEQ ID NO: 496198 - DNA, 366 bp, Stenotrophomonas maltophilia
atgcgccatggcctgtatgtgatggcgtttgcattcgcactgtctgcccccgcctgggcgcaggacgccgccctggaactggcgcaggcccggcaggcggtcgacaaggccacccaggccgacgccgaccagtacgccccggacctgatcggtctggcccggcaggggctggagcaggcccagcgcgccgccggcgaccgccgcgaacggaagaacgccccggcgatggccctgcgcgccgccgccgatgccgacctggcacgcgtccgcagcgaggaagccaccgtcaccgcgcagctgcagctgcgccgcaacgaggtcaaccagctgcaacgccagctgtcgaccggggaggaccgccggtga

SEQ ID NO: 496199 - DNA, 1128 bp, Stenotrophomonas maltophilia
atggatatcggctacttcctgaagctgatgaccgaaaagaacgcttcggacatgtttctgaccaccggggcaccggtctacatcaagatcgaggggaagctctatccgctgggcaacaccggcctgccgccgggcatggtcaagaaaatcgcctactcgctgatggacgaaggccaggtgccgcagttcgagcgcgagctggagctcaacatggccatcgccctgcccgatgccgggcgcttccgcgtcaacgtgttcaagcagcggggcgaggtcgggatggtcatccgcgccatccgcagccgcatccctagcatcgaggagctgaacctgccgcaggtgctgaaggacgtcatcatgaccccgcgcgggctggtgctggtggtggggtccaccggttccggcaagtccacctcgctggcgtcgatgatcgaccaccgcaacagcaccaccaccggtcacatcctcaccatcgaggatccgatcgagtacctgcacaagcacaagatgtcgatcgtcaaccagcgcgaggtcggcctggacacccacgccttccacaacgcgctgaagaacgcgatgcgtgaagcgccggacgtgatcctgatcggcgaaatcctggatgcggaaacgatggaggcggcgatcgccttcgccgagaccgggcacctgtgcctggccaccctgcactccaacaacgccgaccagaccatcgagcgcatcctcaacttcttcccggaaagcgcgcacaagaacgtgctgatgaacctggcgctgaacctgcgtgcggtgatcagccagcgcctggtgaagaacaaggagggccgtcgcctgccggccaccgaggtgctgatcaacacgccgatgatccgcgacctgctgcgtcgcggccaggtgcacgagatcaaggcggcgatggaaggctcgctggaagaaggcatggagagcttcgaccagtgcctgttccggctggccaaggcgggcatcatcgagcaggaggaagcgctgcgcgcggccgactcgcgcgatggcctggccctgaagttccgtttgtccgaaggcagcagcggcgagcacgacccgtacgccgatttctcggccggcgcacccagcatcacccacggcttctga

SEQ ID NO: 496200 - DNA, 1284 bp, Stenotrophomonas maltophilia
atggaaaccatccgcaagctggccattctggccgacgccgccaaatacgacgcgtcctgcgcctccagcggctcgggcaagcgcgattcgcgcgccagtggcggtatcggcagtaccgagggcatgggcatctgccacagctacacgcccgatggccgctgcgtttcgttgctgaagatcctgctgaccaacttctgcatttacgactgcgcctattgcgtgaaccgggtctccagcaacgtggcccgcgcgcgtttcagcgtggacgaggtggtcacgctcaccctggacttctacaagcgcaactacatcgagggcctgttcctgtccagcggcatcatccgcaatgcggactacaccatggagcagatggtggaagtggccgggcagctgcgcgaagaacaccgctacgccggctacatccacctcaagaccattcccgaggcctcgccggaactgctggccagtgccgggcgctatgcggaccgcctgtccatcaacgtggaactgccgaccgaagccggcctgagcgccttggcaccggagaagacggtgcactcgatccgtggcgcgatgggcgaactgcgctggcgcatcgaggaagccaaggaggctcgcaagtcccccgcagcggtggcgccgacggccagtcgcagtgttcgcccgcgccctccgcgtttcgcaccggccgggcagagcacccagatgatcgtcggcgcggacggggcaaacgaccagcagatcctggccagcgccgacagcctgtacggcaactaccgcatgcgccgggtctactactccgcgttcagcccgattccggacgccagccggcagctgccactgcagccgccaccgctgcagcgcgaacatcgcctctaccaggctgactggctgctgcgcttctacggttacggtgtggaggagattaccgacaccacccaggacggcatgctcgacctggatatcgaccccaagatggcctgggcgatccgccatcccgagcgctttccggtcgatctgaaccgggcaccgaaggaaatgctgctgcgcgtgcccggccttggcgtgcgcaacgtcaagcgcgtgctgatggcacgccgccacgggcggctgcgcgtggccgacatcgcgcgcctgaaggcaccgatgagcaagctgctgccgttcgtgctgctggccgaccatcacccgcgcaaagcactggatgatccggcggcgctgcgcgcgcagctggccccgccgccgcgccagggttcgcttttcgatgccccgtctgcgtcctga

SEQ ID NO: 496201 - DNA, 1461 bp, Stenotrophomonas maltophilia
atgccccgtctgcgtcctgacgcgcagcggtggtcgctgcgggtggatccgccgtggtcgctgcaggcctggcgcgatgctgcgcgcgaagcgttgctgcgcggcgttgccccgccgcagctggactggctggaagggagtgacacgtcgctgctggatgcgccggccgtgcagcaggcgccgatgcttgccgatgccggtgcacccaacgttccacgtgacttcctggagctggcggccacctgcctgtgccatcgcgatccccagcgcctggccttgctgtatcgcctgctgtggcgcatcgcccatggcgagcgatcagtgctgggcaaccccgccgacgccgatgtcctgcgcgcgacagccctcgcccaggccgtccgccgtgacacgcacaagatgaaggcattcgtgcgcttccgcgaggtacctggccagcctgatgcgttcatcgcctggttcgagccgcagcaccacatcgtcgaccgggtcgcgccgttcttcgcgcgccgcttcaccggcatgcgctgggcgatcctgaccccttcgcgcagcgtcgcctgggatgggcaggcgcttgccttcggccccggtgcacggcgcgaagatgccccggccgaggatgcacgcgagtcgctgtggcagacctactacgccagcatcttcaatccggcgcggctcaacacacggatgatgatgcaggagatgccggcaaagtactggcgccacctgcctgaagcacagttgctgccacgcctggtgcgcgacgcggccgaccgcgtgcaggaaatgcatgaccggccggcacaggcaccgcaacgcaggattcccccgcgtgcgaacgctgcgacgccggcagccgatgccagcagcctggacaatctgcgcggacaggccagtgcctgccgccagtgcccgctatgggagcaggccacgcagaccgtgttcgggcaggggcctgccgatgcgcgggtgatggtgatcggcgagcagcccggtgataccgaggatctgcgcgggcagccgttcgcaggacctgccggccaggtgctggaccgcgcactggcggaactgggaatcgatcgcgcccagctgtacctcaccaacgcggtgaagcacttccaccatgagcggcgcggcaaggtgcggctgcacaagcggccggaaagccgccacatccaggcctgccgcccctggctgatgggtgagatcgcacgcgtgcggccccaggtgatcgtatgcctcggcgcgacagccgcagcctcggtattcggtcgtggtttcgacctcgcacgcgaccgcggacgctggcacaccctcgaggacggcacgcgcggctacgccacggtgcacccggcatgggtgttgcggcaggccgacgatgcgcgccgcgaggaagcctaccgggtgttccgcgatgacctggcccgtttgcggcagaaaggggacggaggggattaa

SEQ ID NO: 496202 - DNA, 684 bp, Stenotrophomonas maltophilia
atggagatcctggttgacgacggcccggtcgacgacggcatcgtgctgtacacctactggcgatccagcgccgcctaccgcgtgcgcatcggcctggagctgaagggcctggcctgggaggcccggccggtgcatctggtgcgcgacggtggcgagcagcaccgggatgcctatcgggcgctcaacccgcagcagcaggtgccaaccctgctgcatgaggggcatgtgctgacccagtcgctggcgatcctcgaatacctggacgagcgctttccgcaggtaccgctgctgccggccgacgccgccggccgcgcgcgggtgcgggcgctggcccagctggtggcctgcgacatccacccgatcaacaacctgcgggtgatgcagtacctggagcgcgatctgcaggtgccggccgatgcgcgcacgcagtggaccctgcactggatcgccgagggcttcgcggcgatggaagccctgctggtcaacagtcgtgacaccggcgccttctgccatggtgaccgtcccggcctggccgatatctgcctgctgccgcagctgtacaacgcccaccgcttcggcctggacctggcaccgtacccgaccctgcgccgcatcgaagcggcctgccaggcagtggatgccttcgaccgcgcacgcccggaaaaccagcccgacgccgcctga

SEQ ID NO: 496203 - DNA, 990 bp, Stenotrophomonas maltophilia
atgaagcttggttctttgaaggaaggcggccgcgacggcaccctgatcgtcgtctcgcgtgacctgcgccacggcgtgcgcgccaccggcattgccgccaccctgcagcaggccctggaggactggagccacatcgccccgcgcctgaacgccctgtacgaatcgctcaacgctggcgatgccgatggcgtgttcgacctcgacccgcaggcactggccgcgccgatgccgcgcgcctatgagttcgtcgatggcagcgcctacctgccgcacgtcgagcgcgtgcgccgtgcccgtggcgccgaggtgccggagagcttctacaccgatccactgatgtaccaggccaccagcgccggcttctacggcccgcgcgatgcggtcaaggtggtcagcgaggaccacggcatcgacctggaagcggagatcgtggtgatcaccgacgacgtgccgatggcggcgaccccggaacaggcagccggtcatatccagttggtcggcctggtcaacgatgtctcgctgcgcaacctgatcccgggcgagctggccaagggtttcggcttcctgcagtccaagccgcgctcggcgctgtcgccggtgttcgtcacccctgacgagctgggtgccgcgtggcaggacagcaaggtgcacctgccgctgctgacccacatcaacggccagtggttcggtgcgccggaagcgggcgtggacatgcagttcaatttcgcccagctggtttcgcatgcggccaagacccgtccgctggtcgccggcaccatcgtcggctcgggcaccatcgccaacgaggacaccagcaagggtgcgtcgtgcttcgccgagcagcgcgtggtcgaaaccctgcgcgatggcaagccgagcacgccgttcatgtccttcggcgacgtggtccgcatcgagatgctcgatgccgccggcaacagcatcttcggtgcgatcgagcagcgcatcgaacaggcggccaggccctga

SEQ ID NO: 496204 - DNA, 1578 bp, Stenotrophomonas maltophilia
atggtgtttcgcgtttccatcgcactggttctgctgctggtgcggcttgccggtattgcaccaggccccttcaatgccgtggtgcagtcgatgctggcagaagtcatccgcagcgtcggctggctgtacctgctggtggtattcctggccctggtgttcctgatgtacctggctttcggtcgcttcggcaacctgcgcatcggtggcgaagacgccgagcccgagttctcgcgagccagctggatgtcgatgctgttcgccgccggcatgggcattggcctggtgttctggggcgccgccgagcccatttcgcacttcagcaagccaccggaagggcttgctccgcagagcctggatgcggcacgcgcctcgatgcgctatgcattcttccactggggcctgcacccgtgggccatctatgcgctgatcgggctggcaatggcctggttccagttcaaccgcaacggccgcggcctggtcagcgacatgctgcagccgatcatcggccgccaccatcgcggctggatcggtagggtggtcaacatcgctgcagtggtcgccaccgcgatcggtgtcgcgactacgctgggcttcggcaccatccagatcgccgcgggcgtggaacgcgtgttcggcctggaagctacggtcccggtgcagatgaccatcatcgccatcgccttcgtgctgtatatggcctccaccgccagtggcgtggagcgaggtgtgaagtggctgtccaacttcaacctggcgttggctgccctgctggcggccatcctgctggtgctggggccgaccggattcatcttcgatacgttcaccaccacgctgggctcctacctcaaccaactggtgacgatgagcctgcgcatgtcaccgttctccggcagcacatgggtggccgactggacgattttctactgggcctggtggatttcctgggctccgttcgtggggtcgttcatcgcacgcatctcgcgcggccgcagcgtgcgcgagttcgtgatcggcgtagtgctcgcgccgacgctgctgggcttcttctggttcgccgttttcggtggaacggccttgtgggcacagatcttcggccatgccgatctggtgcaggcgctgggcaatggatatgagacggtgttgttcacgttgttcgacagcatgccgctgccgctgctgctgtcgtgcatcgcactggtactgctgatgatcttcttcgtgacctcggccgactcggcggtactggttctggccagcatgtccactgacgaagctggcgatcctccgttgaagcgcaagctggcctggggcatcgcggtggcgttgatcgcagcggccttgctgctggccggtggcctggatgcactgcagggcatgatcacgattgcggcgttgccattcgcgctgctgatggtgctggtgatggtgtcgctgtaccgcgtgctcgaccaggagtacacgcgggagcggcggcaggcgcagcgccagcggcacatgatcgatgcgtggatcgcgcgcgagatggcggcgcaggaggagacccaggccgaggccgcacgcgcgcacgatcaggattga

SEQ ID NO: 496205 - DNA, 195 bp, Stenotrophomonas maltophilia
atgcagcgcgaaccgggcaggggccgcgtcggcggcgaaggacgcatcggtcgctggagggcgacggacgtgcacgttactgaacgcgacgtcatggttctgttaacgaacaacgatccggatcagatccgctttccacaggaaagcggatctgaccgcgggggcaactcccggagcgggcggtctatgctctaa

SEQ ID NO: 496206 - DNA, 1845 bp, Stenotrophomonas maltophilia
atgaacgcacagctctccgccctgcagcaacaggcccagcaactctccgaatccgtgacccggcccattcccggctcgcgcaagatccacgtacccggttcgcgtccggatctgcaggtgccgatgcgcgagatcgcgttgacccgcacgccgacgctgttcggcggcgaagagaatgcaccggtcacggtctacgatacgtcgggcccgtacaccgatccggacgcgcgtatcgatctgtccgcgggcctgccggcgctgcgtcgtggctgggtggaggagcgcggcgataccgaacagctcgacggcctgagttcgtcgttcggccgcgatcgcgagcacgacccgaagctcgatgctgtgcgcttccccacacgcagcctgccgcgccgtgcacgtgcaggcgcgaacgtcacccagatgcactatgcgcgccgcggcatcatcacgccggaaatggaattcgtcgccatccgcgaaaaccagcggctggacgcgatccgcgatgccggcctgctgcagcagcacccgggcgaggcgttcggcgcctcgatccagaagatcatcacgccggagttcgtgcgcgatgaaatcgcccgtggccgtgcggtgctgcccaacaacatcaaccacccggaaagcgagccgatgatcatcggccgcaatttcctgaccaagatcaacgccaacatcggcaacagcgccgtctcttcgggcattgccgaggaagtggagaagctggtgtgggcgatccgctggggtggtgacaccgtgatggacctgtccaccggcaagcacatccacgaaacccgcgagtggatcatccgcaactcgccggtggcgatcggtaccgtgccgatctaccaggcgctggagaaggtcgacggccgcgccgaagcgcttacctgggagatcttccgcgacacgctgatcgagcaggccgagcagggcgtggactacttcaccatccacgccggcgtgctgctgcgctacgtgccgctcaccgccaagcgcgtgaccggcatcgtcagccgcggtggttcgatcatggccaagtggtgcctggcgcaccacagggagaatttcctctacacgcacttcgaagacatctgcgagatcatgaaggcctatgacgtgaccttctcgctgggtgacggcctgcgcccgggctgcatcgccgatgccaacgacgcggcgcagttcggtgagctggagacgctgggtgagctgaccaagatcgcctggaagcatgatgtgcagaccatgatcgaaggccccggccacgtgccgatgcagctgatcaaggagaacatggacaagcagctgcgcgaatgcggcgaagcgccgttctacacgctggggccgctgaccaccgacatcgcgccgggctacgaccacatcaccagcgcgatcggtgcggcgatgatcggttggttcggcacggcgatgctctgctacgtgacgccgaaggaacacctcggcctgcccaatcgccaggacgtgcgtgacggcatcatggcctaccgcatcgccgcgcatgcggccgacctggccaagggccacccgggcgcgcaggtacgcgacaacgcactgagcaaggcgcgcttcgagttccgctgggaagaccagttccaccttggcctggatccggagaaggccagggagttccatgacgaaacgctgccgaaggatgcgcacaagctgtcgcacttctgctcgatgtgcggcccgcacttctgttcgatgaagatcacccaggatgtgcgtgactacgccgaggccggcatgaaggagaagtcggaggagttccgcgccgcgggtgccgaggtctaccaccaggggtga

SEQ ID NO: 496207 - DNA, 672 bp, Stenotrophomonas maltophilia
atgcctgttgccatgaccacccgttggctggccattgcccgccggcatccttcggcctggttgctgggcgcgcagctgctggcggtgctgctgtatcccgcgctggatgacaccgccgccggccgcgcggcactgggcatgttcggcatggcggtcctcggcctggcgctgtgggtggtccagcgcagcccgctgggcacctggctggcgctgttgctggccattccctcggtggtgttctcgttggcaggcgcattgctcgagcgcaccgcattgctgaccaccgcgcaggtgctggagagcctgctgtacttctacacggctggcgccctgattgcctacatgctccaggaccacaaggtcacccgcgacgaactgttcgcagctggcgcaaccttcaccctgctggcgtgggcgttcgccttcgcgttcgcggtgtgccagcagtggtatccgggcagtttccagggcaccggcgggcaggcacagcgcagttggatggagctgctttatctcagcttcagcttgctgtctggagtcggcttgagtgatgtcgtgccgcttcatccacaggcacgagcactggtcatgctggagcagttttccggcgtgatgtacgtggctttggtggtttcgcggctggtcggattgaccatgctgcggcgcatgtga

SEQ ID NO: 496208 - DNA, 2325 bp, Stenotrophomonas maltophilia
atgaacagcagcgaaatacagccacccgtgtccgatcggatacggataggagagtgcatcgtcactctgtcctcgcgcgaagtcgaggtcgtcggtgcgcgtcgtccgcgccggctgacgccgaaggcgctgggcgtgctgcgcgtgctgctgcggcagccgggccgtgtggtcacccgcgacgagttgttcgccgaggtgtggccggacacgctgccgaccaacgatgtgctgacccaggccgttacccagctgcgcaaggcgttcagccacgacgacgacagcggccaggcctacatcgagaccattgccaagaccggctatcggcttctggtaccggtacaggcgctggacgatgcggagccgtcggctgcgggcttgcctgacgacgaaggtgtggacgtgcagcccgcactcgccgccgccgcggcgctgcccgcgcgcgcgcaggaatcgcgccgccgctggcgccatgtccgccgccgcgtgctgctggcgctgggcgtgttgatgctggccacgctgctggtgatgaccacgctgctgctgcgccgcgcaccggccagcagttcgccggtggaggccgccgtggagaacggcacgcgggtgatcggcagcccccagcgtccctatcggttgatcaccgcaaccagcggctttgaaacctatcccacgctgtcaccggatggttcgctggtggcctatgaaggcgccaacgaagatggcaatggcggtggtgcgatcaaggtacagacctccggcaacgcgccggcgcgccagttgctggcgccgccggccggtgccgtcgatcgattcccgaactggtcgccggatggtcgcgaaattgccttcgcacggttctctgccgacggtggctgccaggtgctgatcgccagcgctaccggtggcgcactgcgccaggccacgcgctgcgatggcaccgagctgctcagcttcgactggacgcccgatggtcgcggcctggtgttcggcagcatggtcgggcgctacgcgcaccgtggcatccgcgtgctggacctggccagtggtcagtggcgcgcgctggcgtacagcgtcgaccaggacgacttcgactacgcaccgcgttactcgcccgatgggcaatggctggtgttcgtgcgcaacccgcagctgggcgatctgtggcgggtgccggccgcgggcggtacgcccgagcagttgaccaacgaggcggcagagctgcgcggatgggcctggctggacgatggccgcaccatcgtgttcggtcgccgcgtcgacagcgaggcgcggctctattatctggacgtcgagcggcacacgctgcgcgatgccggcctggatgatgcgcagtggcccgccgtgtcgcgacgtggtgggatgctggccttcgtccaccggcgcgcgcagttcggcgtgttcaaggtgccggtgcagggcagcggcgcgcccgagcgcctgtttgcatccagtggccgcgatgggcagccgatggcagcgcccgatggccgccagctggtcttcacctcggatcgctccggcagcttcgccctgtggtgggcggacatgcagcggccggattcgctgcgccccattgaagggctgcggccggaagcgcggcaggcaccggactggtcggccgacagccgccagctgctcgtggtcggccgcgacgcgcatgggcgcacggtggtctacgagatcgcgccacgcgatgaacgcctgcaacctttgccggtcccggccgaacagccgctgcaggccctgtatggcgcgtcgccggagcagttgtttgtggtcgagcgcgatgccgaccagcgcacccggttgagtctgttcgaccgcagcacccagccctggcgccggttggccagcatcgaaggggtgtcgcaggcgcgcttcgaccgcagcagtggccgcgtgttgttcacccgcctggccgccggtggcctgtggtcggccgatgccgcgttgtcgtcgggcagcgtgcagcagatcagcgatgaccggcccagccgctggcgataccgggcctggaccgtggccggcaacagtggcgtcggttacctcggcacttcgagcacgtgtggcaccaccttcgtgcgcatcctgcccggccgcgaggagccggaacgctgcctggatgcggaacggctcagcgccggcaacggactcagcgccagcgctgacgggcgtgacctgttcgtggcgatggcggtcagcgatggtgccgacatcggtgtgatgcggttgcccgaacgcccccccgcgctgttcccggcgttctccaagttgttgtttttcaggggaaatgggccttcgtaa

SEQ ID NO: 496209 - DNA, 900 bp, Stenotrophomonas maltophilia
atgcgtcaactctcgctggccgatcgcggccaaaccgtctccctggaccggtcgctcgacgatgtcacgccgacctgcctgggcgtggcccggctgggcagcctgcagaccgccggctccagcttcactgtctggatgcaggtgcgtggcagttcgtgggtggaggccaaggaaggacgattccgcctgcgccagggcgagtggatcgccttcgagaaggaatcgcggccgttggtgcaggccggtcgcaacgggctgtgcgttggcctgaacctgaacgttgaagcgcttcgcgtgctgaccgagatggccgactgtggcctgtatgccggtcgtggccgcatgaaccgcagtgacgcccgcgttgcgctgcgcttgtggcgcgatgcgctggccagcggccagccggcccaggccttgcgtccgctgctgctgcaccttgctggcctgcagcgtggcctggccgacaacgtgcagcgctgcccgggccgctcgcgcagccgcaagcgccaggtgttcggccgcatgcagcgtgcgcgcctctatctggaaggcaacagccaccgggtggtgcgcatcggcgaactggccgaactgaccaacttctccagctggtacctctccaagaccttccagagcctgtacgaggaaagcccgcagtcgctttcggcacgactgcgcctcgaacgcgccgccgacctgctgcgcgacaccgacatgatggtgggcgaggtcgccgccgccagcggcttcgacaactgctgcagcttcgcgcgtgcgttccgcgcccgctacggccagtccgcgtcgcgcttcagggagaacggcggcttgctcccgccacaatccgcaaagtctccggttggttcgcgcaaatacagcgctgcaacgcaatcgtaa

SEQ ID NO: 496210 - DNA, 2850 bp, Stenotrophomonas maltophilia
atgaacgttcgtaatcccgcagtgcggttcggcttgctgccggccggcattgcgctggcgctggcgccggcctttgcttcggctcaggaagcaaagggcaccaccgacctggaccgcatttcggtcaccggctcgcgcatccgcggcgcctcggtggagacccagcagccgatcctgacgatgacccgcgaatccctggaaaagcagggcttctcgagcgtcgccgacgtgctgaacaacctgacctcggccggctccccggccatctcgcgctcggaatcgctggcttcgggcgagaacgtgggcggctactacgtcgacatccgcaacctgggcgccgagcgcaccctggtgctgatgaacggcaagcgcctgggcgcttcgacctcgggtctgcaggacctgagccagatcccgatgtcggccgttgagcgcatcgagatcctgaaggacggcgcctcgtcgatctacggttccgacgccattgccggcgtggtcaacgtgatcacccgcaagaacttcgacggcggcgaagccaatgtctacgtcggccagtacggcaagggcgacggcgacagcgaaacctattcgatgaccctcggtgcccgcggtgagcgcggcagcctgaccctgtcggccgagtactcgaagcaggatccggtgtgggccaaggaccgctggtacagccgtgacggctcgctgggtccgaactccacctcggctgattggagcccgatcagccagaacggcagctggtgcaacccgaagctgtacgactgcagcaagtcgagcgcggtgtggcagaccctgaacccgggtggcaatccgaagaacccgaacgactaccacgcgatcaccgaagacgagttcgccaactcgaacgagcagatgaccctgctgaccggtgtgaagcgcaagtcggtctacatcaacggcacctacgacttcaccgattcgatcagcctgaacaccgacgtgctctacaacgagcgccagacgttccagcagatcgccggctacccgtaccagtccgcttccaagtcgatcaacaccccgctgtcggcagacagcgccttcaacccggttggccaggacgtcagcttccgccgccgcctgtgggaagtgccgcgtaccactgacagccagctgaagaccctgcgcttcgctccgaccctgaccggcttcttcgagctgggtggcaagaccttcgactgggatgtcggcgcgctgtggaaccgcaacgagtcgatcaagagcaaccgcggtgacatgagcctgatcggcgcgcgtcaggcgctgggcccgtcgttcatcgatgccggtggcgttgcccgctgcggcaccgccgccaacccgatcctgggcgattgccgtccgtggaacccgctgctgccgtacggcgttgagggtcagggctcgctggcgaaccaggagctgcaggacttcctgttcccgaccttcaccacccgtggcgtcaccaagaccaccagcttcaccgccaacctgtcgggcgccatcgtgaccctgccggccggcgacctgggcttcgccctgggtgtcgagcaccgcaaggaagaaggcagctacgtgccggacgccttcgcacagtcgggccagtccaccggcctgggccagaagccgacccgcggccagtacgatctgaacgaggtctacctcgaactgaacgtgccgctgctggccgacatggccttcgccaaggaactgaccctgaacgttgccagccgttattcggactacagcaacttcggtggcaccaccaacagcaagttcggcctgacctggcgtccgctggatgaactgctggtccgcggcacctacgccgagggcttccgcgctccgaccatcagcgacctgtacggtggcctgagctcgagcttcgagtcctacatcgatccgtgcggcgtgaaggctccgggcagcgttgcaggcaatgccgcgtgctccggcgcaggcgtgccggccaactacgtgcagctgggccaggcaggcaaggaatgttcgaccctgccgtgccagtcgggtgaccagttcatctcgggtgccaatccgaacctgaagccggaaacctccaagagcaccaccttcggcctggtgtggagcccgcgttgggtgcagggcctggacgtgtcgctggattggtacaagtacgaaatcagcgacatgatcatcgctgacagcgtcgaccgcatcctgcgtgactgctacgtgctgggtaacgcttcgcgctgctcgagcgtgacccgtgcggctgacggccacgtcagtgcgatcacctacggcaccgccaacctcggcaagatggaaacccagggctacgatctgggcatcaagtaccgcctgccggaactggccattggccagttcagcatcgactggcagaccagctacaccgccaagtacgacgagcagcgccagaacagcgcgggtgacaacatcatggtcggccgcgtcagcgagccgggcctgttccgcgtgcgttcgaacctgggcgtcaactggcagtacggcgatttcggtgtgaactacaccgcgcgctactactcgggcatgaaggaaagctgcatctcgctggctgacggctggtgcgatgctccgaaccacatggccaacggtgagaccgatccgctgcgtcacaccggttccaacaccttccacgacctgcaggtcagctggaaggcgccgtgggatgcgaccatcgccctgggcgcgaacaatgtgttcgaccacaagggtgccctgcagtactcggctccgaactcggcgttcgcctactacggcggcttcgacgtgggtcgcttcctgtacatgaagtacacccagcgcttctga

SEQ ID NO: 496211 - DNA, 210 bp, Stenotrophomonas maltophilia
atgaagaacacgttgctgcggcaggcatcggccgctgcattgatctacgcaacgctggtgggcgcagtgttcgcgcagggcctcggggtctgcggcggtgggctctactgcgaggagttccgccagcagtgcctggccagtggcaagtcaccggtcatctgcgagtcgcagtaccgtcgctgcgtgcaggacgcctgcggtacccgctga

SEQ ID NO: 496212 - DNA, 1122 bp, Stenotrophomonas maltophilia
gtgcgtattctgcttgttggggatgcagccagcctgccggccgagctgaccgaattcattgccgatcttggggaagactggcagccgttgaccaccaccgatggccaggccgcgatgaccgcggtggccacgcagggcgtggacgcggtgatcgtctgcccgcaattgccggatctcaatgccaccacgctgctggggcagatccggaccttgcgcccggagaccatccgcatcgcgctggtcgatgcgcagcatggcaaccggccgccgccggcgcgcctcattggtgtcgcccaccgcttcctgccgctgccgctggcgccggaagtgctgctggaggcactgaccagcctggaagaactgcgcgaagtgctggacagcccgcgcctgcgcgatgccatcggccgtatcgagaaactgccctcgccgccgcacctgtacctgagcctgacccaggccctggaacatgacgacgacgccgacagtgccgatgtcgccaagctggtcgccgccgatccggcgatcgccgccaaggtgctgcaactgtcgaactcggccttcttcagccagggccgcaccattgccgacctgcgcaccgccgtgacccggctgggcctggccacgctgcgtgacctggtgctggccagcgaagtgttctccgcaccgacgctgtcggccgccgagcgcaactcgctgcaacagcgcgcactgctggcctcgcggctcgccgcacgcctgctgcccgaatccagtgccgaactgggagcgactgccgcgctgctggccgacatcggcctgctgctgccaggtgtgcgcaacgagcgcagcgagccctcgctggccggcgacacccgccctggccatgccgaggccggcgcctacctgctgggcctgtggggcctgccgatgccgatcatcgaagcggtggccttccacctgcagccgcagcgcgccaacacccgcagcttctgggtgaccggtgcggtgcacgtggccctggcgctggtcaatggcgacccggtggacgaggactacctgcagcgcgcaggcgtgctgaacaaactgccgcaatggcgcgaacacgccaatgcgctgatgggactggtgcccagcgacgcctga

SEQ ID NO: 496213 - DNA, 537 bp, Stenotrophomonas maltophilia
atgggtctggaactcgtctcgcccggcaagaacccgccggaagaaatcaacgtcatcatcgagatcccgaaggactcggagccggtgaagtacgaagtggacaaggaaaccggcgcgatcttcgtcgaccgcatcctctccaccccgatgcgctacccgtgcaactacggctacgtgccgagcacgctgtgtggcgacggcgatccggccgacgtgctggtggtgctgccgctgccgctggtgccgggctcggtcgtgcgctgccgtccggtcggcgtgctgaagatgagcgatgaggcgggcagcgacgagaagatcctggccgtgccggtctcgaagatcttcagcggctacgcccacgtcgaagacatcgcccaggtctcgagccactggctggagcgcatcggccacttcttcgagcactacaaggacctggagaagggcaagtgggtcaagctggacggttggggcggcgccgctgaggccaagcagatcctgatcgaggcgcaccagcgccatctcgacagcaaggcctga

SEQ ID NO: 496214 - DNA, 492 bp, Stenotrophomonas maltophilia
atgtcctggtatgcccgatgcatgggggtcgtgctgttgctggcgtccctgcctgtctccgcccgcggtctgcacgtggacctgatcgattacccccggcccgaggccaactgggagcgcgcctacgggctgcaggccgccctggcaagggagttcgaccggctctgtgccgatacctggtgcgaaggtgagtacagcaactaccgggtgatggaggtccgctgcgcggtgctggcccatcgcggaacggtgcagcgctgtgcctgggtggtggtggccagcgagctggccgtgcacgccgataccggggaggtgcaggtcgacaatggccgctgggtctgtccgttggagttggggccaggggtacctgttgacgccttccatgcttcactggaagcaccagatggcctgacggcgaacctgcctggacttgaccatggcctgttcgacgcgctgccggactgcctccggaagaccgggagggtggggtga

SEQ ID NO: 496215 - DNA, 474 bp, Stenotrophomonas maltophilia
atgcgcgtcttcccggcacgatggctggtctgcgcgctgctgatggcagccaacgcccaggcgacccctcaatttgtcgatgcccgtgactacccgaatccggcaaccgggcgcgagcgctttctggcggccgaacgtctgttggtgcgcggctttgacgatatctgtggggataccttctgcgaagggcagtattacaacctgcgggcgatgcgcttgcgctgctcagtgcagcgggccaccggtgtcgtggcccgttgtgtctggacgttcgccgggagctactcctgggtccagaagaccgggcagatcgatgttgaccagggacgctatgcctgcatgctgccactggcggcgggaacccgcctggacgagctgctggcagcgtgggagcgcgccgggcatgaagctctgaatgccaccctgcccggaaccagcacccacgtttacgaggggctgactgattgcctgtga

SEQ ID NO: 496216 - DNA, 501 bp, Stenotrophomonas maltophilia
atgtcctccaatgctgcctccctcaccgaactgctgatccgcgagcggccagcgctgctgcgccgggtgcaacggatactggggggcgacaacggcgccgaggacgtgatccaggcggtgtggttcaaggcccgtggggtcgatgacagccaggccatcgacaacccacgcgcctatctgtatcgattggccgccaacctcgccaccgaccacggccgcgagtcgacccggcgcaaccgcctgctggccgatcactacctgtgggggccggacgaggcgatctccaccgaagagcaggccatggcgcaggacgagctgcagcgggtactcgacgcggccggccatctgccggagccgacccgcaccatcttccggctcaaccgccttcagggcctgacccaggccgagatcgcacgccgccttggggtatcggtgaccacggtggagaatcacgtacgcaccgcgctgcagcgcctggcctgggcccgcagcggccgatga

SEQ ID NO: 496217 - DNA, 987 bp, Stenotrophomonas maltophilia
atgcggtccagtttctccgccccgcgcttgaatgcgcctgtccgccagccgatgagcccgccgaacatgctgcctgccgccaatgacgatgccctggccgagcaggcccgggactggatcgcgtggctggcctcgggcgatatcagcgacgcgcgcatgcaggcgttcgaacactggctgcaacagccggggcaccgcagggccttcgaacacgagcgcgcgctgtggcgcagcgtcgggccgcgagcgcagccggcccgcgtggctggtcgacgcccgcgccgacggcgttgggccatggctgcggcggcaatgctggcgatgctggtggcatggccggaggcgtggctgcgcctgcagtccgatcaccgcagcacgcaccaggtgcagaacgtactgctgcctgatggcagccgtgcggtgctggacgccgacagtgcgattgccgtgcactttgatgcgaacgcccgccaggtcgagctgttgcgcgggcgtgcctggttcgaggtcagtccggacgcgcagcgacgtttcagcgtgcgcgccggcaatggcgtggtcgaggacatctcgaccgccttcaccgtggcgcggggtcacgaccaggtggaaacccaggtcgggcagggcagggtacggatggccagcccggttgacggtggctggacctacctgcagcagggccagcgcgcggcctacggtgaacacagtggggtgaggcgattgggggacgttgcggccgacagcgtcggcgcctggcgtcagggcgagctgctgttggaacaggcccgcgtcgctgacgcggtgcaatgggtggggcgctatcgcgctggcccgaccttcgtgcgtggtgatctatcgcagctgccggcggtaagcgcggcgttgcgcatcgaccgcccggaacaggcgctggatgcgctggccgcgacggctggattgcaggtgacccggctgccgctcggcgtcgccatcgtccatcggtag

SEQ ID NO: 496218 - DNA, 2919 bp, Stenotrophomonas maltophilia
atgttcgacttccatcgcccgggccgcgtgctgcgcccgtcccgcctgtgcatcgcgttgctcgccgccggcctggccagtgccgcgccgtccgtactggcgcagagcgccagcagcgaccacgcggccgtgctgcgcttcgatattccggcgcaaccgctggatgacgcgctgcgcagctacatgcgccagtccggtgtgcaggtggtctatcccgcatcgctggcacgtggcgtaacctctcgcgcggtcggcggcagcctgtcggccaacgaggcgctgcagcagctgctgcagggcagtggcctggcagtgcgccgggtcagcgccgatgcggtcaccctggaagcggcaacgccgttgcaggccgacagtggtgtgatcgtcaccgacacgctgagtgtggccggcgaccgcgtcgggagcggcgcgaccagtgatgaagcacgcctgctcgacagctatcgcagcgtgggttcgaccaccacgctcaatcgcacgcatctggagcgtttccgcggcacctccaacggcgacatcgtcaagggtgtggccggtgtcaccgccggtgatccgcgcgtgggcaacggcttcgacgtcaacatccgcggtatccagggccagggccgcgtgccggtgatcatcgacggtggccagtccagcatggatacctaccgtggctacgccggccagtcgcagcgcacctacctcgacccggacctgatctccagcctgaccatcaccaagggcccgagcctgcaggccaacgcgtccggtggcatcggcggcgtggtcgagatggagacgttgaagatcggtgacgtgctgcgcgagggccgcgacgtcggcgtgcgcgtgcgcggcggcctggccaatggcagtgccaacagcctgccgtcctacagtgcggcaccgcgcaccgatcgcagcgccaccggcagccagttcttcaacgtggccgccgcagggcactgggaccgcttcgatctggtcgccgcttacgcctaccgtgacaacggcaactacttctccggccgccacggctacgacgacttcccgcaggatcggcgcacgctggcgccgctgaatccgccgcgcaccgaggttttcaatacctcttcgcgctcgaagtcggcgctgctcaagggcacctggcgcatcgacgacacgcagacgctggaagccggctaccgccgctatgaaggcactgccggcgagatcatggcctcgcagatcatccgcgtggatcgtgaccgcattccacagtgggatccgggccacgtcgacatggacagctacagcctgcgctaccgcttcaatccggacagcgagctgatcgacctgcgcgtcaatgccgcgtacaccgacaccgacagcgtgatgtacaacagcctgaccggcatcacgccgtggtacttcgaccgccgcaccgagtggtatgacgcgcccagcttcagcggtgaccccggctacaaggatgcctaccgcaatccgctgcggcacaaacgcttcggcctggatgccagtagtacctccaggttcgacacccgcgccggtgcgttcaccctcgactacggactgtcctacagcgacgaagacatcgcgccgggcagttcggcgccggtcatgcacgacgacctggtcaacaaccgtttcctgcgcaacgccgagcgcaaggagtacagcgccgtggcctcgctgaagtggcagcccgatgagcattgggaactgctggccggcggccgctggaaccgcgtggatgtgcaagaccgcaaccgcctggccacgcccgatgcctatgaggtacagggtcagtaccgctataccgaactgctcaatggcaacccggcgctaccgtcgtggcgggccaagcgcatcgcgctgctgaactggtacccggatgccaacggcaacttcacccgggaatcgctgctggcctcgccgtacaagaagggtacggtggccgacatcggtggctggaacttctacgacgctggcaaggcgcaggatctggaagtgccggtcagctggagctggtcgcagccgatccgccgccgcgacagcgcgttctcgccgaccgccagcgtggcctatcgcttcagcgaagacaccatggtctacgtgaagtacgccgaaggcaccaagctgccgagcctgttcgagaccacgctgggcctgttcaccgccgccaagccggtgggcgagcttaagccggagcgcgcgcgcagctgggaaatcggcgccagcaccctccgctacgacctgttcactgccggcgaccgcttggcgctgaagctggcgtatttcgatacccgtatcgacgacctgatcacccgtgactaccgcacgctgtcggcgggcctgatccgcaacgtcgaccagttcaaggtctcgggcatggagttccagtccagctatgacagcggcaaggtatttgccgatctgtccgcgcactactacttcaaggccaagacctgcgcgccggacatcgccgccgagcgccgtgcctatggggcgcagcgcaggaacggcgagctggccaacacgcccgactgcgtggacggcggcttcgagggctcgtacaccaatacccagaacccgccgcgctacatggtcaacctgaccccgggctcgcgcctgttcgaggagcgcctgaccttcggcacccgcgtggtccacaacgccggcccgatcagcaagctggacaaggactggaacgtgggcctgtcggcgatccagcagctgtaccggccaaccacgctggtggacctgttcgccagctggagcttcaacgaccagctctcggtggaagccggcgtggacaacctgaccgaccgctactacctggacccgctggccctgggcgtgatgccggcaccgggccgcaccgcgcggctggcgctgacctggaagtactga

SEQ ID NO: 496219 - DNA, 258 bp, Stenotrophomonas maltophilia
atgatcaccaccgaaccgcgcatgaccaacctgttcctgcagctgggcctggacgccagcgccgagggcatcgcccgcttcatccgcgagcaccagctggccaccgatgtggaagtggtcgaggcgccgtactggaacgatgcgcagcgccagttcctgtccgagtcgctgcaggccgatgcggcatggaccaccgtggtggatgagctgaacgagtcgctgcacgaggacgcggtgaaggcggcgacggggctgtaa

SEQ ID NO: 496220 - DNA, 630 bp, Stenotrophomonas maltophilia
gtggcgaacgtctacagcaggacgacccccttggcatcccccatgaacgcacatatcgcccctgaagacagccgcagcctgcggctcaaggccgccacccgcgacagccatggcgccctggacaagcgcatcatggccggtgacatcttcgccgaccgcagcaacttcgcccggttcctgcgcgtgcagtaccgcttccatcgcagcatcgatgcgctgtatgccaaccctgcgctggacgcactgctgccggacctgggcgagcgccgccgcttggcccaggtggcgcgcgacctgcaggatctggagcagacgctgcccggggccgacatcgcggcgttgccgttcgatctggaactgcccgccgcgttggggtggctgtatgtggccgaagggtccaacctcggcggcaccattctgtacaagatggccgccaggctcggcctggatcgtgatttcggcgcccgccacctggccgcgcatccggatggcgcggcgcgccactggcgcgagttcaccgccgcgctggacgcggtaccgctgagtgccaggcaggagcagcaggtgatcgatgcggccgacgccgcgttccgcagcgtgcacggccacgtcgaagtggaattcgcctga

SEQ ID NO: 496221 - DNA, 468 bp, Stenotrophomonas maltophilia
atgcgttggctctggttcgcgctggggtggttgatggtcgtcctcggggtgatcggcgcgttgctgccggtgatgccgaccaccatcttcctgatcctcgccgtgggctgcttcgcacgcagctcgccgaagttcgagcagcgcctgctggcgcatccgcgctacggcccgtcactgcggctgtggcgtgagcagggtgcggtgtcgcgaaagggcaaggcgttcgccagtgccggcatggccgtgggttttgcgctgttctgctggggagcgcacccgtcgtggcgcctgctgctgggcgtgggcctgttcttcgcggtcagcgccggctacgtgctcagccgacccgcgccgcggctgcagccccatccggtcgtggaagtggacgacgccaatgatccgcgtgcgacccgccgtcgcgcagcgacccctgatgctgatggaaaccgagacgatgctgcctgctga

SEQ ID NO: 496222 - DNA, 750 bp, Stenotrophomonas maltophilia
atgctgatggaaaccgagacgatgctgcctgctgacctggcccctgtggccgcccccgcattgaccccgtggggcatgtacctggccgccgacgtggtggtgaaggccgtgatgatcgcgctggcactggcgtcgctggccacctggaccgtgctgctggccaagggctgggagctggcgcggcaggcccggcagctgcgtgcggcacgcgcgctgttgctgcagtgcgcacagctgccgacgcagagcgaggaagcgaccctgcgacagggcgccgcactgacgatgctggacgctgcacgcaccgaactgcgcctgtcgcaggagctggacagccacgacggcatcaaggagcgcgtcgcctcgcgcctggaacgcatcgagctggaaaccgcgcgcgtgcagcggcgcggtatcggcgcgctcgccagcatcggcgcggtggcgccgttcgtcggcctgttcggtacggtgtgggggatcatgaacagtttcatcggcatcgcccacagcaacaccaccagcctggcggtggttgcgcccggcatcgccgaggccctgttggcgacagcgctcggcctggtcgcggcgattcccgcggtgctggtctacaaccatttcagccgcgtgctggccggcctgcgggggctgctcggcgatctgtcggccgccgtgcagcagctggtgtcgcgcgatcttgatcgtgccgtcccgcgtgccgctgcggcgccgctgcgcgcggtgcactga

SEQ ID NO: 496223 - DNA, 426 bp, Stenotrophomonas maltophilia
atggcgatcaggaccgcgtccgaccgcgacgatgcccccgaagaagcgcacgagatcaatgtcacgcccttcatcgacgtgatgctggtgctgttgatcatcttcatggtggccgcaccgctggccacggtgtcggtgccggtgcagctgccggccagcagcgccaatgccgcgccgccggaacaggcaccggtgtacgtgaccgtgcaggccgacctgtcgctgcgcgtcggcgagcaggcggtggcgcgtgacgggctggcggctgcattgcaggtggccacccacagtgataccgcgcaacgcatcttcctgcgcgccgacacccgcgtgccctacggcgaactgatggccaccctggatgcgctgcgtgcggcgggctacctgaaggtggcactggtcagcctggagcagcgcacgcaatga

SEQ ID NO: 496224 - DNA, 720 bp, Stenotrophomonas maltophilia
atgagcggactgcggcgctgggcgaccagcctggcgatcgtactgctggtgcacgcgctgttgatcggcgcggcctgctggtgggtggcgcgcgcaccggtgcaggctgcaacggctcccccggcagcgctgacgctggagctggcaccgatggtgcaggcaccgccggtgccgccgcgcgaggtcgccaccggcccgctgcagcagcaacagcagcggcaggtgccgaagccggccctgcgcgagcagccgaaggcgccggcacagccgcagggtgacctgccaccgccgcgtacgccggagccgacgccctcgccggacaccgctgacaccgacgttgcacagaccagcgcaccgccgcaggtggcggccgacgcggccgcacgctacaccgcaccgcagaccacggccggcgaacgcagtcgcgccgaggcaacctgggaagggcgcctgctcgggcatctgcagaagcatcggcgctatccgcgccaggccgagcggctgcgccagcagggcgtggtctacgtgcgctttgccgtggcccgcgatggcgcggtctcggggttgaaactgggccgcagcagtggcttcgcgctgctcgaccaggagacgctggacaccgtgcagcgggccagcccgctgccggcgccgccggccgaaatggccggcgacccggtggaagtgatggtgccggtgtcgttcttcctgcgtgggcggtga

SEQ ID NO: 496225 - DNA, 2028 bp, Stenotrophomonas maltophilia
atgctggaacgtcacgggctgtcactggcgctgggctgcgccattctcgcgatcctgttcggaatcgtctcggcgcgctggatcctgcgccaacccaccggcaatgaacgcatggttgcgatcgccaccgcgatccaggaaggtgcgcgtgcctacctcaaccgtcagtacctgaccatcggcatcgccggcgtggtgctgttcgtgctggtcggggtgttcctcagctggtacaccgcgattggtttcgcggtcggtgcggtgctgtccggcgccgtcggctacatcggcatgaacgtgtcggtgcgcgccaacgtgcgcaccgcggaggcggcgcgccagggcatcagcgcggcgatggacgtcgccttccgcggcggcgcgatcaccggcatgctggtggtcgggctgggcctgctgggcgtggcaggctactacgcactgctgctgcgcatgggcctgccgatggagcaggcgctgcacgcgctggtcgggctggcgttcggttcgtcgctgatctcgatcttcgcgcggttgggcggcggcatcttcaccaaaggagccgacgtcggcgccgacctggtcggcaaggtcgaagccggtattcccgaagatgatccgcgcaacccggcggtgatcgccgacaacgtcggtgacaacgtcggtgactgcgccggcatggccgccgacctgttcgagacctacgcggtgaccgtgatcgccaccatgctgctgggcagcctgatgctggccgaggccggcgccaacgcggtgctctacccgctggtgctgggcggcgtatcgatcatcgcctcgatcatcggtgcgctgttcgtcaaggtgaagccgggcggctcgatcatgggggcgctgtacaagggcgtgatcgtctccggcgtgctggcggcgattgcgttctatccgatcaccaccgggctgatgtccgacaacgtgcatgggccgatggcgctgtatggctgcgcgttgatcgggttggtgctgaccgggctgatcgtgtggatcaccgagtactacaccggcacccagtacaagccggtgcagcacgtggcgcaggcctcgaccaccggccatggcaccaacatcatcgccggcctaggcatttcgatgaagtccaccgcgctgccggtggtggcggtgtgtgcggcgatctggggagccttcgcgctgggcggcctgtacggcatcgccatcgccgctactgcgatgctgtcgatggccggcatgattgtcgccctcgatgcctacggcccgatcaccgacaacgccggtggcatcgccgaaatggccgagctgccctcggagatccgcgacatcaccgatccgctggatgcagtgggcaacaccaccaaggcagtgaccaagggctatgcgatcggatcggcggcgctggccgcactggtgctgttcgccgactacacccacaacctgcaggcggccaatcccggccaggagttccgcttcgatctcagcgaccacacggtgatcatcggcctgctgatcggcggcctgattccctacctgttcggtgcgatggcgatggaagcggtcggccgcgccgccggtgcggtggtggaggaagtgcgccgccagttccgcgagatccccggcatcatgcagggcaccggcaagccccagtacgacagggcggtggacatgctgacccgctcggcgatccgcgaaatgatcgtgccgtcattgctgccggtggcggtgccggtggtggtcggcttgctgctggggccacgcgcgctgggcggcctgctgatcggcaccatcgtgaccggcctgttcgtggccatttcgatgaccaccggcggcggtgcctgggacaacgccaagaagtacatcgaggatggccacttcggcggcaagggcagcgaggcacacaaggcggcagtgaccggcgacaccgtcggcgatccgtacaaggacaccgccggcccggcgatcaatccgctgatcaagatcatcaacatcgtggcgctgctgctggtgccgctgttgtag

SEQ ID NO: 496226 - DNA, 504 bp, Stenotrophomonas maltophilia
atgcgcctgtccctgttgatgctcgccgccctggccccggccgtgccggcactcgctgcggaaaccccggagctgcagcgtgccgtgggcgcaccccaggcggtgggcgcggtgcatacgctgcggcagattcccgaggcctgcgcacgcctggaaggtgcgttcaccggcgatgccgccgccccgtaccgcttctccgccgtgcgtaccagcgagcagtgccagccacgtgcgcgcttcgtcgactacaccaaggcacagccgagtgccgacaagggctggaagctcaacgatgtgatccgcgtgcccaacgcggcatgcccggcgcagcaggcggtggtgcgggtgtggcgcctgccgtcgagcaacaaggtcgagctggatgggcagggccagtcgcgcatctatctggaagaggccaagaagcaggcggcagccggccagattccgcaggtgacgatgttcgccgcgcagctgcagatggaaggaaaggcctgcaattga

SEQ ID NO: 496227 - DNA, 390 bp, Stenotrophomonas maltophilia
atggcactgcgtgttgttcgtctcggcagcccgcgccaacccggtgagggcctgcgcatcggcaccgtgcggcgaccaccgcgcggcgtgccccgcagcgaattcgcgaaacgggactggtacgacgtctggttcccgactctgtcacccggcgcggagctggtgaaacaggcccatgaggcgaagaccgccgccgactggactgcgttcttccgccactacaaggccgagatgaaagcgcccgatgctgcgcacgcgctggacctgctggccgcgatgtcgcagcacagcgacctcagcgtgggctgctactgcgaggacgaagcgcactgccatcgcagggcgttgcgcgagctgctggtggcgcgcggggcgacgctggcggagtga

SEQ ID NO: 496228 - DNA, 795 bp, Stenotrophomonas maltophilia
atgaagcacccgatcctgatcgccgcgctgctgtgcggtgctgccgcgccggccttcgctgcgacctgcgaaagcaacttccagaagaagggcaatcccttcgtcggcactaccttcacttcatcggtcacccatccggacctgaccgtggccagcgccatcggccagatgcgggtaatcgccaagaacgccaacatggacgtcctcagcgaggacgtggaaggcggctcgatgctgatcgaagagccggaatccatggcccacaagccgattccgatgatcatcagtgccacctccgaaggcggccagggcaccgtcggcatggtggtgaaggtcaacaagggcgccatcgccccggccgacggcgtgcgcgaagaaatgtgcaagctgctcaaccagatcaagccaggcaaggcgggcgaacaggcggccaaggccactccgcaggcctcggtggtgaccattgccgccgaccgcttcggcttccagctgcgcaaccagaacaaggacaacccggccgcggtcgagccgcgctacaagggcaagacctacgccatcaccggtcgcatcaccaccgtgctgcgcagtggcggcacctacaacaccagcttcgacctgcccagcgatggcagcatcgattttgagcgtgtggccatttcctgctcgttcgcagccaaccaggccgcgtatgcgctggccctgcgcccgcgcgagaaagtcacgctgaccggcgtggtcgacagctacgaccagatcggtcgcgtgttgtggctgaaggactgccgcggcaactga

SEQ ID NO: 496229 - DNA, 1257 bp, Stenotrophomonas maltophilia
atgcgcaacggtactctcctttatgcccagtccggcggtgtcaccgccgtcatcaacgccacggcggcggcggtgatcgagcaggcgcgggccaagggcatcaaggtcctggccgcccgcaacggcatcctcggcgccctgcgcgaggagctgatcgacaccagcaaggagagtgccgcggccatccgcgcgctggcccataccccgggcggtgccttcggctcgtgccgggtcaagctgaaatcgctggacgccgaccgtgcccgctacgaccgcctgctggaggtgctgcgcgcgcacgacgtgcgctggttcctctacaacggcggcaacgactcggccgataccgcgctgaaggtctcgcagctggccaaggcctccggctacgacctgacctgcattggcgtgcccaagaccatcgacaacgatctggcggtgaccgacacctgccccggcttcggctcggcggccaagtacaccgccgtctcggtgcgcgaggcggcgctggacgtggcggcgatggccgagacctccacccgcgtcttcatttacgaggcgatgggccgccacgccggctggctggccgcggccgccggcctggctggcaacggtgatgacgaagcaccgcacatcatcctgctgcccgagcgcgcctacgacgaggccgcattcctggccaaggtgaaggccgtggtcgagcgcgtcggctactgcgtggtggtggcgtcggaaggtatcgcgaccgcagatggccgcttcgtcgccgacgcaggcggcggcaaggactcgttcggtcactcgcagctgggcggcgtggcggcgcaccttgctgcacgggtcaaggaccagctgggcctgaaggtgcactgggcgctgcccgactacctgcagcgctcggcccgccacctggccagcaggaccgactgggagcaggcacaggcggtcggcaaggccgccgtgcagctggcactgaagggccagaacggcgtgatgccggtgatcgtgcgcagcagcgatgcgccctatcgctggaagatcgaagcggccccgctgtcgaagatcgccaaccacgagaagaagatgccagccggcttcatccgccgcgatggcttcggcatcaccgccaaggcgcgcgcctacctgtcgccgctgatcaagggcgaagcgccgcttccctatggcaccgacggcctgccgaagtacgtcactctgaagaacgtggcggtgaagcagaagctgccggccttcgagggctga

SEQ ID NO: 496230 - DNA, 564 bp, Stenotrophomonas maltophilia
atgcgattggttctgttgggaccgcccggttcgggcaaggggacacaggcgacgcgcctgaaggaaaagctgggcatcgcccacatttcgaccggtgacatgctgcgcgcggaaatcgccgccggcaccgagctgggcaagcaggccaagacggtgatggatgccggcaacctggtgtcggacgacatcctgctgggcatgctggagtcgcgcctgacccaggctgatgtcgccaagggcttcatcctcgatggctacccgcgcaacgtggcccaggccaatgcgatggacggcctgctggccaagatcggccagccgctggacgccgtggtgcagctggacgtggccaccgagctgctggtggatcgcatcgccggtcgtgccaaggagcagggccgcgccgatgacaatccggaagcggtgcgccagcgcctgcaggtctacaacgagcagaccgccccggtggtcgatttctacgccggccgtggcaccctggcccgcgtcgatggcgtcggtgagctggacgagatcgaagcccgcatcctggcggcgatcaaggcctga

SEQ ID NO: 496231 - DNA, 1365 bp, Stenotrophomonas maltophilia
atgagcagcgtacatatccttgcaattgccggcaccttcatgggcggcgtggccgccctggcgcgggaactcgggcattccgtcagcggcagcgaccaggccatctacccgccgatgtcgacccagctcgaacagctgggcatcaccctggaccagggctaccgtgccgacagcgtgccggccggcaccgacgaggtagtgatcggcaacgcgctgtcgcgcggcaatgccgccgtggaagccgtgctcgatgccggccagcgctatatatccggcgcgcagtggctgtccgagcaggtgctgccgggccgcgacacgctggccgtggccggtacccatggcaagaccaccaccaccaccatcctgacctggctgctggaaagtgcagggcgctcgcccggcttcctgatcggcggtgtcgccgaggatttcggagtctccgcgcgcctgggccagggccgcgagttcgtggtcgaagccgatgagtacgacacggccttcttcgacaagcgcagcaagttcgtgcactaccggccgctggtggccatcctcaacaatcttgaatacgaccacgccgacatcttcccggacgtggcggcgatccagcgccagttccatcacctggtgcgcacggtgccggcgcgtggccgcctgatcgtcaacggcgaggatcagcacctggccgaagtgctggcgatgggctgctggaccccggtcgagcggtttggtttcgatccctcgctggagtggcatgccgagctgctggccgccgatggcagcgcgttccgcgtgcaccatcgtgggcaggcgctgggcgacgtgcagtggtcgctgctgggccgccacaacgtgctcaacgggctggccgcgctggccgctgcgcatgcagtgggcgtggcgccggccgcggtgatcccggcgctggcgcgcttccgcagcgtcaagcgccgcatggaagtgatcggcagccatggcggcatcaccgtctacgatgatttcgcccatcaccccaccgcgatcgccaccacgctggagggcctgcgtgccagggtcggcgatgcgcgcatcgtggttgcgatggaaccgcgcagcaactcgatgcggttgggcgcacatgcgcaggcactggcaccgtcgctggcgctggctgatgaagtggtgttcctgcatcgcccggaactggcctgggatgccgctgcggtgatcgctgcggtacgtggtgacgcccacgcggtgccggataccgacgcgttgctggaacagctgcaggccagcgcgcgcagcggcgaccacgtggtgttcatgtccaacggtggcttcgacggcgccccgcgccgcttcctcgccgcgttgcaggcccgatga

SEQ ID NO: 496232 - DNA, 579 bp, Stenotrophomonas maltophilia
atgagcgtcgacagcccgctgccgctgtttccgctgcacaccacgctggtgccgggtgcggcggtgggcctgcgtgttttcgagcgccgctatctggacctggtccgcgacagcggccgcagtggtgaggggttcggtgtctgcctgatcctcgatggcgaggaagtcggcgcaccggcgacgccggcggcctatggtgtgcaggtgcgcatcgaagacttcgatgtcggtgccgatggcgtgctgcagcttcgcctgcgcggcacccgtcgcttccatgtcgagcgtacccgcgtgcgcgacaacggcctggtggtggccgacgtgcgctggtgcgaggaagacccggacgacgaactgcgaccacagcacgcgctgctggccacggtgctggggcacatcatcgaacaggccggcgaggcctatgcgccgtccaacccggcgttgctggaccaggccagctgggtcggctggcggctggccgagctgttgccgctgagcgagcagcagcgcctgcagctgctgcagatggacgacccgcaccagcgattgcagcagttgctgggctggatgccgtag
